United States Patent Application Publication US 2009/0119022 A1 - sequence listing, part 8

SEQ ID NO: 8296 - DNA, 1167 bp, Emericella nidulans
ggcggtcttcaactttgccttcggactgcgcaggttgctgcggtcacgtgctattacccccatatccgagatcatgcggaggtcggcttcgttactagagatcgaaacaaattagtataagtacgtgcagttacagggtagtttatgagagcaacataccaagcaatacgaacacgctcaccaagttccattaatcccttgccccaggctagatcacgacggaacttctcctcccttttgagccgtgcacgaagccagagaatttctttgcctaacccgagcatttccttttcgtgtttggttttgttctctcccttggcccttgctttctccatggtttgcttatagcggtcctgaagggtgtcaagttccttgagtgccgcattggcctttcgggcgtaagaagctcgctcttcgcggacgcacggatcctggactctgcgtcgttcagctgagcttccttctccgatacctggagagccaaggactcggcctcaagagtggactgtttgagtagctcgtgcaggtctcgttggtcttcttcgcgcatcgcagctcgttcaaggtcatggttcttcgatttcagttctcgcaaggcacggtgagcatctgagagctgcttccgtaaggtccggacatcctgctgcaacttatttgccggcgatgatgatggggattgagtttcgaatttcttgatcgtggcatcgtgcagctccctctcaagctcgacaattttcgttttgtaggcgcgaatagaagcttgttggtttgtttcgcgttgaattaacgctttctcttgtttgcgtacttcatctaaactatggcgcagcatagataggtctgctgcagttgccgactgctcctgatttgctggcggctgttgctcgagacgctcctccagctcatggatacgtctctcgaaacgctggagcttgcttttggtgagtgcgagttcccgatctcttcctccagatgcggattgcagtttggtctggagctggtcgatttcggcagacaaccggttttcctccaaagcggctctctcaatttcagagttcaactggttctcaagggattccttagtctccagaagagacattttgtcttccttaagtctcttgagttcagtctccattcgcagagatgcttttcggagatcagtcttct

SEQ ID NO: 8297 - DNA, 605 bp, Emericella nidulans
acaaatgactacaaatattatcttggggttactgcctccagtagaacaaaggaagcagagtcggtttggtccggcctcgtcgagtccaaggttaggcacttagtcggagcattggatcgaaagcctaccatcgcggtcgctcatccattccccaaaggatttgagcggattcatattgtcagcaacgaggaggaggccgaggcggtcaagaatggttccctcaaataccaagataagggcacgaaaacagaaacaaccgacgagatcaaagatgcggctcaccaggctgcagctcaaagtggaagagaagacaccgacgttcccggtgcagcaaacaacaccgctgctaatgatggtcggataatatatacaacgacttactatattggtttggagttaaagccggtcgaaccaggtatgagtgccgcattatcttaccgaactcactgactttccacaggagcgtcccggtcattggatatctcttcagatgcacaattcttcaaatccatgtgtacgtcatggcctgggtatcagccaggcatcaatgatctctccattactcatgttcgcaagtgagtcggtttgcacctttccattcgggg

SEQ ID NO: 8298 - DNA, 1099 bp, Emericella nidulans
aagtctgctgagatgctggtcccctcactattcggactctcagtcctcgccgccatcacatctgccctcccagggggtgtgagcccagatcttcgccatccccgacagttactgttaggaacgggacatacatcggaaagcacaatgcccattataagcaagacctattcttgggcattccctacgcccaacagcccgtcggcaatctgcgctttgccattccacactctctgaatgagacttggtctgagccgagagatgcaaaggaatattccgatatctgcgttggatacggggtgagatagcttcctctactataatgggccaggaccacatcggtaaatatactgacagtattagaccgactcaatctggtacccgcaatcggaagcatgtctgaccttgaatgtcattcgcgactcatcagtcgacgaaacctcctctctcccagtaggcgtctggatccatggcggtggcttctatcagggctccggagcagaccagcggtataacacgtctgctatcgttgcgaatgcgcagagaatcggtgcgactcagcccgaacataaacctattatggctagagcaggctgacaagatcaattaggcaaaccctttatcgcagtgacaattaactaccgcctctcaacctggggattcctcaactcagccgagatcagggaagccggcgccacgaatctgggtctgcgcgaccaacgtctcgccctgcactggatccaagagaacatagcctccttcggcggtgacccgaagaaggtcacaatctggggtgagtccgctggaggaatgtcagtgggcaaccagctcatcgcctacggcggccgagacgacggcctcttccgagctggaattatggagtccggcggctcgatcgccgctagccccgggaatacaacggcctaccagtcacagtatgatgacattgttgccaaggctggatgtgctactgccagtgatacgctgcagtgtctccgcgaagtcccctttgagtccttgaacgctatcttcaacaccacgacgggagatccagcgtattccttcgggcctacagttgatggagactttctacgcgagtggg

SEQ ID NO: 8299 - DNA, 776 bp, Emericella nidulans
catacctttgccctctttcttttactcctggaaatacatcgctcatgtctgactcgggatttaacatgtctaagattaaaccgccatagccagttagaatcgtattatcacgatggtatccggcaatgatctgtaagtagtttagctttatcaacaatcaatcatactataactctcttcggatcgaccttgtgtagatttaaacttattctttgatcctcgtttatccgaagcttgccaaatcaggcaaggataaaaagcccatcgtccgcttcttataacatgcatatgaatattcaactatatcctcgatctcactcactcctacttataaacaaatttgcactacactggaacccacagcggcggcatcactgagaacatgtgcaagcgcggagggctcattgcgtcaagaaaagcttgtacaaagcctagctgctcctctgaaatctgcagccaaacgtatttatggttaatactggatattcccgctgcagccatgcgtagagaacatatatattttgaaagattgaatggtagtcttaggagttcaggtaagctcggccttggtctttctctctgtcattgcctgttttccacccgacctcctgcgtcgtctttaagatgcatcagatgggctttgagttctcggagctctggggaatagagttatagcttgactttgctgtgcctatgcctcgtgactcaaaggtatattagaatatcatatcactcttatctaatacatgatgcaaagtagatacgaggacgagtgt

SEQ ID NO: 8300 - DNA, 601 bp, Emericella nidulans
gcctcttgggtctttgagcacgacttccagcccgaagaacgctcattactctttgggaccgatgtctcgcctctgaagcggaggcaagaggaaggctcgtcttctgcctctgactctattctttcggtagccggtggaggtggtgggcgtagtagtggacgtcctcagccaacctcaacctcgtttactcaaacaaggacaacatctacccggccaacatctacgaatactagaacgggaacaagaagtagctcaaacacaacgaccaggacaagcacaagcgcaacatccactcccaccaccacagcaaccggaaccccctgtgccggaaacaccccggacacccgcagggaatggtgcgactattccatcgatacaaactaccacgacatcactccagacacaggagtagtgcgagagtattggctggagctagacgagatcaccgtaatctcccgacgggatctctcggccggcagtcgccgtgaacgggacgatccctggtccaacgattttcgcggactggggcgacgaagtccgcgtccatatcaagaataacctacatgagacctcaatggatcacaatcactggcatgggatc

SEQ ID NO: 8301 - DNA, 491 bp, Emericella nidulans
catatataacccctaatgggaacatttcccacggctgttgaagacccaagaagccgaggtttttgatggctggaataaagcccaacagaccataaagcggcacaagctcaaaaaggaaaatgcaagcgatgatggtctgcgaagcgcgaaggttcagcactcgtgaaacgtagctccaagaaaaggcaccaaaaactcctgagatcattgtaatcacattgatcatccccaacgctgcgggctccatattcaactgggttttagcgaagagaacggctgtaccactgacggtggcgattccatcgctcaacaggaaccaggatgcaaggaataacagaatatccttcaaatgtcgcgtccgcatcggcgttcggccgagcgacttccaagcgtacgccatgtagccgagccatgactgataggccttcccgtcttgagcacgcagcaacgggggcccagggcgcggcctgagccaaaatgccgcaggtata

SEQ ID NO: 8302 - DNA, 205 bp, Emericella nidulans
gcaggagcactatagccatgtcgtgcaatggcgaaggatgaacatgccagtcatacaccgtagcgtctaccaagtcaggctttgtgttgaacgttttgagccttagtcgagggcagtggtggagttgaataagcgttggcacggaggaaactatatgtgatgatctgcgggataaagtggagcagcaggggtgggtagaattgcc

SEQ ID NO: 8303 - DNA, 580 bp, Emericella nidulans
atagctacggcggctggccgagtggccgggccaacaaagaagacaacagcaatatagaagtgattagttacgtaaatcaccgccgctctatccgactcaacgcccccaagatcggccatagatcttccctcggccgtgatcgtgatcttagtcgcagcggaatgccctcttccgcggacgcccctgcagctgtttgggcttcagcaggggctgtgatggcaagtcgccgcagggcattccgggcgtctcgctcctctaaccgatcggcgcagatctgtagcgccttcgacgaaacggtgtcggacatggcgcggtagagctcgacgttgtggatgcctgaggcgaaggagtccagtgttggagcaagtcggcttgttatgcgggaaagacgggcggttatggaggatgggggcattggcggaaggggtttggtttcgggttcggtattttgtgtctggtcggatcgaggatgcagttgtgcgtctctgccttgttcttgctcctgctttaccgtgcctggatgtaacgattcgaggatcctcagttgagaggggtctagtactgatggatcaatgtactc

SEQ ID NO: 8304 - DNA, 760 bp, Emericella nidulans
ttgtggccgtggccgcacggattgaacagatgggatggcaaaattgtttaattgcgccagcacaattcttgtggggccatcaactccgcacagccccagacgagacgaatcatggtcctccaaatccggtaacggattccagaagattgaatagagcttcccggtgagtagatgactgacggattgacgagtatctcttttatatgcctttagtttccgctatttgtctccatagaccaacccacggcccaagcctgaaccgaaaacgtcagagcgtgtgaccagcacctgcgcaaacttgaagtcaaccatcactgacataggtctcccgcaacggttccagtcagagtccagatttacccttggataacccgatttaccgagcatattgggcattgaagatggctactgacccaatccacggcggtccaaagcattaagcatatcgctgtcagtgctagagcggcctgggttttcaccggggttgagcatatcccgcacgtttagaccgttgcgaggcgctgagcccggggttgacgttggcggaggtgtggcaccgttctgaggatgcatcccaggataaggtgaagcatggggtgaagaagaatgacggttatcgtacgaataagctccctgaggcgaagggcgacggtcgtgcgggggtggtggaaagtagggggcagcgcgtggttgatagggagcggacgtcactggcgtcacgggagccagatttgtagggtcgggatagtcataccagagc

SEQ ID NO: 8305 - DNA, 1060 bp, Emericella nidulans
aagaccagtaccgccgatgaccgcgatacggacggggtctatataccgtcaggtcagctccttgttcttacgaagggtctggggactgaccggcgtaggtgtcggggagaacagccattctgcgtgcgagttgtttcggggactcgattcttcgaaagggtttggtgatagaggagacggagcgaaggaacatccaccgacttaaatgaaaagtagagggagctgagagagttgctggatgaattcgcaatttggggctgaagcagaaaatctcagcggggcagcccctcttctggctcacttagtctccgccccttgtccccccacgtgccgttcctcaggcaccaactctatcctcgcccagaaattagaacactacaatatatgatcgcttctgtcctcaaccacctcttttctttcaataaacctatgtttcatcccttgaaaggccatgaaactatctatcagtcctccaaatactaccatgctgtgactgaatgggtaaaaacgttacttctggtcataggacacatacttatcggggaatgaagagagacccaatttgtctatactagtagactaacgctatctatttcgcaggcctccattcatagtgatgcggccccttactgacaggtcctgggtcctctcccggtacgccagggagattatagccatgcgcgccgaagaaatccatctgggcctccataaacttcgtcgggaggtttgttcccccttcatacttcagatactccaatgtcgccgaaatagcagggatatagtggtctgagtcagtggccgccatcacgatctccttcaatgaggggtaggtccggtgcagctcctgcgcgacggtgtcgatatacttcatgtttttgatacccttgtttccagacacggcaggctgcagaatatcggcgatcccttcagaccggataatgcaacctgagcgccagatctgaaggcattttccgagatcaatgtcccagccttcgtcttcggaggcacgcgcgatcagttcgaggccttggcaaaaggaggcaaggaatgaggaatagac

SEQ ID NO: 8306 - DNA, 859 bp, Emericella nidulans
cagtcgaccgtgtccacagggatatttcttgccgtttgtgtaagaagttcaaggatccgctctgtgactgctcgtataccggcgacgtctgtcatttcaatgcattcgacgctcagaaggcgccgtaactcagttttcatctgtacgatgagttcaaattccatacaacacatctcaacctggttaactgatgatagttgcggattgggctggtcttccggaaatcgtatgatggtgaagcagtcgcagcagagacctgccgattgaactcgaccagcagcagaggaaaggcgttcaatgatgcgatacagcctggaaataatagagtttccatccagatcatggtcattctcatttacagcgtaggagataatagcaaccgagttctgttcttcaaatttgacggaaccggtgcgactccgaagctctggtgaaccaggagtaattccagcaaggccacagagttcttgaatctcttggacgatctctgtccggctcacggtctctgtagtcaataattggccctgagagagcggtctattgaaagagaattgatgagcacaatctctaaggtgcaacccatgttgtggctcagcctcctcgtaagaatttggctcaaaattaatccagggagagtctttggcgttttcaatcagaagctctgcaatatcgtcaacagagtaccctagtttgtaaagttcctctatccaggcgtattcgtccattaccgccagatcagatcccttccttaacaaccttcggatgttgtcaatgttttgcgactcaatagcttccttcatcgtgttgggagtgtgagagagatgtcgaacactgtccttataagaccggaagggcgttc

SEQ ID NO: 8307 - DNA, 1312 bp, Emericella nidulans
  unsure (1)..(1312): unsure at all n locations
cttgatgtcaactgcgtattgtatgatcgtgataatcatcagctatgtcgtccattaaacgtataggctccagttgcgccgattccctctcatttttaagctttcagaagatagcaatatttacgagagttcctggatcttggccttgtcttcggccttgtcctcggccttatcctcagccttcttgtcagactcctcaagctcgggcatgtcttcgtcatcctggaccatgatgtcagccggcaaagtttcaatattttcaacaacatttttggaacgtacctcgtcctctccctcagcgcccaaatcgccgggggcgccgcccatcccggaaagaccgccgagtttcgagaagtcaatgtttccaagaccaccctggtcagaagggtcaaacccgccaaagttattaccatagtcatcttctggcgcctcgtcctgttcatcctcatccacccactacccgtggttagcattctactcgctcaataagaagccgaaataaacaaaaagcccgtaccttgtcgaaatcggtcttgaggaagtgaaccttcttagactccttcagaaggcgaggccagtactcctccttcagctccttcttgcgcaggacaagttcaacctcgcgatcgctgtgattcaccttgctgttctcgggttcaatatccgcataaaggtcgagcgaaacgtggtatgttacgcccttcttggaaggtcccgtaaatgtgacattgctgggagtaatgtcgagtttcgcatcggacttagccacatcagcagctttgatgctcacgtagaggtagttgcgctcggcatcggtcccagaggagcgctgggcccatgtgactgttagattacgagttagcagcaatttgaaaacatctagcaatttgcattctcgtatcaaacggcatgagggcaagtaaagctagagtgtcaagactttaggtagtgaaggctgcatacagccgacgcagcggaagcggnggaattgagcactgaagcatacgtaccttcggggggtgttgagggagttcggcctgattttagaatgagaagatatttcggatgaaggtgaagaaaaaattgccgtaagcagtgttgagaatgttatagcaggattcgtaaggattttgcgtgaggcccagccttttaagcggcccctagctgtgtcagccccatggtgttcaacctgtagaccggacccccgggggtttgtttttttcccccccttttgggctctaaaaaaacttacacttttttttttttgggcacttatattctccccccaacactttggggttttttaaaagaa

SEQ ID NO: 8308 - DNA, 1166 bp, Emericella nidulans
aacataactcataggggattgcagagtgagagaccccattccatgaccccaacaacaaggaaccgacccatgtccgccagttcaccccatccaggcgaccccaggcgtgcgagcgctgctggaagcggaagcagaaggttggcctcggcttctatgctctcgtccccaatatccattgaccgatgtgaatagtgcgaccggctgattccagcctgcacggcctgtagggaggctggcacccgttgcagtcaacgtcaggtcccggtcgagccatccgaggagagcaatggcctctcgcatgcggccctgccaggctatatcgagtcactgatccagaggatcagagcgctggaagccttaacgtcgcagaagcgacggcgggtatcatcggacgatcccgatggagatgccacgccgcccatgccgccggaagggctggacagctcagttcagacagcgttgggtgagatcggcttcctttcacgcagcgctatggctgagcctcgtgagggggtcagcgggttcccccggcagctcgctatgagtgagatgatccaggcaatgctgagcctcagcggtgcgactccatcccagtcccgccgttcagaggctgaggccgcaccctggaatctactccttgtgccagatcctcgacagctgctcagcaaagacttcgtgacgccgtttctacgctgctttctggaccgtatccatatttactatctggattttgacagagcagagctggaacaacagtgtgaagccttcttcgataggactagccatgaaacaggggagccatctgcagctgcgcaaagctaccgagacgttagtgtctttctggccgtcagtatcgggatgctcctgtcgccgcaggtgggctgtgtcgatttgctggcacagagtctgcattcagcggccgtcaaacttcttcccatgatcctccaatgcggcaactgtttcagcgagatgcactgcctggtactgttggtggtatattctatgctgagccccaacggcgggtcgacttggcatctgctggggctagcaatgaagagatgtattgcctttgggatgcataaagaacaagacacagattcagcgctgccggtaaaggaatacgattggaagaagtctctcctttggacgttgtactcgctcgtccg

SEQ ID NO: 8309 - DNA, 99 bp, Emericella nidulans
tgatggcagcgcgatggttctaccggaataagggcctacagcctattgcacaagctcaaataacctcaagagcaatatcgcacctgaccgatcacgacc

SEQ ID NO: 8310 - DNA, 224 bp, Emericella nidulans
tttggtgcagcaatttatacgtcaaagaggattaacccatgcgtacgtttagtggcaaacgtagtacgctggcgctggctatcgccggtgttacagcaatgtcgggctttatggcaatgccggagttcgcgccgaaggattcatcgacgattcatccttaaccggcggtatctattactggcagcgtgaacgcgagcgtaaagatgttaccgacggtgacaaat

SEQ ID NO: 8311 - DNA, 327 bp, Emericella nidulans
gctcatcacactggacttgcccatggtgccaggggacaagatccactgcctggacatcctctttgccctgaccaaagaggtcctgggtgactctggggaaatggacgccctcaagcagaccatggaggagaagttcatggcagccaacccctccaaggtgtcctacgagcccatcaccaccaccctcaagaggaagcacgaggaggtgtgcgccatcaagatccagagggcctagcgccggcacctgctacagcgctccatgaagcagggatccgacatgtagcgccacagcgacgaggcatctgggaatgacgccctgagaaggag

SEQ ID NO: 8312 - DNA, 692 bp, Emericella nidulans
caggggaaaaaatggttcaggagaagaaagcatactttggatcttcaaccataggctcagccttccggcggccggacttaagctcctcctgctcacgcaattgtctcattcgtcgacgttcttccttctcggtccagccaccgtagcgagaactgctgccgtcgtcgatggcttgcttcacgcctccaacagcggtcttataaacctcagtctctcgcacagggcgtgttgccttctctatcccagatgtagtcgcattaacaccttttcggagccccttaacaacaggggtattccacgtccatgaggcactctttccgataacgcgtcctgttcctttgagtgcactcgcagttcgtgaagacgccgcaccctgggcagcctcataggcagcacgggcacgcttaacgttctcattctcggcaaactgatgcgctgaagatgcaagggcctttgttgactcgttccattctttggatgccttgaactcttgctgaagagtgtcccggaagacttgccacggggacttatctccatggggaggagggggaggcgcatcctctttatcttccttcttctgctccgacttgtcctcatccttgctttcttcattcttctcctgctttgtctcttcagacttcttttcagtttgctcctgcttctgctgcagccgaggtgtgccgacatgaaaa

SEQ ID NO: 8313 - DNA, 867 bp, Emericella nidulans
cctcggtcaaggctcggtgtttatccgcaattctgcccagcagggctccatgacaattattgcagcgcaaatcaccttggcacccgtctcaaggttacgcttggttactcttaattattgcaattgttccacgctccgcgttatacaccaattcgggaaatggtattaactactaagacgacctctggcggtgagccaaggtcacaagacacattggagaatcgcgattatatcagaaatagtgaaatacacttgcggaaagaaaatctacccctcaaaaagacaaggcgagcttagaaaggacggaaccccgtggcctgcggcgttatcccattcgcttgtccgtagacaggaggtgctggcgctgctggaccctgcgtcagcatgagcctggatccgcctagaatcggcgtgttgtcctcgtccttcttttgcgtcacctctcgtgccttccgctcctcgttgtccttcttcagcatctctatcgtacgtgtttgctcgcagaggaagttgatcataaaaggcattgtgaagtcctggaggccgtggcgccatgacaactccaggatcacatctggacggatcaaatcgtagcaagcatacagcatgccaacatagcattcgcggctgccaatgtccacaaactttacgcagttagcaaaccgtcaagtgaatcgaaagaagactagaaaacttacgtagcgcagcagctcctcgacaacatcgggcttggccgagatggctgccgtctcgatggcatccttgtagagcttgtcttgctttgacaattctatcgacttggcccagcgcttgtggtgcgataattgtcgctgcaatctggcggagaagataggtcatgctttttca

SEQ ID NO: 8314 - DNA, 143 bp, Emericella nidulans
tatcggttggggagttatcgggatgtgtaagtgaggatgtttgccagatgcagcgtgaaccttgcatccggcgattaattcctacaaaggcggcgtaacttctccctatgatactgctcactatcgcaaaactgcctgatgcg

SEQ ID NO: 8315 - DNA, 573 bp, Emericella nidulans
cgaaacagtaaataatatcgaaatttgaaatttgcgatgaacttacaataaaaggcataggagacgcctgctttcactgtgggaaatattcatgccagtcagcccggttatacctatgattgttgctcgcccatagaaggtctctgtcctggcaggcagaagtttcgtcgcactctctaagttgcaccaagcgcaaggcggcttgatgagattaacctatgaatgaatgagcaggggacttggttgaggccttcaaacgcgatagtcgcgtagaagacgacacccagtatcttaagaatatctcccgagacaaacgggacgacattcgcccaagggcatatcgttcgcatctgcggtggtctatgcagcgagatggtaattgagattagcctagaccttgagatttcttacgcgagagccattggggctgatgacagagcatttatggcgcaaattttgtgactaactccgcgtttgggtcttggccatccggactccaaagagaaaagtaagatcaagttgccgctgttgttgatgccgatatatatatctttacagcagaagcatctcgcc

SEQ ID NO: 8316 - DNA, 1304 bp, Emericella nidulans
ataaggaaaaaaatctctgtccacctaaaaaataatacctgtgcgggaaatacacgggagggaaggattccgccccccctaaggtttgggcggccaataccccgaagggggattttttctcgggggaggacctcgaagtgttccaaatggggcatccacaaagggggccccccctttattggatcaacaacaaaaattttttgggttagggtcctgttatggccgaaacccacttttccaaaggggtaaaggggtaaagggaatttaaaaagcctttttgggatttgacaacggcccatgtttaaacaacaaggtcatgacttgcagagaatgttcaaacaaatgctgactgcacgctataatcttgcgcgctaagttaaaaaaaacccccaatcatgggttatgggttgttgcgatcatggagtggatcggacaaagacacgtccgctggggttgaatccggagatatcttgtccggtgcgggggggaggggcgagtcggatgaggaaaaataagggtatttaaacgctccatttccacttcctagaccgaagtcagatctaccgcatatttcattgaaaaagggaagaaagacgagatggccaagacatatcgtattgctactattcctgccgacggaatcggtccggaggtgattgacgctggtgttattgtcctcaaggccctggcagacaaactccaatcattctccctcgacttcacacaccttgactggagctccgagaccttcaaggcgaccggcaagtatattcccgacggcggactggaagtgctgaaaaagaacgatgctattttatttggagctgttggtgcgccaggtaaacaaaccccgcaatacacgttattcactataggaaagaaatgaagtacagtactaacaagtggatgtagacgtccccgatcatatctccctctggggtctccgactcgccatctgccagccctttcaacaatacgccaacgttcggcccacccgcgtcctccgcggtacacagtctccgctgcgcaagtgcaacaccggagaccttgactgggtgattgtgcgtgagaatagtgagggcgagtacgctggccaaggtggtcgctcacaccgcggacacccgtgggaggttgcgacagaggtggccattttctcgcgccagggtgtagagcgcatcatgccgttcgcgtttgagactgcggccaagaggccaaggaagctgttgaccgttgtgacgaagagcaatgcccagcggaacggcatggtgctgtgggatgaggttgcgaacattgttgccaaggac

SEQ ID NO: 8317 - DNA, 845 bp, Emericella nidulans
tcggaacggcagttgcttttacggtaaacggggcgtcgttatgactttctcgttctagttcgatgagcgactggtcggagatcgtggaaccggttggtgtgctagtgagggagaggctggtgtctgccattgcttgcttctcgcggatgctcacatacagcctttccgcactgtcagggctgtgcggtacgaagctgtcgcggtcgggcccggtcaacggtgcagtgtggctccgcggcgacgggtcgaaggtatacggatatggactgcgggggtatacagctggactgggcgctgttgtgggccggtggctcttctttgatttttccctgtcgagggagttgcgtgagaggcggcgctggatgtagcggatcgagttacggacgtcgttggccagcgccgctcccttttccgcagggagaggaatccatcgtgaacgcccgctgtcttttttacgcggccgtagaaattggttgtggtggctgtttttgttgttgcaagtgcggggtgaattgtagttgtggggtgaactagaggggatcgcgagctcagggaagaaatcccacttcttctcgcgaaagtagtggttaggtccagcgcggtggcttggattccattgtggagtaggttctgtataccgcggagcgggcggggcgtcgtcggtcaaaaacgtgaaggttggtgctggttttggatggatttgatggatctgatggtggtagggatctgcggatggcgatggagtgcggttcagcgtggagacggggccggggacggtgtgatcgacgaaatcgggcagatcggctgacctgacaggacgaagactggatagctctcggcggatc

SEQ ID NO: 8318 - DNA, 150 bp, Emericella nidulans
agcctgatctctatcctttttcattctctcctttactgggagagaatctccagtttctccacatgctcttttgcaggtctgaatgttcggattctgttgatttcattgtctattgatgcataaccctggaattgccctgaccttatagct

SEQ ID NO: 8319 - DNA, 906 bp, Emericella nidulans
aaggagcgagggagacattctcttttcccatagccctgcctccacgacaagattcgacaagattcacaacctggtttttgttattgttcgctctggatatcacttctcaaaagagtcagtcttcataatttctcttgattatgcaaaatatgcagcagtagaagaaacagtcaacttaaggacttttatcccgccatctgagctatcctggtctaccacaggatattagaacattggctagctaactgccagattcatgagcgctattcgaggcctaggattatgcctatctgtaaagcctttgagaatacaagcaaactagcacagaagctgctagcaatacgacctcttcatcgaagcaaaaagccactttgcacccctgacctctgtaacatggggcacagtttcttgtctccgctttcattagaggtgaaccttcgtttcacaattcggcagtgtcaagtcttcttttttcttttcttccttccttctttactcttggatatgatatttgcttttcgaccatacacaacagttcgtccatggccgcctccagctgatagcaaggacctaattgggaggaattgcccactgctccagttgtatttgtcccggccctatcccttcctggtggggcaaaccccagtgctaaatagcggtgcttcaaggccctatcttgctggtccgttccgggacctttttgcctcccaaaggtttccctggaaaaaccctttaatcatggggcactgttgggtttaccggcccttttcccttagacctttgtctcaaatgcctttacggctgctgcaacccccatatctcatgggcaaaaggtgttcccatcccatgctctaactctctgtccttttttctcttctttatactcatttacacctcttctctctc

SEQ ID NO: 8320 - DNA, 851 bp, Emericella nidulans
tccatactcaacggcattgaatcagtctgaagcaaccatacccacggagccatcgtctccaatccgagacacaaaacctgagcgtgtgccaaccgcctcttcagaaactgtcacgatgctccccagaagttacgaggcgtcgtctctacgtggaaagcctcttccatccctacctgcagttccacgccctagcacgtcccacccgtcgaagaagcaaccgcccagtcgattggttatagagccttcgatgatatctcctcctagccttattaaccctgtgacgctggaacctcatcggtcccatttcgaccaagccttgttcatccctgcaaatgaatgtcctagcccaatgcctagtccgggaccgccgtcaccttcagttgaccgtcatccgcaggtcccgtcaatgagagagcggccttccacatctgcctcagagatgcgtccggagcagtccgtttgggagtctgactccgaaaccgaagattcagatcctagatctctttctcgaaagccgatggataccttgaagaaggtccgtagtcgagtacagttgcgagttgcaaaatctacacctaagctgcagaataatacagcacaaaacaatgcagccctagagaaattcccaacaatgccggatccaccttcccaggagcgttgctcaagtcccttgaagacagcccttcagactcgtccaggcaaggacatcctgcggccaaccgcccatcaaaccctccgcttagtcgcaccatcgactacttctctggttccgcctcgatcgcgctgcaacagtgccaagtcgcagacctatggtatagaccgttcaacggcagctgcagcaatccaggcca

SEQ ID NO: 8321 - DNA, 804 bp, Emericella nidulans
ccgcttcgcgtagctatagcatgttggtgcgtagtgaaagctctcatgagccctggctgccacgagagggcagtcgacgaaccgtggcttgcccaacattgcatcaatgggggtcactgccttgtcgtaatgaagacttagtctgacagaagaaaaggaaccaattgagaccctctccgactttaatatacaccaagtcatgtgctcttgacaaggaaggagcgattttttgttcgtacatttaccaaaggtgtgcactttcccagataggaagagtgagagtgttatatatctttagctattactattccaaccaacctctgtcagtgccagctgacgacgtaatctgatgatactcacatgacttccgtcacagtgccagacagcctggacaaattgaggctccatgctcaagctggagaagtcgaaccctttgctggtgcaatctgcttgcgacaaccccaggcagaccttttctcgtttccgtccttctcttcagcctcgccaattcgctttgcgaagcaaggcctgtaaacttcttttgaggtttagctcctaccatattgaaacacttccataacgacgtattgtgtagcccagtaacttggctctgccggttgccaaaggaacatggcaggcaacttaataacttcttcctcttgaaattgctctttaagataaaatcttaacctttcttccttcctcagttctctcagcatcttccaccaaactataagtccctctgccctgcctgaaatacaaccttcatcatacgatactttccatcaaacttcaaacatttct

SEQ ID NO: 8322 - DNA, 1075 bp, Emericella nidulans
  unsure (1)..(1075): unsure at all n locations
gcagacaatcgcaagctgtgcaaaacacacaaaaatatcctcactcgctaggcgcctaggtttgttcactgcacaacctgtctgcaaatacctggggtagggtcgcaaccctaggtactgctctcacttcaactcgattagcactatgaccgcaatcgcgaccgcatcagtgatgaacgatcaagagcctgagaaggattctagggtggaccatagcccgtcgcggttcacggcagtgaatggaagggagggccttgcggctggatccgctaccgatggtagtccaagcaatggagacagtcgggagccttctgaagcgtggtcacgcgctgcacttgatcggaccgcgcgacatgaagaagagttaaaagagaccgggaatactggtatgagaatagacgaagaacagttacggcgatcaacttcccatagcgctctcatttcttctagcaggacaaaacggagaaggtcagactctgagcaggaggattcctcccaagtgtcgtatcgtggcccgaaaagcccggtccgttccgcagatggtattgcagggcattctccgcaggcaggtacctccaatggaattatgagttcacaaagcgatacagagtcgaagcatacgtctcctcaagcgcatgccaagccagacgagggtgaaaacactcgaaggtcgtccacaaatgctagttggcatgaatatgacgcacagctgctgaatcagactcagcgggccccgcaaatagacgcttcggatgctcagttggctgaggcgctacagcgcgaagcacagggacccgatgtcgcccaaaagaactgggatggtattagacgaccagtcgtcgaaagttctataccaaacgagcaggcttgcacatcttttcctcaagataggtcgcaaaatgctgtgcaagtcgcacccaagaggaagcgcgtttttagcaacaggaccaaaaccggctgcatgacatgtcggcggcgcaagaagaaatgcgatgaacagcatcctgtctgtaagcacctcgcaccctacctttagacttcagtcggatctaaacgcccggntctgatacaatgc

SEQ ID NO: 8323 - DNA, 1264 bp, Emericella nidulans
gcagtgtgcgaataccaactgcaacagtcaataaaaggtcatccaggagtttaactatgggagggcataccccatcctctcctagtccatttccgtcgtcaaattcacggacgactcgctccagctctttttgcaaactgcgccgtctctgctgctgggcctcggtacttgtaggcaatgcaagaatccacttctgcagtacagcccaaagactaggtccaggtcgccgcggctggatgacgttcaagtcgtctcttttcacaggctggccgtccgcggccacttctacagagtctatgagcgaagtccctttcgatgtgggcattgtgctggctgcgttgatgggaagaacagcatgccactgccccagtctgcgcgcaacaccgcgccagacgttctcggtaaccagatcctcatgggtggccgggcggccgcgaatgaaccggtacaaaagaccattcttaaaccgagccaggagtggaggtgctaagccatatctagcgaggagcgcatgcgagttcgtttctcctggtggaccattctactttagcatatgtcgcattgggcagtggaaaaaggggctcgccggcttcgcatactttcgcggtctatgagaatctctgtatgattaccgtacgctctcatcagaactgattgcttgcctatctcttcttctgtcaagccgggcttgcgggttatagctctgaggagctgcgggggttagaacatgcacgttggtaattcttgagcgacgcactgtattggtgatcccatccgtgaatcgcacaaactcgaccttgttttctggcccctcccagtgaggattcaaggtgaggatgagcctcagtgcggaggcgtgtgaatccgcatgattgtacgattgggcaatgtatcgaggggtagaggcatctgacccattgaccaaccccatcctgttgaggcacggcgtctgaacagcgcggaaatggtaatcgtctgcaatatccagcaccgtcaacatcgttcaacgcataggaaaaggagcgcactcacggccaaatcgcaaactgcggcacaggtcaggaacctaggtacaggcaagtaggcacccaaaatttccccagcacagatgggcggacaagtcacagtagacaacgatagattttcgcgagttctggtagaattctaacaagttctcaagccagaagggtggaaaaattaacctctaagtctaccaagagatccttgaaaggggggtcgatgggccagaagaggcgacgatgtc

SEQ ID NO: 8324 - DNA, 916 bp, Emericella nidulans
tctgcatcagacaaccctagcgggacccatgacaatacggccagtcaggcatctacggctgggcgagagggccttctagagcagaagatatttcccggtattatgcatgaaatggctcagcgcggcagtgttccggaccgagcacttaacgcgcaaaagggggctattgaagagtcattcaaggcatcgacgacgtgagagtaaatagacgaaattggcgatgtggctcacgggctaagcatgagttcgcggcagcagcaatcggtgcagactatatcccgttatttatgtaccgtgttttgagattagaggaattggctgtcagattgccgctcttcccaaaacctgttgcgtccgggattgattgtggccgtgtagcatatagaaaaaggtacttgagcatacttcataatcgctgtatcagacagcccagcttcccttgcgttcgcttaccccccaagtctcatgataatgccctgcttcgagcatgcggggatgttggcgtgcccattcatgaatatataacttcaaagctgtccacctcatacaaacacgattcgccactcccttgttggtaatgtcgttcacaccaacataacctttggcgtccatgttcaagtcatccgctctgagagctgctattggtaaccccgaaaccctacttaattcgtggtcgaagtaacgggcaatgctgggatatcctaacgataaataatcgtatatctgtgtaacgaaatcggcattgaactcctgatcgatgcgctcgctatcggcggattcatttgtcggactttggacggcgttctgccgctttcggtgacggaggttactggctttagaagatgcatccaaattttcagaattaatggtatgacatcttttttggcgtaaaagcttccttggtaaattttcaaca

SEQ ID NO: 8325 - DNA, 604 bp, Emericella nidulans
cacagcgcgtgagaccgaacccgaaacgaaagtacgggctaaatgcagggaaaggcagaagaaaccgaggggtgagactcacgggatcgttcatgtcggctgcggtgctcgcttcgactgaaagcacgattgcaaaattgacacttgtatttcttctcgggagcggacgtctttttggcaggcgagttgttcgccgtacttgatgcactcggggccatttctcaagacgggttgtgtagcgacagttggacgaccaggtttcttagcacaataacggcgtcgcggacaagcgtggtatcgtcccgttagtggcttcacaccggttctgaaggcgggctgacgataggaattcgagttgatgtctgatcattccttgggcgcggcaatacttcgaagtgggattattctttagggtggaggtccagcacagcggacgaggggagcaaacggagtgtggccgcagatcgcgaagacaaacaactcgaaagaactgttgaaggagagatagagagaagagagaaaagaggtgttgaatagggaaggttgctgggatgaggaggggaagaagagaggagagggagaggagagaagagaagaggggggg

SEQ ID NO: 8326 - DNA, 498 bp, Emericella nidulans
cgtgaatcttgcgtaggtgttcagcttccccgccccccttagaaacccatatgtttaagaggaggcgcagtcctcgtacgaagaaatctgcacctgtttccctccgtgcttcagggctctgcgaatatttgacctcaattgggccagctcgttgtctgaaactgtgcgacctacggagtaataatcttttattagcccgttgaggcacaagatgattaaaatgcaaggaaagaggctcttctcaccgtccgacagtgcttgcaacgttgagctgcagcactgcagaagacactttacgcaagcagccagtgtatcctctagaatttgttttgttccgggaccgctgcctgagtcgacatccatgggatctcctgcatcattattgtcatccagcactttggaaacgatgctgattgcttcagccgtcagatcgaggtccttgtgtgcttgtgcaaccccacccaaagcagtcaggccatgtggtcgatatgcagggtt

SEQ ID NO: 8327 - DNA, 960 bp, Emericella nidulans
gcccagttagtccgtcaacccaaatttaggcaaaggtaatatgaataagagcgcaaaatggaaaaactcacctccaacgtacccttcaggcgtggtacaactatcaatgatcctctgagcacccttcgcaacatcccgactacacatggaggtcagtctaagcccatgcatctcttcatagccaggctatcacgcaggcgggcgtaccaaagtgaactctcaccacccttccccgtcctactccccgtgatcacagtatcgccggcttgacagaagacagtctcgtcgccgctaacgacgcagtcatcggtgctcttagtcaaaaggtagtcgacgcaggcttgggcttccgatacgggacggtagaggccgccatcattgttgcaggtgagagctatgcgtttcgagaggggttccgtgggcgtaaatgttgggaaggcaagggttgtgctgacgagcccgagaagggctgtgaagtacacaatagagatgggggaggtcgagggcatttggcagtcgctgttagtggatgcgatgggttgacggtcactttttctgagattgatgctgggatgtttgggccgttataacgaggaattgggagtccaagacccttttttgagctagatatggtggaatataccctgccatatatttgtgtcggctttgacccgaagtgctgagtacatagccggggcgcagtaaacaagcttaggggggcagtgttgttgtacccgaaagacctttcaagccgtatatagattgtcgtagtctttgaaaactcgtagcaataggaaccagctcacattctcatgtgggtatgagccatagactaagaatgcctagcatgaatgtaaagcttcatagtgaggctggagtggtagatatgctggcacaactcctactcaattccaaacggttatttttagctttctttacgggcatgaattttcagcgctg

SEQ ID NO: 8328 - DNA, 961 bp, Emericella nidulans
gtaccttggattacgggagtcatatcgtgacaatagaatagatctatgaaatctaaccacgcccctccaattcgtcataacccatactcgctgagtctcagggtctcagaggtcaggctaattactgaccccagcccattttgagaagccaaagctatattcttctccgtatggcatggtagaagtcagtcccatctttgctgacctctaatccggccctggcccgtcatcggcgtaggggccactcacccagccaaagtaaattcgcgattcagccagtaagcgaaagtcaattcgcgggtcgtgttcacacaagaaaaaatccgtaaattgtccttttttaggccagttgtcatagacactaaaatagtccttcctcttcagatgcatcttgaccgactttaaccagggcagatgctgcccgtctctcgctgcctccgctaggtcctgaaactgcagcaaataatcgttgtcctcccaaagtctatccgagtcctccgccccatgtaggtcaggaagattcaagcccgtaaagtactgcaattgcgtgggcaggacatctttcagttgcagtccatccgagggcgtcccgagtaagacctccagctgcatgaccagcccttgcagtctcgtgaaacttttcattgagccaaagtagcccttgatgttactgaattcctgttccttgcgccaatccttttcgtcgttattcgtcagacagatggagagatatgttagggtcgcggcggcgtgttgctctaggatccgcttcagtttaggcgcgtcatggaggacgggcctgaagcccgttccgctcatgtcctcgaacctgagagacctcagccggctggtagagctgattattgtttccaatatctctattgggggaacatagtcgatcgctctgtgggcgtcactatccacaccgggggccagcacagcaaagtccagttcttccagg

SEQ ID NO: 8329 - DNA, 903 bp, Emericella nidulans
tgccatcctgttcataggtttagtactgtggctctgcagaagactgggaggcagccttttcatatggcagatctagcctttcaggttgctcacaggcagaagcacagctgcattaccgcgccatattcagtgcaagctcgggctggagcttcagggtcattaaaattagctccactcaaagaacgcatggcacaattttcgcaccgcacgttgcatagtgtgtcgagagaagtggatgacttgatcgacccactgatgcgttgtttagaatgctgtgccgtccactgctgttgacttgacaggcaccctttctggtagtcaataatttgttcaaccgattgactggcctgcaatgtttctacctgggcataatgacaggaaacaacattgatggagaccagagattgttccgtacagtgcacctgatgctgacatgcaaactttatcccctgcgttggcttgacaagctctcgtagctttgctgctcccctggggtggtaggaagataaagcttctagcagtattggtgcggcacccaactgtacttatggtacattacagaagccagatgtcttgcttgagatgatatcgaaccaagagacatattccccggcgtctttctctgtccaaacgagagcgagtagattccgcattctactatgtggttgtgcaaacaggccgtggtccgcagcgaagtgcgtcctgatcagatgctctctctgggagatatcagagagctcaaagccggcgaccagaagcgaaagtccaatctggaacggatattctcctgatagctgtaaacaggtttcagattctgcaagaatcgactccgagtagagcttggccgctatatcttcttctccgaaccgataccgcagccgatgtagtacagcagtgccattt

SEQ ID NO: 8330 - DNA, 1021 bp, Emericella nidulans
ttaatttggcctccatctcctgtctgctgactccggaaatttggttttcaggagcgaagcagcgttgtacatacttgcggacgggttccggccattctactcgctttcgattacccgcatctgctgcggttgttttcggctgaggagcaggagtcgcggaagtcgaggccggggtagtaaggctacggcgtgcttgtactggtatgtatgctggggttgcttttgaaatgatcagcgggattctcaagtagatcgcagagaggcagagaagagaaactcaccgtgactggggtaaacggcagtcgtagcagtcgccgaagcgctagcacgccaaggcggtatgccagaactcatattggattcaagattagggcaaacccagagagaagtgagagtaaagaaaggaaaaggaggagaaacgcgaaaaaagaagaaaaggccttgagaagatgacccgaggtgaggcctcaaatgaactacgttgtgcgactcgaaggattaggacacagagccgtctatacttcaagtagtatcgacaggtctagagtgatctcagatacaggaggagacaagtaaacgaaatacaagtagagccaggaaaaacttggactcaaagaagtagttgtcatagatgaggttgaggtccctgttagaattcgtttcggggccctggtggcggtgggcattttcggtttgcgtgagtggttgcacaagtgtgccgtatatccaaatcacgtgaattgcgttttgacgcccagagctgaacagaaattcaacaaaggttctgttggtagttcatcatattcaagtcatatatgtacatattaaacattcatatcatttcagtcgtttatgatcagaacagttcgttggggataggggaatcaaagtaaggattaaaaacgttaaaattggagaaacatggaaaaacaaccgaaattaattttttcaaaaataagcttttggttccttttaaatagcccaataggttcggtaatcctgtccgatagttaagctttgt

SEQ ID NO: 8331 - DNA, 549 bp, Emericella nidulans
ccagcagacagcgctgtccctgtaccgatccagagacccagtccaattccaccaccgagggacagcataatgacagcacgaggcgacacccgctgctccatccactctcatcataccctgtcgaggctacttggcccacctcgacatccgaacccggttggctagcggccctcacaggtgacttcttctcatctggcatattgcgtgcaagtcggaaaatgatgtagcacgcagatggcgtgtcaaatacaatagacagacgacagtgtacggacggtcagcggcatttatgtgcaatgtttatctcatagatgcaagaacgcgatatcaagccaagcacaactgtactgcccttcaaagagataaaggacgcacacgatccttggttgattggagatcttccggtggcggaccgggcgttaaccggaagaaatttgacaatggcctgcatgttattggctgctagtagctcggctcgaattagtcatgggataatggagacagtgggaggtcatggttagtgcttcacgtcgtctgggagataatatg

SEQ ID NO: 8332 - DNA, 148 bp, Emericella nidulans
tccccacaacttgcaaaatacccaatctcaagcatgttgcgtctataaacataacatctatattttgtatctcaatagtgagaaattaattctgtgttccataatatgagaaataaacgcattaatgtcccatccagccctgcatagg

SEQ ID NO: 8333 - DNA, 119 bp, Emericella nidulans
aaatacagggaagaactccaccgtcgactccagagacagaacacagggctagataggacgctggactgtcccaaagtggaaccgcctaccaactgtacacgcccccatgacgcacaaca

SEQ ID NO: 8334 - DNA, 876 bp, Emericella nidulans
tagagacaagatccagagtaatcaagccgactgtcttgtagtaagtcacatatttccaagtttaggttggacctgttcaacgccgtctagaccgatcagtttgtccggcctactgcaggaacaactgcggagagagcgcagccttgcagcagccaaggtctgtcggcgttgcccaccgaccaatctttgtgagcagctggcccaatttcaggttggcgattgcttcatcggaggcaacgggcatcgaggttgctcagaaacgcgtcgtctactgcaagtgccggtcgccatcaaaacagttacgcagttatccccgtcatgatccgggttgttctgatttcctctactggccaagctccagcttcgttacagagtacggtcttacagtttattcaaggttctctttgtcaagatgtctcgacatcaaagacatgttgggttcgccgaccatcgcaatagcctaaaagctgactccgaactcgctagagttcctttcaacagctgctagcttcgccaatagtttactggtggtgcatgggtggaatcccagacggactgccggttaacagctccgtggcattgtcgctttaaggtcgaggcttgaccttcatatttgatcttcggtggaaaaagcaatcttatcacaccgctcataattcagctaatgccgatagcgcaacgattccgactcaaccgcaagcggattgaaggctggcaacgaatcctccttgtatgcgatgatcagcagcgtagacctttacagtattcatcaccacagtctctatatctgctgacaggcacaagtctccaatggacgcaaaaagactgtcaaagctcgtaaactgacagtgacagcccggatccgaaagcaaggga

SEQ ID NO: 8335 - DNA, 910 bp, Emericella nidulans
tggtatccgctggctgatattggttaagaggtgtcgtgtctctattgacggtcagggacatttgaggaggatctacgaggctggaaaatgcacttgtggtctttctcttatacccagtgttcactcggctggttgatggaatctgcggccttcggctactcatgacgttatgaatggtagaaatgaatctggagccaatctacactcaacaagaccagcttgcgacttcgtagtatgtatgtatcgtatgtgtgctcaaaactgagccggagttgatcccagcaaaacctcccgtttaactagtcccttccctagccctcttcgccccggcaccctccccaagcttcgtctgcattgacaccgtgtttgagctggagtccggcgccacaagtcttccctcttcaacaatccaccccttctccttcaaccttccccaaaccagtcccgccttaacccttacgagatcccccgtagccagcgcatcctcaaccgaatcatgtccctgcttaccactcgcgccaccagtctggatctcgcggtctagatgcttcttcgcgagcgtgcgcaagctcattcgatacggtaacccgccgcccggatgcgggtagagaattgcggtgtcgatcacagttgggtggattatgcggcaggcgttgaggtcgttgtcaattgcgtggccgataagcggggtggatggggtaaggaggttgaagaggagggtacgggctgcggcaggagaagagacaagttgaagttgcgagggcgaagacgaagatggtgcggaggattttgtaggggcagtgctgtatggaagcgcatttgtgtaatgctcagggaagacgccggaaaaacgagagttgaggtctaagacttcgcctagtggtcttacgaggacgtctaggactttctt

SEQ ID NO: 8336 - DNA, 607 bp, Emericella nidulans
atcgtctttttttgactttgttttcgacgccttctgcgtcacacctggtgccgcgctgatgaacaatctctcgcaacaatgactcgcaaaccgatgctgtacgagcgtcaagaaatgtccaatgaacttgttaaacaacctccagatctgatgaatatccgaaactgatatcaacttctccatgagtcgcgagcacgactgactgcaagcgattttcaattccttccccctagcctcccgaaacacactgtctacaaataatctgcgctcctcggcgtccccgaattggttcagctctagcatctcattcgctctgctgaaatattcctgttcttcggagtcaagcagaccgtagaaaggcatttcatctgccgctcccgtcgcatattggtcatcgtattcctctccttcgagaggtacgtagtctgcgccggcggtgactgcgttgtcctcgtccgctgagggctttaatcgcttaagcgttggttcttcaattccttcgtcgcgcttccgtttggatgcttcctttttggctttttcggtcgcacgacgacctcgtttttggttttcgcgaggcatgatggcttgctttgaactgaaagttgga

SEQ ID NO: 8337 - DNA, 868 bp, Emericella nidulans
gtacaatgaggttatcgagaccgcgactcgtgccgtcaaggacgaggatctcgtcaagtatctgaagatggcccgcaagacacttcgggagccagccattgtttctgcccttgccttctgctatgctcgcctggaccagctcgcagaacttgaagatttcctgcggtcaaccaacgttgctgacattgaagcttccggtgacaaagcttatgaggagggctaccaccaggctgccaagatcttctacaccagcatctctaactgggctaaattggccaccactttggtacatctggaagactaccaagcggccgttgagtgtgcccgtaaggccaacagcgtcaaggtttggaagcaggtcaaccaggcatgcgttgacaagaaggagttccgccttgcccagatctgtggtctcaatctcattgtgcacgcggaggagttgcaagaccttgttcgacagtatgagcgcaacgggtactttgatgagctgattgctgtgcttgaagctggtctgggactggagcgggcacacatgggaatgttcaccgaactgggtattgctctatccaaataccaccctgatcgtgtcatggagcatctcaagctcttctggtctcgtatcaacattcccaagatgatccgggcctgcgaggaggctaacctatggccggagcttgttttcctgtactgccactacgacgaatgggacaataccgcccttgcgatgatggagcgtgctgctgatgcttgggagcatcactctttcaaggacatcgtcgttaaggttgctaacctggaaatatacgaccgtgccctcaaaaaaaacctgcaagagcgtccgcggctccacggcgggcagcagccggtg

SEQ ID NO: 8338 - DNA, 585 bp, Emericella nidulans
gtacactgtatgaacaaagggagaaagcttcaagctgaacatagggcacaagtgcaccgtccatgcgcattcccagccaaattagaaagcagaaggcaggggcacaaaaacaacatttgcgtcaatccgaaccctcatacaccgaacaatcacgaagccacacctacaaagttgaacagttttagaaaaaccagacaccgcgcgcgaacgtaaagatagcaaaaatcaaaaggaagagaggcatatcagtcacatcagacattaataaatcatacatcgcagcgctgaaagcaggcgcacggctagcagatcacccaatcttgtagaaacacattgtgaagtaggaagtaccaggtcacggacccatggatgcgaagtggaggtagaatagtggtgaggaataagatgttgaatgaggcagatggaattaagcggccgcagtggcttcgacttccggctcaggttgaccattgacttcttgtggtctgttttcgacttccacgtcaggcacaggaacggaactttccctgtcgttgccgacgtcaagcaactccaaagcttcgtttgcgtgagtattctccatag

SEQ ID NO: 8339 - DNA, 746 bp, Emericella nidulans
atgatgctgtgctgaacttttttcttttgagggtccataacaacgaaggtaaataatagtcgagaccgatcttgggttaacgttatgtcatcgttgtggcaactttgtggcgcttgtggcggccaaattcgcggctgtgcaggccaatcgtttagttacccagacattcatctacatttccttctctcatacaagaggttaggctcgccgcacccagaggatacttgttcctccttttaagtacttcactatatctacacaaaactgtataccgaccaatattcacaccgccagcatttgttttaggcgctagagctggtatctgtccgtgcagctcgccattcattaacccggactatccaatcatgaacaagagccgcgaaaacgctcttctcagtcccgtcaacaggaaggccatgcgtaccacggtctagaacagcaaaggttgatcgtggatagagctccagcaagcgcaggcagtcacgatagcccaccacaccgtcttgccgaccacatacaatcagtgtgggcgctgagaacttggcaatttcatcatctaaacgaatagataactgatatcgttgtggatctgctcggatcggctctaacaccgtttggtctgctgctctctctgctggaacgataacctcctcgtacttggcctttagagcctttatgtaagcaggcgtttggatgagaacatttccaagaagtgtcctgtcttcggctggcatgttcgatatgag

SEQ ID NO: 8340 - DNA, 950 bp, Emericella nidulans
ccccgcaacgccctgctggtgtcgtcggaccgtgttactagctatgatttgaccagcggtatacacgaggtcagggcaaaacgaaaatagtacgatggagggaaacatttgcgcccagtagctttgtttcagtgggattgtagcaattagcacagttgagaccatgactgttaccgagccgagtgctaggatccattgagctgcgagccggggtattagccaggctgccaggcaggctgcgaatgtgccgcagatgacaaagggggtccagccgattgcgaactgaagcgtggaccagccccagacgtcttgaagccagaggagctggtaccaaagcactgtaccgacggtcatatagtcgaggaggataaccaggacgagaatggcgaaggagggcgctctgaatatggaaggtggcataatgggatgcgagattttgtgctcccaaatgatgaaaaaactgaacaggatgactgacagcacgagtagagctatctcgtagggggttgaccagcctacgctcggcgcttgactggcaggtaaggtgttagcggctggaattggcagacacgttacgtatgtcagtccaactcacttccagacgaaattgaatagaatcaacgcgctcgtccccagtgcagcacccagccaatcgatcttttcatttcgacttgacgttgcttggttgttgctgagaagccagagaggtatgaatgtcacggccccaaggcacgccctatttatcgtcagctgtaccaccagcaaactagagaagaacagcatatgcctcacacaaaagtaaagaaccaccgccagtgcgtatgctccatgaaagccccaaggaacagcgcagagaagtaccctcccaacggcgctgatgccgcaaaaaatcctaaactgagatttcggactctccctggaggattggtgatcgcaatcatggccaccgc

SEQ ID NO: 8341 - DNA, 242 bp, Emericella nidulans
tatatcttgccaaccggacatagcatcactgcatgaacgcccatgcaacgcaggatttttagcaagttgcatgccacgcccttcgagataatacgtaaagcacgggccagtcccacgacatctcgtggggagtacacgaataacacttaggcatgaacacttgcctccgtgcgctagagtgcgagtgtcataacgtgagatgcatgcgcctgtcgttgaaacagtaatgcacatggcgctag

SEQ ID NO: 8342 - DNA, 1177 bp, Emericella nidulans
agtattctggccagaatattcccagcaaggcccgcaacataaagacgaaaaacgccgtcatccatgaaatgcagagcgcacatgtcaaccacgccacctttgtagtaatagccgccgtcatctggtaattgcgagaggaagggtaggtagcaggacaataaatggacgcttgtacggtaaatactaagtagctaacgatatgcccctgcagattcaggaatcagtcatattcgagaggcaacggggatttaatttgccttaccggaaaattgttgtcccccaatggttgtttgtcctgttccaaggccacgggcagactgaggaagaggtatttgcgatatggaagctggcagatctaaccgccggacaaggtcgatcatcttctccgccgagaaccgaccagcggtatacgttgaggccggcgggatgacgcttagtagatatacgatgtcgcgaggcaagggcgcgggcgagccttgagatcgatactgagatcccgagcttgggacctgaagtgctgtttgggttcgtttttgttggtacaattgccgtctctgcgtcgttgtcctgagtggtgactcgccccggacgaacttgcgtggccgtgacatatcatcgtcaaagtcttctagcggtcttttcggggagtttgtgacggaggcttctggaaagcgggatgaaggagtggcatggcgggatgggacttggcctccggggtatacttgctttggacttggctgaaaaggaaagattattgggccgaaaggtttatggtcaagcgggagcaaaaaatctgtgaacaaattggtccatggcgggtaatcgggaacaaattccctttaaagtcttcaggttattacttgaaccagtcggaatattttgattcggttaatggggaacccaaatttggcttgtttttggacccttaaggatggctatgtttctaccgtttttaaaattgttggcagttgaaaggttaataagccaaactcgaaagggaactttaataatattgttaaagaaaggtaaatttgaggaaatttatttggaaaattgacccctcattttggggacgactttaaggtttaaacgtgttatatgtgtatggccttagtttaacctcgcagctctcgtttttcttggtggcatacataaaaattttgaacttaaggttctc

SEQ ID NO: 8343 - DNA, 890 bp, Emericella nidulans
  unsure (1)..(890): unsure at all n locations
atagtttattaactagaaattatttaccgagataatgtagatatacaaataatttatttaaatatcttaatgcaatataataaaaaaaattcagagtatttaaaaaaaggtatattaaatgatataaaatataaaagagtatctggggttagattagaagcagcaggaagattaactaaacgttatacagcttctagatcacaatataaatttaaatataaaggtcatttagtaaatacatattcatctattcaaggttatccatcatctctaataagaggaaatgataaacctatattacaatatacaaaattaaattctaaatcacgtattggatcttttggtgttaaaggttgagtaagtggagtttaataaattaatataatcctaaaaataactatataagatgaagaaacagtctgaaccatcataagataagttggaataaaagataatcttttatgattacaaaattgaacaggctaatttgcgcatgagagtacaaactgagtgcgcggtctggacctcgatgtnggctagctcatcacatgaatgataaacatgaaggtctactgttgtcattatgagaacatgagtggttaatcgtcggagacagaggtcttactctagaggactaagtgacaagatgcccttcgcgaagagtcggatatgactaggctaccatgctgggtgaaatttttatatacactctactaagatatgcatagaggttgggctatctagatagtgtgtcagtgagtcctagcattaacacaacaccgttaaaatatctttttagaagcttcacatgtctttgatagctagatatctatatacagagtttctataattcttcttctttttaagtgnaattacttctcactatttcg

SEQ ID NO: 8344 - DNA, 553 bp, Emericella nidulans
gtcccttatcgatacctcttggctggtatcattcacacaaaaccaatccacaaaccccctccttccaaagttccaacctcgaacggattaaagtatgcttatccttaaacaccccgcacccccagttgacaatgcccgcgacttccgggcccctaaatcttcactttccccattagctcttttctggacactggcgatcaaaagggccttttacgccgcggcctactaaggtaggtattggggtcaccttccttgtggacctccaccctttacccgaaagaaaaccaagccttacccgttttagtccaaagacatactttggtgtttcccaacaaggtaaaacatcccctcccacatctaggaactaggatgtaagggtgccttcaccacaaagaaaaatcgggtgggagggggaccgtttaacctaatgagccactctgctttgcgcccttggatatcacaacaccatcaatctctatccggtgccctctttatatcaatgctctttatgttcaacctacacagtagcgatgcctctgctttctcaatatac

SEQ ID NO: 8345 - DNA, 154 bp, Emericella nidulans
ccaccatacagcgtcaataaattattaaaaccatactgataacccgcctggacaaaatcactttgtgtgctcgccccttcaatatggctacgacccgccgctaaatcatatttcgacacgccggcgttgcagcatatttggcaccgctgcataa

SEQ ID NO: 8346 - DNA, 552 bp, Emericella nidulans
attattagttagggtactagtcctagccccctttaatctagaaaagaaaatatatatatagctagacttatctagatattatattaaaaataagctatcttaactagtagaagatagtaaatagagactagtagttttttatttttaaagaaatacttatctgtaaagattaactatcttatttataataaaaagttactagctattatttaatatctagaataatagcaaagtatattatagagtataaagaattttactatcttaagtaactataaaaatctagaatactttataaaaaagtaataatttatagaaaaataaatataataagctcttgaacttttatagttctaatttaagataatttattaacctagaaaaaaggctatagtgcctggtattctattttaaaaagactaagatttattagagactttaaataataaatatctttaaggatactcctaccagctgctattaaaaagaaatagagtcttatttttaaatagtatagctactttattcaaggcacccctaacttattatata

SEQ ID NO: 8347 - DNA, 1535 bp, Emericella nidulans
cacttattttttgcatctgtgaaataacttactttctatggctgctgactggatcccccaccgtagtatattgtttcttgcgtgtgggcctcaggcataaatctgtggcgccagctctcggactggaacgcatcttcgacgacttctatcgtgttacaacttcctttcgccagccatcagtcatttatgaatcgtatcccagctcggctattttccgccatgtctgcatttttagcgccaagttcatccccattcacacgggcagtggtgaactcgatgcgaaagctgtaagctccccgcagtgatgtttatgcaatcttttccactgaatttctgaatttattgttgacctgtgaagctatccagaatccttagcagacaagagctttgacaatacaggctgtgagttaagctcggcaaaacgaacgccatgccatcgctaatgcccgaacctcagtactcctcgaagcccccttcaatcccacacgcagacagaagaattcggttctcctcacaattgacctaaccaaggccgttgccgacgaagcaatcgctcgcaaagactctgtcgttgtagcatatcgtacgcaatccgtgaacaatggctataacacagaccaagctcaccaatctatcgttcagatcccattatcttccgcggcctcaaatccctcactttcaatgacccccaacaacagtcactcctccgcctcgccgcggagggcataagcgtctattctccgcacacggccgttgacgcaacccctggtggtatgggcgactggctctgcgacgttgtcacgggcgcaaccactccatcctcgtcgtcctccgtcgccgacctagaatcccccccctccgccctctactccgcccccacataccccaaacctgggcccgtttcaccttgcacctcatccaaaataatcccccacacccgaagcacaatccacccctccccggctcccgtcccctcaggcccggaagacccagggatgggccgcctagtcacatccgcggagccccacccttggcctccgcattgaaaacatcccaagcggcgaggctatcctggcggcaatccattacccaaccacatccgggtccgttaggacataagacccgactgtgggcggaggtcccgctctggaccgaggggctgcaagggacacacacaccctgatcttccgccactgagggcaagtcacaccagcccttgttaactgaaatggaaccgcctggcggccccccaccacaacgaagggcgtaccaggcgactcacaactctcacatcctaacccgctcctctccttctctctaactacatgcctactactacccacatacttctcccacctccccttccccctgtcactccacccactaccgaccactaaccactactcctcacactgatcctccatcacccctaaccacctcctacccatccatactccctatctaccattctacctctactatgccactccctcggaccccttatcttcctcaccaagcccctctatcactttaca

SEQ ID NO: 8348 - DNA, 278 bp, Emericella nidulans
aaaagtggaattcaggactcaatggtgctcagaacccccacaatctattggctgtgcttggccccttttcccaacacacacattctgtctggtgggtggaagttaaacacgcggtgaggaggaaaggaataggatagagagtggaatgaggacggtaggagtctcaaggactggctatcctgacagccttccccgcattcagagttgaccaacatggccagcggcaatagggcacccacctgacccataaatagaggacgagttgggttgagtctgtg

SEQ ID NO: 8349 - DNA, 796 bp, Emericella nidulans
ataattggcagctatatcgaattcctggaagacatacatcgggctcatacccacagaagctcctgaagcccactatgggtgagtaatgcgcgggcgtccgggaccgacaggaatacccaaaaaaattcataaattttttttcagtgtcaaacgcggagggcattatcatcgaggaagaacactttttcccctaccattttttcccctaagcgggctctgtctctgtgtagtagccggaattccttttctccctatgctgatgccggcagttcctgttgagactacgggccccagcggagactgcgatccgattattcttagggattttgctttgcctcttgcctctgcgcgcctggttacttttttttcttcctccccttgattttcttaccccgtctgtcctttttgccctcttggcgtgtgaactccctcactccattctttctggcactttagcttgtctcagggcccctgggctgtccgtgacccttgggtgatgccccacccccgggccctttctaaagggccccgacggattttctttgccgactcgaattgttttacgggccctttccaagggcctttggctcctcaaccgggggggccctttactgcccttaaaaattcccccgggtccccccccattttgggttccccaaaatttgggggagtccccacccgggaacctccacccccccggagggggtctttctttaagggggaacttttttggcccttttggccccctgaaattagaaagggttttgggacgcacacccccattatatattttttc

SEQ ID NO: 8350 - DNA, 662 bp, Emericella nidulans
aggcttatacactgggtttccagctaaccaatgcagaatccaaccgacaagtcagccactatgcgaaagcttggctattggatcgagctcgcgaagctgctggaacggggaggtattaatgccgtcttcctggccgatacttacggcggttatgatacctacgagggcaagctcgatgaatgtatccggcgcgcagcccaatggcccgtcacagacccaaccattgtatgtcacttgtgccgtaaattgagccaaacaggactgatatgagtccagcccatctctgcaatggcagccgtgaccaaaaacctcgccttcgcaatcactgcgtcgacatcatttgagcctcctttcctcctcgcaaaacgattttcgacattggatcatatgacggacggccggatcggttggaacatcgtcacttcatggaagaaggctgccttcaaggctattggcttggactctccaattgagcacgacgagcggtaccgtcaagcagacgaataccttcgcgtgctatacaagtatggcatcacctgcattccaagttggtgactgacgcttatccatggcaggctctgggagggatcataggctccggatgctgtctccccgaaccctgaaacggattcctacgcgcgaccctgacaaaatcagtcaac

SEQ ID NO: 8351 - DNA, 403 bp, Emericella nidulans
  unsure (1)..(403): unsure at all n locations
aagcnnancganaccgncgagcgggttctatgaaccnaaaagggacgcagacacannnanccacgnnacancccannannacaangggagagcngcgnacagacgnaaggaacancaacncaggggggganganaanannaaacgccgggngggccaagcncaaggggccagaaaagggaccaaggaancnccaanggggccggccacagacggcgcagacggcanggnnagaaacnagnggngaacnnaccnnnngagaagccaaagganagncngaagncnccggcgaaaagggggcacgggaacgggagcacaggnagancccnnccncaacagaaccnanagcagccacanacggananncgggncacncacaggccccagcaaanncnggaaggcagc

SEQ ID NO: 8352 - DNA, 259 bp, Emericella nidulans
ctcagcgacgtctatatgactttcttcctgccaaccgaacaggcgggcacgctgaaactgggcggtgaagcccggctgatcctcgatgccgcgccagatctgcgtattcctgcaaccatcagttttgtcgccagtgtcgcccagttcacgccaaaaaccgtcgaaaccagcgatgaacggctgaaactgatgttccgcgtcaaagcgcgtatcccaccggaattactccagcatgcatctggaatatgtcaaaaccggt

SEQ ID NO: 8353 - DNA, 965 bp, Emericella nidulans
gaaaaagtcgtttccagcataattccacgagagatagttaagctaatattgattggatagctgttctcctcgattccacttagtggtgtgaccttgtggtactggtgcctactcctgcttgtggctgaaatcgcatgaatcttccgtatcccactcgtccacgatccagtcgccatcatattcagctgtcagctcacgctaaaatacgggttttgtgtgtgccgagcttcctatttgccaatggaattctggcaaagacgaagacgagaaggcccttgagttcgaacgcctccgaaggagtgccaggctgtttcaggtcttagccttccagtccgtcaggtcccagctcgtttcgaaacccccgtcctgaaggaacagcaattagctggacccgaggctaatcagaattaattaagatttattatctttgactcaaggaatcgctttgggccgacaatttaatctattcaaacccctggctatatattgccattgtttatcctcgatcctcttgtcgtgcttcggagcttcggccctttgcgggaatcatacggtgaaaaacgtggcatcccgctcatccatctcactgacgattctccctttgcagattgcccagaaacgatagtgggacagaatcgcgctgacgtggtgctctttcctgcttcccgcaatgaacgactccagtgcacagggtcgaatcgaactcgaaatcgattatcaaccgagtcttggtgttgggtggcatgaccgcacgtcctcctcgctccgaatctgacacggacttctatttaaccagagcgttggtattggataggccgagctttggaagaggagatacccccacagacctgtccattcccttcggccaagaacggggaacacccttttcaagcgcacccattcaataagcccgagctccgaacagaatccggccgagcttcgatgaaaacgtgagggtaggactg

SEQ ID NO: 8354 - DNA, 186 bp, Emericella nidulans
cgtcaaactgggagcgaaaaaagatggtcgcctgacggcagtgaagatggatttccgcgccaacactggcccttacggcaaccactcactcaccgtaccgtgtaacggacctcgcgctgtcgctgccgttatatccgtgcgataacgtcgatttccaggtcaccacctactacatgcaacatttgc

SEQ ID NO: 8355 - DNA, 780 bp, Emericella nidulans
gcatggaaaaggtcagtcacacagaccgccctaaccgtcagggatgggaggaaatggctagtgtctggaaggctcgcgccgaatgggttgacgaatctctcctagagagcgaacatttgacgagcaataatacaggaggcgaagcctcaacgccaacgcagtcgacaataatcaaagaaaggcaggagaaattggtggttggttggggaggcactgtctgggtaattaatgtctaccctgatcggcctaacaagagcaaccgggaccttaggattggctctgtggaagttgctactatgtgggtttctttgctctcttgcaccatctaaacactaacttcggcttagattacgcacagactgcattatatccggcatatcactatattcgcccagccacttggtcgtgcttgcctatatagaagcagaaaatgaaccggcagacgagcaaattacccgtcgtcgtcctcgtggacaagagcctgagcttcgtatcatcgacattgaaagcaaagaggaagtcagtgctgataccttggcgatcagtcggtacgagaatctgacagcttcggactaccatatgtccgttctgccgccctggaaaacgaacatgccaatatctcaacgcggtgcgttggaagcccttggtaccggcctttgggaagctacgatgtatcccgcacgactatttagttcaaccggcagcattcgcagttcaacaagtagcggagacaggagctcctacaaagcgcccaagcacgttgccttacgctgttgggcc

SEQ ID NO: 8356 - DNA, 216 bp, Emericella nidulans
tctttgttttcacgtacgtagccgcggtagacatcgcaggagatgactgacagttcatccataatgcgacgccagctctcgttcggctccggcggtggcagcaggttggcttccagaatcgacccggtataaagcgacaggctgctgacggtgatctctggcagaccatatttatagcggatcatctcgccctgttcggttacgcgcaggccgcct

SEQ ID NO: 8357 - DNA, 517 bp, Emericella nidulans
aaggattgtcagttattgctgcataaattccaaaggctcgaggagcaaacccaccgctgccataggcattgtgctggacatggcccctaaaccaaacggtcaactggctgaaacgagtattcaggatgtctcgatggtgagatcaatgtaccggtcatgtccgcatcgttcttgtccttaggcgggtcaacgtagggaatagctataacatcgttatgttagcgaccaaggattctgagcaagagcgcgataatcctcaagaaattaaggcagtagcataccgaggtcaagccttcgcatatcttttttggacgtcattttgactgtggacttccgaagctgatacgttggctcgcgaagagatccccaggtaagaggcgatgctggcattcgcgatggttggccgccaccgaacagcggcaagctcggggccgattccgtctggctctggggccgacttatcttggggtatcagaaagctctttagctggcgctgctcgctcacgagatcagtgcg

SEQ ID NO: 8358 - DNA, 1184 bp, Emericella nidulans
gatagtataccatggcttcagtccaaagacaggcattgaagaggtagcatatgcaaagcgcaaccttaaagcaaatcgatatccacccaagatggtttccagcaaattggtgggacgggtcccacgaaaatctaaacgcctcaaaacgccgagtaaaagtgaaagacttcgaatacagattaactttcatgcatcataatcgtgaaatgatagcaatacagggtgcgctcgaacagtttcgtctatcatgcaggagcggtgaatgttgtaccgtggtctgagccgattaaaaatcgccgtcgtggtgaagagtgacgctgttgaactcttcaaaggggtctgctatttcgccgttgggcgtggcgaggccggaattcaaggggactcccttcatcttggaaggattcttttcgccaatgtcaacgcttgcgctttctttgacattgcggaagttgactgtctcatttccgcggctttggtgagggatcataggcggtttcatatggcgaatcaatgcccactgcgtttgccggaagaagggatgagtttttacgtccgaggcgccagctcgagccccaaggcgctttgtctcgtctttgatcagtagcttgcggatcaaagatttgcaaatgctgtaacttggttagtactgcgactaaccagaattcggtgataacatacttggatatttgttgtgcacctccttgttctggaaacggtacttcgtcgcggagaatattaccaaaggttgcattcctgtttttgcccttgaagggtgtcgttccgtagagcatctcgtagatcaggatgcccagagtccaccaatctacagcactggtatgaccgcaccctttgatcacctccggcgcaatgtactcttcggtgccaacaaaggagttggttctgaagtcggcaatacaagacttggtgtcaattgtagggagagacgtgttggaattgccgcttcgtgcgggaatcatcgtaggtgcaccccctggtcctgactgtttcgagagatcgaaatccgaaagcataatatgccccgattgatgtagcagaatatctgcgagacgaatgagtcagttgtttattcacgaacaagtttgggatacccactttctggcttcaaatcacgatagatgaaacccatcagatggagatactcaaggcgggcagtgacctcg

SEQ ID NO: 8359 - DNA, 1237 bp, Emericella nidulans
gggtatgctccagggcgcatattacttgaggcaccggctacagaatacttgcgattccgatttgttccagctccagctccggccgcggctccagcagcaccagtgctttctctccgggcatttctaggccgcgacgacggagtcgtcgtcatgtgtagtttctgttgatgtctgagaagcaggtcccggcgagcgaagcagcgggagcaatcaggacattcaaatggcttttcttttgtgtgggagcgctcgtggcgcttgaggtgttccagtcgagcaaacgaccgaccacacgttgtacagccatggggacgtggtttgtcagtcttagggggagggaatgttggctggaacaacggtatccttcttggaagtgtccttggatactgctgggttattaggacattgatccaaagcgaatgtcacccaaacacgcaccattaacgtctccaggaacctccgagatgctggagaggctctccagctttgggctagtgcccaagctttggtccaccatcgggcctattaacatgccagtatgtgttggaagcgggtgaaaacggccaggtcaacgctggctttgactgtaaataggcgttttgtcaggggatgttcttcgaatcgtgctgctgcaagagctagaattgcgatgcgacaggagcgatcttaggccaccattgatgacttttttgttcactaatgaatattagcctccatgtctagactagtcgaggcggaagcgatcggatcgaagacatcatcgccacgatgaaatgagagctctgggtagtgggtcgggacaacgggccgacgctggggtagctggagaaggcgaggggagatactgacaccgtgagagaaggtggaagacgtccgaatgaatactcccaatagttagaatcgaaaacgagctccgttcgatcgagaagaagaaacggcaggatgaagtagcgcagggcgaggtgggatgtggcgaggtgttcctgaggtccagccttggagtagtcagcagggggttcaggttccgggtttcaggacccaggggaaaagggcatgggagcaccaacagactcgaatgccagccaaagaaagacaacgaggcgatgcgctggttctctggaggatctgggagcagcgttcacaccgtgggagggaggcaatcaagcaaacatcggttggagtgctgtcagtggataagccagcggtagagccggatactgatagcgtgatttggact

SEQ ID NO: 8360 - DNA, 977 bp, Emericella nidulans
gacgtcacgacccgcttccccagaacatcgcactcggcacagcttataatcacgctgttcgtcctgtccattgtgaaccatcttttagagtatactatcatccgagttctcttccatcccaatggccgacagagtcgattccagacccaagttcaaatccttcgcgcctggaatctcagaaaaggaccagccaggcaacgcgttcacctggacagccgtcgacgagcgtgccctccgtccgaaaatcgacctgggggtcttccccgtcctcatcatcctcttcatccttaacttcatcgaccacaacaacttcgccaatgcccgcttaagaggtcagaagaggacctccgccttaccggcgtgcagtaccaaacgtgcatttccattctcctagtcgggtatatcgccttccaaatcccctcgaacatgctcctcaacacgtccaccaggcctagctggtacctctgtgcggctgcggctctctagggtgtcatatcagcggatacagacggggtgcagaatgcgacgggagctatcctatgtcgattcttttggggtgtgctgagtccaaattattcccgaggagtatatattttctattgaagtggtacacgagacgggatatgcagttgcgagtaacgctacttgaacgtgggcgatcttgttgcacaggcatttggagggttaattgctgcgggcatattgggccggatggagggcactgccggggttagggcttggaggtggctatttatcctcgagggggtaaatattattgccttgcaattatagccggtcttatattgccggattatccatctacaacgtcgtggttgtcgactgaagaaaaacaggttgcgcctgagactcgagcttgatcttggtgctgataccagcccagaccaaccaagtctagctgatgccctcagaggactgaagcagtccgcttattgatctgtatcctggaataacgcgaa

SEQ ID NO: 8361 - DNA, 121 bp, Emericella nidulans
ccttgccttctctgccttcaccttttcctactgtgaggtttccataaggcaccccatgccactgggtcattctcacctgagaattgataaagaacaatctgccccttatgcaaagacaaaa

SEQ ID NO: 8362 - DNA, 1134 bp, Emericella nidulans
ctctagcgagagatactccgccatgaagtatttgacccatgttagtataatctgaccctgactctaccttacccaaaagaacctgtatagagaatgacaatactttgaataagcacacgaatcaatatatccccaaattgcaattggaatactatgtttagtacgaagaagcaagcatcgttttagattgacgtgtgggaccgagagtgctattatcacgtgattttgataagggtaaagtggggaaaaccctaagcgcgcacacccgtgaaatctcgtctcacttgccgttggtctgcttcctgacttcgacaaccttgttcacccagcaccggcgataccgtccatcgaggtatgttttttcttgcaaattccccccttatacagccttatagctagtctgggagggcaaatcactgcggaagttctggtcatccattcagttcaccggagttgcgaccggagaaaaattcgagccttgaacgaagatggtgaaaagaagacaaaaagttcttgatgcagaactctcaagtacaaggactcaatgggatcaaaacctctaatgtgatacgcatctctcatcacggcacgggctgaagaacccttttgattgttgcaaccataagggcactctttgcgcctgaggactagtcggctgacttgacgcaaatcccgtccccacttggggctttcgggttttattattatagatacctcatctccagtttctatccactcgatttgagaatctcgttctccctccacaacctacaaaatggtcaagacctccgttctcaacgatgcgctcaacgccatcaacaacgccgagaaagctggcaagcgccaggtccttatccgtccttcctccaaggtcattatcaagttcctgagcgtcatgcagaagcacggtacgttggcactttccgctcttcgacagggaagcgatgtgagaagacgtgaggcaatttgtgagatcaaaaaattcgggttgataactaggcggcgctttcgatcattacaagctctgccctttaagtgcccgagaaattgaacccatcgtctgtcgcaagatggcccgatgcggaagatcttacaagtttccttccctcttctcatattgagcttcgtgtcggg

SEQ ID NO: 8363 - DNA, 105 bp, Emericella nidulans
atgtattccacgacgacgccagtacgatcgacgagacgttgtcgccagagtgagtagacgcgaatgtagcgggatctccagcttggttcatcagctatgagagtt

SEQ ID NO: 8364 - DNA, 1267 bp, Emericella nidulans
aaattgcccggatggattggtagatctcgataagttgaattgcggatgtgggcctgcccccggcgctgaactgggatcggcttgcgatcgcgccagaggtggaagcgccgagtcatccataccgtgggaagacgaccttaatctggaaattggagaactttcatgttcaaggtcgtgctctgaagaacctggaggattcccttgaaggacactaagctgagtggtattgtatgattcacacctaagctggctatcagcagcttttctggtcgaaacttggattacacttacatatcacatcttaggcccagccagtgatatttgacaatcgatttagtgccacagtcattgcaggttataatagctttgatatctttgaagtcagctggcatcggttggctttgaatggccctatccaaatttcggaatgtagcctccatatttgttatggtcttgctacatattggacagcggtaagatgatttggaatattcagaaagacaccgctggtgaatgctgtgaccgcaccgcatgaacacaactgtctctggtgaagtgaacatataatccccgcatattggacaatcgcactgagtcgaacgctcgatacacttatgtgttgtttcgattgatatagggagacagacactgcaagtctggaaatagttaagatatagatccattgaattacctcatttgggctattacttaccttgcaatgaaaaaagtctttacctatacccttgccgatacggcaaatgccacagtcgttgcaatgatatatgcttttactagcatcattgtcccagagtttgcactcgacacaataatattgcgctgctagtccgccgcaccacttacagtattgggcggctggctgggcatggccgcatagcatacatagcatgttctctgttttggggcgattaagattatggtcttcaacctcgtcatggcaaaatcgacaagtgtaccacttcttgcattcgaaacactggagtttgacgtttctttgataatgcgggcacccgagacatagctcttcgaactcttcagcatccgcgtcatcggcatcgtccacgggcagctgagtttctattcgggggtgaaaagttggttttatatcttctgcactcaggttcttgaatatgtcttgtaaagcggaaatggctgtagaagccgaggatatggatggttgatcgaaggactgaccgctccagcgatttggagtttgtgcacttcaggggcctgaaaagaaggggttgga

SEQ ID NO: 8365 - DNA, 1219 bp, Emericella nidulans
aatccaaaccagagtggcgtactgatttagcgaatatggcgttggcgggcgctggtccaccgataatattgcctttctactctattcaatctaattattaccttcactcctctggtctaggtacctgccgcattggcgctgaatgtagatttgcaagatgtctcctgcctcgctcggtcttccgcactcctcggttgatcttgagctggatgcagccgctccaaacatatttggacacgctgtacgagacaagaaaaaggctttgccgccgacgatttttgagtacgatcttacctgcaactcacacgggtatcatcgtaatttatagttgggacattcagttagacatgccttgtaggtcagaaatatgaatcaaaaattgtcaggagaatattcacccttcctacccatctagcggactttgcaagtgcccagaacattgccttactgctgtgctggacggagtaaagaccagctgccccagatccgtcagctttcagtcaggcaaatattacttttgaccatagataactattgctttaggttatattcaggataacttgaaagttgagagccattgactaacttcagtgcaactatactccagaggctttaggaggatcacctgcacttgagtagggatggctcttaacaacatcaacagtacaacttagctacgataacaccaatcccagccggcagggaataagcgcctcaaacctaaagacggcctagtcacaaaatgatcggatagctggatagaacgacggaaatgccggtatatctgctaggcgttggacttttattaaacctaatactaacaactgatgtctatccaaattaggccgtgatccaaggagtcggcgttcgtgcatcgggaatggacttgtgcagaaatatcaggctaagcgggcggtctcggtgaaggagaaggaaagagacctggggaaagggtctgatggtggtgctgaagcttaaagatgtgttctgctggggacaagatgtgtgattcgagatgtcgagaatgttctgctgtgaccggttgtcgtatttcgataacatgactgggatgctacagttggttccaggaattacaggtattatacagatactgttgccataggacaagcttgtgtgctcaaggtcaattggtcagatttcctgctggcgttatttactcatacttgctcgctaacgcgagtaggtggaagtcccagat

SEQ ID NO: 8366 - DNA, 182 bp, Emericella nidulans
gacctacccctactatcagctgtccggtcgcctagcctgatagactgacagtcccagggctctcatgcatgtgtgatgagatctcgcagcctgctccctcctggttctcatctgacgagccgtcaccactatctatggagccggccttccgggcgttcgtctcggctgccctccccgggacc

SEQ ID NO: 8367 - DNA, 626 bp, Emericella nidulans
gggcgcctttgtatacgtgcgtattgagcagctccttgaagctctccctttgttttcgcacttcaatgagccctaaggcttaaagaagctggcagtgaagatatcttaaagcttgttttccttactggaatgatttacctgctttgttcgcatatttataggcatccatcattcatattatcattccatatacaataattctatcatccgacaatatcaatcatggccctcacacgcagtttagccttacgtataccatgtaggagtcgggtgctcccctagaagcacatacctacccacctctctccgcttatatgccactggatcatgcagcgtgtgcgtcctgacatccctccaaaaccgatcaagcccgactctaagactggtcgctctggccccagtgacctcaaacaccccactagttaccttgagcccgacatctgttgtcacgatcttgacgcttgccacccactctgctacctctccgcgctcctgaggcgtcagggcagtgcggttggagctgtatttagtgtagagactggtcaactggtctcccgctcgatcggcgagtgcttctgcggctcggaggtgcgcgaagaactcgccgtaccgctcgaggatataga

SEQ ID NO: 8368 - DNA, 456 bp, Emericella nidulans
gatgtgcacgggaacccatttgcgaccgacaagttgaatccaaagaagaaaaagcaaacgaatacgtcaaatacaccagcgtcgagtcctcctacaacacccgatagctccttcaaacaagcggcgccggagaaggtgtcgtttccgacagtcaaatgtccaaattgcccgcgttactttgttgtcacacgagtagcacagcatctagatcggtgcctcggcctttctggcagacaagtcaacagaaacaaaacaccacaggacaacagcagtaacacgccagtttccgctccacccaagcgccccttggatgacgatactccgtcaacactgccaaagaagaagaagcttagtgctccaaaaaagttatctgggaaaaaaccacctcctccaagcaagttgaagaacggcatatacccggacatggccgaaatcaagaccgcagcgaatggggat

SEQ ID NO: 8369 - DNA, 562 bp, Emericella nidulans
gatctagctggaaagcagcaacataagttcgcacttattgcttgcacttattgcttgatgatctcgcatccagaaccaaaaccatgaccattagagcagtgtataagttccgcgtgaacagaacaggaaaaggcagcatagatattagtgaatttgatcattatgtcatggcctaagtactggactgacggaatatgtatagaaggcacgatgcctgaaaatatgcctgagaataaccgtagcctatcttatccgatatgcacttcccatgacatcgaacccttaaggacaacaaagcctatccgagaatacacctattctgcacgaaactattaatctctttggctgcttggttcttcaatgatttctcaccctccgtccagtgaaaactagttggtgttccttcttgggcagttgcgtcgtgaatccagcatgaaatgtatgcatcaagcagagcactgggcggcgggcaggatagaatctctgggacgtcagctagcgcttggtgaagattctcagttaagaattttggcgccgaacgctgcatctcccacgcgagaga

SEQ ID NO: 8370 - DNA, 1165 bp, Emericella nidulans
ggatataagtccgttatccgatactgctgttctatttaaccctaattaagcgaaaatttatgggttgacttgcctgcatctcatccaccctccagtgtgatgctgtcaaggctgatgctctatcggtgcaggggattgagtttgatggattatcagtccctacttttctgtccctttcaaacgctatgacacaaatctccaggctttatgttcagatgtctggctttatatatcatgtatccaagcagctccacaatattagtccaccatacacaaaccaaaaccggatctttaaaacgcatggccacaatggcagagtgtctagatagctgcaactgaagacttctacccagctgccttgggctagaaatgaatcgttttccaagtcagcacccacagccaatactaatcttctcgctcgttctgcaaatccagttctgcgaccccacggcgggccccccttcttgccgtagccggtcagctcccagcacggcaccctcattctcactccgaagtttatggtctcgcacaaagagatagacaacggtagctagtccggcaaacgccacatactaatgcagcacggggcatacgttagcatagatgcactgacaggtttcagggtggaaatgtggcgtgccgcaatgctaaaatatacttcccataacccataccattcccaacgcctcaaaatacatctttctgacaaagccgtcttgatctgcatttagtccaagggcgccaatctcctctacactcgaagcggcaagatcgccgttgaattcgcgcgcgaaatttgactttgagcccagctggcgtgctaactcctcgttcttcgcattcatctcattctgaaatactacacccccgacaacaaccgaaatggcagtagagagagatcgcacaaaccccatcgtctcagtaacggccgcagtgtcccgaacacttgttgcagcctgaacagcaatgattggtgtttcaatgttcatgcccacaccgattcaaatgagaatctggaagatgatgagctttgttatattggactcagagttaagactaatcagcaggctggagccgagtaccaaaagctcctgggcaacgttcataactgggaggtatttctcagtttgctgcttgaagatccctttagtagggttattcgccg

SEQ ID NO: 8371 - DNA, 769 bp, Emericella nidulans
aatgccctccatcatggttcgaaaaacctagcacgtccgcaggtctgcgatgtggaagcccattcagaataacgcccgaggcaccagcaagtgatttgccgcacaacgggctgcgtgtcgttcaacaatgaaatgaggtacggaataagttcaggaaggtggggagtaacggcatccatacacgcgtcggccaccgcaccgagcgtcaaaacagcggcctctcgctgcacccactgttcatgacgcagggtttccttcaagtaaggcaggatgatttcaaaaataggctcgtggtagacgttcgagaagacatccagtgcagcggccgagcacttgcgtaaagtccattcatcctcaggatcgtctccaaactcggagtcctcgatttcgccttcgctcaaatcatcgtcctcatcctccggcgcctgcgccgacgcattcccgttctgctgtccgccggctttggagacatccatacggctggccttcgaccgagcaaactgaggtttcagatcttcctcacgatcttccacgtcagcgtcctcgccttccccggcaagccgaatagcttcctcctcgtcatataccatactctgtagtagcaccggaacaatcttgggcatatgaggcgccaggggttgttgtaacgcagcctgttcacccgcaaccagccaaaactcggccgcatcaaggttcagttccgggtcgatctggctctgctgttgcataatgatgtagttgaccagcccatccatgtggggaataagtt

SEQ ID NO: 8372 - DNA, 447 bp, Emericella nidulans
agactttatcgacagcaaagaagacctcgtcacaatttaggagcaccccaccagttcgctctcggtgatggaaggtctttatgatctacataatcgatgacaccaggaatttccaaagcggcttctgtgttgacactgagcagcttggcgtgagctttgtggacaaaaccatacatccgtacagttcgttcttttgcgcgggaatgtcgtcggtgtactgagcttctccggtagcctgtttcaatgccgagaggtgcggcccggctcggcctagaaccctctgctggtaagccgctgaagcctcgttatctttctctccagttgaaattgctcgctcaatttcagcgaccacactgttatccagatcactactcctggcctcgatctgtgataatacgtcatggtagaatcggtagaagaacccgagagcaagtgactttcggtaag

SEQ ID NO: 8373 - DNA, 106 bp, Emericella nidulans
tcggctcctcaggttatatcatctaacttaggccctacgatcatcgacctagacacgagccgtaccttgactacggcaaagtggatctgctactcgctgctagcgc

SEQ ID NO: 8374 - DNA, 1317 bp, Emericella nidulans
tgagatatgggatagcatgaaaccggaggcggccatgctcggtggagcgcttgcaacacccaatgtatcaatgatgtctaacctgattagctaggccatgcttgcaatcgtttgctttctgggcgggccactggtgaacaagatcggagtcaagtgggcgctggttctgggttccatgtcgtttcctattcaggggtctgcgtactactgcaacagcaagttcggcaatcaatgggtgagtcacggttaacctccgtttctggaaccctgtctgacgaatgcaagtatcttattttcagcggtgccatcagcggcgccgggacggcgtgctggtacgtcgcagaggctggttgcattatgaccctcgcgccgtctggtgctcgtggaaagtatctggcgctgtggattgtgtcgagaaacctcggacagcttgtgggaggagccatcaagtgagtaccgcataaattgagatatgtctcagctgacatccccagtctgtcaaagaaccacgtcgaaggagccgatggtggtatcaccccagacacctacatcgcctttgtgattattgaatgtcttgcgtgagtgcatcatgtgcagaccagtcggagagagtgtaactaatagctcagcctcccattcgctctgttgattgctccctttgaacgcgttgtccgttctgatgggactaagatcgtcatggccgaaaccctctccaccaaacgagagttcaagcagatcctcaagaccatgacttcaaggcttatcctactgtctggaatctgggcactgtggtcattcttctactcgtgcgtatccctcagcccgttaagaagtatgagctgaccgagacagcggctcctggtccacatacctagggacctacttctccgtccgcgcccgagccctctcgtctctcatctcaccctttttctgcatgtaagtttcaccttcagcattgacttgctttagctgacccctcagcgtcggatgcttcggcctcggattcatcctcgacatgaagggcttcagccaacgccgccgcgcccagatgggtctctacactgttgtcattcttaatgtcggtgtctacatctggtccattatcatgcagaacaagttcaaccaccataaccccggccacatttgactggaatgacggactgtattcatcatccttcctgccgtacttcttcgtgcagacaaccggcccggctctcgcagtcgtacatggaccggttgttgacgtcattcgcgacagatgcgcagggtaggtcaacaatctaccacttgacagagggacagtttgccgagttatct

SEQ ID NO: 8375 - DNA, 704 bp, Emericella nidulans
  unsure (1)..(704): unsure at all n locations
cagactctgcctttccacttaagctggcaaacatacgaacngtatgcgaactcttgctaatcctatgtagttgatcgagactggccggtttttccaatataaagggtcactgcagtctcgggcgcaactgaaacgaaccattcctgcagcgcaggagcaatttcagtctgcgttagataatctatctgaacagatagtacgtcgctctttgaggagttgtcgtggagcctgccaaagctgattgagcacagtttgtcgccaaggcattcctggaaagagactatgaagtcctcaaggcgcgtaaagctgcgctccggtccaagcgccctgcagatgatgttgtcatgggggaggcaaaggcaacggttacttctcaacccgtgtctgtctccgaacaaacggcagccggcgagatagttcccaaccccagcgaatctaaaccagtcagtgacactgtgaaaattgagcagcaaccagatctgaatggagacgagccaggaacggccaatgtgcctgcgaaagaagaggagtcacatggcgccggcgccggtactgcccccgatttttctggtcagaatgctggagagtcggaacaaatgctatataactcaatgttgaacaacccagagcataacgagttcgatcttaatctcgatttcggtggcaacaacaacaacaacaacaataataataatgacaacgca

SEQ ID NO: 8376 - DNA, 1168 bp, Emericella nidulans
ccgctggctctgatacaggcatcgtccgttggagagaattacgacacttgttgcctaaagcgaagccaagcactccatctatcgataacggttggctgcccttgccggtccaagatagcaggaatctgcaaacagcagaacaaggaaaaaagaaaaaaaaaataggacaaggagaaaataggaataaagagaaagaggagagagctgccacgcgtgcgacaggatgaaacaatagaatctaccatacaaaatgccgcacagcccagcctagcccagccgtcgataatgcttgtttgcttggtctgcgaaccaacctcgctcgaaccggtgccacagtatggagagacggagagactctacacagcccagtgcgtatctaacggatctaccgtgtcatggctgggatagccagcagagcggaccggcgctctgcggaccaacagcaagccaccgcatcgtgcatccgatttgctcaatgcgcgattcctggatagcctcgccaaccgcccctgggtccgttataaatagacgatcctctaattcgctttcgctcttggcgactggatcgacagcgggtctcagcgggtctttgtggtgtgagccctatcagaatcggtcccgaccctagcggccctgatcgacacaccagacccgtgtatcaccattcaccatcaatactcagcccttacggctgccccccatccatccatcgggtcatcaggaacgtctccacaacccacacgccatccgccatgtccgatttctcatataaaagggggttcgcagctgcggtttggagccgtgtaacaagaaacccaacaccacaaaaccactcccaactcgagtcaccatgcgtttcctccctcttctcttaacagccggcctgggaagtctccagctggccgctgcccgctgcggtacccgcaacccctcagagcgcgtgcacgctcagcacaggtacttcctcgatatggaagaccgggaggctgcggcccgcgccagtgtcggcgtaactacgcgcgaggccttcgatgtgacaattgacaccttcgtgcatgttatcatcaccaactccactgccgggatcaatatgaccaccttgccgtcccagatcgacgagcaaatcgacgtgctgaatgagaactacctgggcactggtttccagttc

SEQ ID NO: 8377 - DNA, 1190 bp, Emericella nidulans
tttttctattgtgtggacgtcgcaaccaacatgtttaaacttcgaagtcgctggaggcgggaatggggcttgcaaggcctgatgtcgcaaagctgacatgcgtgcttgaagctgtagcagagggagacattcctgtacttgtgacaacgctggaaagatgcacaaaatggctagggaatagagcatggattccaatatgattcgcgccaacttggcaatgtatatggtggcaaactatgaaagtaatgtacagagaaataagtagggatttccgtaataatacagcatgggatttgaacctgatacaattccggtagctcctggttcctgatgtaggttaacaattgttatagctttggagcggcctggcgagtgacatttggtagcgaattgccacgcgcctttgctgctagttgcagcagctttcgctgtccgtgaaggatgccagacgcgactaccaaggacgagaacccaggttagaaggaacaagcttccagcctggtgagctgaagccaacggggtaggaacgaggtacagtagggtcgtcaggccgagtccaacctgcatacaagcgaaggcgacaactccgtgaacgcctttcttcgcggaagggggaagaagccgcttcatgttcggcgacctgcgcgtgtatgcccaaagagccattatagaggtgaacgtagtcatagccagaatacgatggtctagctgcactagagaaggattctctagcatgttcctccaccaacggtctgaacggtcctcgtggcgagagtacctatcatcaaacaattccgacatgggaggtgcaagtccgttacccatccagggaaactcgttgtagataagtccagcatctagaccggcaacaagagcaccggacatggcggtaacgaaaacaagaagggccaaaccggcaacagaccgacggaaaagcttaagcttggggtctttgagcgagtccagcagtttgagcccggcttccgggtcggacaaaaggcgatgagaccgcaagatagcgagaccattccaaagcatcgccgtatagcagacgaacgcagctcccaaatgagccgtcaaacgatactgactgacacgagggtggcttccgggggcaaaaagatcgtccttcagtccggacttgaccatccaccaaccaataaaaccctgaaatccaatcaagcctgcaa

SEQ ID NO: 8378 - DNA, 897 bp, Emericella nidulans
  unsure (1)..(897): unsure at all n locations
gctccatagtagacgccttgggcagcagtctgcatccgcaccttaaccagatcgaagggatggccgacaataacggcgcatactccgccaacgccgccagcggcgaaggagcgaatttgagccgcagtctggttgacggccttggtctcggcagccttgacggtctcctggacggcgtcggaggcgggcgattcggcggcggacatgatgcggcggcggctgaagcgggtagagggatgtaggttacggtgaggaggagtggtnnaggggnnnnnggncctncggtgggtnnngtgntcggtggggggggtgttgggttttgtttgttttcgtggggtggtttttgggttgttgggttcgggttgttttttgtcctgttgtggtcgggcctccctcctggctgacctcccgcccgttgctggcgttcgcccttgggggccttccccccggctccgctgctatttgtctgcccccggtggtccccgtccctccctactctgctgccccggcccctttttacggagggggtgtcagttcccctaaggggctaaattggcggttcacagtacaaccagctgttgcctattttatcgaaaccctagatctctccaattctcctgtcaccatttaaatctaagtctttggcccccaaaagctaaactttcatatactcgtaatcaacgccgtaagtcgagtataagcctagcatttcgtcaaactagtacaattaattttcaaggaagccctggctttaataaataaccattaagtacaaggtaaccctccggtctccttgtccatactctcgaagccctctgaccggtatatgccgtacaaatgatatatacacnctcttatcaccctctaggtacctattccaagaatctaaaatacatc

SEQ ID NO: 8379 - DNA, 1631 bp, Emericella nidulans
attgtggcgcggaccctaccttgctttacggctgccggtcaagcgagacttcttgtgtatttgaataggatggcctggtggaatggaagtagattgaggcgtagagtagctagtaactgtgtctttcgtactgtattagaatagccagatgctacttcactcgagctcagctattgtgtcatccagcttcagacagcatatgtaaaacgagtaatcacctccaatctcgagcagtacaggcatttaacgaaccagactcgcttaccctctgaagccagcgtgcagatcagctctcttcactctagcggggctggcagttgcagcatcaccggtactggtgagcaagtccgtcatgcctccaataatcctggacagctttgtgatatccgcaagctgcactacctgatcgcgtgtcttccagcccaagtgcgtcggaaaccgctcgtttcggaagaagtactccaccagctctttttccaccgttccgtcattcaggttcccaaacgccacgactggcgccgcaacttcgcctaggctgaattgctctgtgctgttcgtgaaggtgtacgtcgggttgaatgcgcgcgaggtgatctgccgtgcgagcttgctgttagcgagcatgagcggagtcagggtggtgttcgtccagtagtgcgtcgtttccgcaaatatgctggcgttgaagatgtggttgttaccgaagaaggcgtctgtgcggctgtttcaaatctctattagcatgacacaatatgctggcaatggagggctactggggtcaggtacctgaggctagcgtcgtgctcaagaatgttgtgctggtttagctggtcgctgggcgatgtcagttaagggtagtaatacaccagcatggtctaaacacgtacagggtaaaccaggtcgcattaggttcagggttcacaacaattgccatgtcgaacatgagcgaggccaggcttggatgaaagttcagggcttcccctagggcacggataagtttatcccgcgtgatattgcgtccgtcatgcggcagaaaattatggttggcaagtgtgttcatcatggggcaggggcctcggtctgtatatactttatcaattgatgtaatcgagataatgggatttgggggctagggctgctttgcgtacaatcgcctgcaccggggccgggtccattgggagatatcacccgccccgtagtgagggttggccgcagataggccgaggatcgccatcaatggagttgcaaccttcatagcgatttagaccgagactgcttagagacaaatgtgagagttttggacgttcttcagtgggaaatgtgggtatttatgcctttgctgccggggaggccagcaacaaccctcagctatgatgacggccataacgcagatcatctagacacgcctctaattagattcagggatacatcagaacccgccaataaaatctggttgctttgtattttggattcgtttcatgagcactgaagtggctctgttgatccccacggctcgtactcgtatgtttaccctcttcaagtatccgagcaacccgagccggtacgagatacgaaggtaaagagacgagttcctaatgaaggcttcaggatggtctatttcatccaggctc

SEQ ID NO: 8380 - DNA, 889 bp, Emericella nidulans
accccactatgaatctttctgggcccttctaacacctggacagagtctgttgatttagcaccagcaagtacctaggtactaaagcatccggtctgcgcgcttatagtcattccaaaactccctcaaaccaagtataagctcgtaacgagtctcatccatacttcatccatgcatacatacactgcaaaaccaccccggacccgtacagtatcccaatcaaccctgtacccggggtaagctgtgacgtggctgtgcgatgctaaagcaactgcttgtaagttcatggatgagaacagttctgcctgatgttgttctaactcttatatcctttgctttcacctcatttatccagcaacgttatcgttctcgtccatcaaaatccgcattaagaagatacaacgtacctataaaaagtccttgcgatgaagcaaaccctattctcgctcatcttcatcccgctcctcgcaccagccctagccctagtcgcgccgaaacttccaactggtcttggtcttgagaagcggcagactgtgagtatatactttattccagcatctgtttaccttattttctccgtccggtaggcctatagtcgagaaggagtagagtatagattttctctacataacaaacatcttacgctccctgtacagccccactaaacaactatcatactatagcagtgctccatgcttccctgcgacgaaaacacagcgatcctctgcagtctcctaaattgcgggacttgtgaggtaagttgggcttggtttcttataacagctgctgtcttgacactctgggagaacagaacgcagctaatgattcattgtaatttaacagggcggagtctgtactggcaccgcaactggtcggtctgaggctgattctg

SEQ ID NO: 8381 - DNA, 1143 bp, Emericella nidulans
  unsure (1)..(1143): unsure at all n locations
cgccagcctcagggtccttgtccttggaagcagcgtatcccgggttcgccttggtgtcgactgccttatcaccgggttctggtagcttaagacctttcgcggggcgtgacccaggtttgatagcttccagcttctcctcaatatactcactgaaagcctccattgtttttgctccatcgtatcgttcgacttgcttcccatcatggtataaagaaaaggttgggtaaccgtcgatttcgagcttcttgcacaaatcaccgtatgccagacaattcatggcggcaaaatggaagttgtaaaagccctcgaacgagttcagagaccagctgtcagattgttttgtagaggctgcggagaggggattcgaagtctaatatttcctgtcagacaatgacacacaaaagcacacttcaagatgctcacataataaaactcgtataaagtctgccaagtgggtgcaatcgctacgcaatgaggacatgccggagagtattgcttgatgaacctagtgagatgtcaggccgcctgctcagtttggtctgggagtcggtattgaggcgcaccaataaccatctttaaccgtttccgcaaagttctcaggagttagctccttcataggcggaacctcgacgccattgaagagcgtcggtgtcgagtcatcagagtcagcccttttcacgaggcgttgggccggggttgacccttcagaatgagaggcaaaagtcgggagggaaaagagtgaaagcaacgaccatgtcaataaagagacgcgcatattggacagatgtcaaggtttatggctttgatgttgtctgaggaaaacgagagtgcaagtaaggcgacctgattcggatttattaaaggtggcacatgngggaacaaatgtcgaaggcgggtcgatcgaaaaagatgcgccgtacaaccgcatagcataagccgtatgtgagaactcaaaagtcgcatatcgagaaatatgcgagtcacccgcacgcctcgacggaagactgaaagaatgcctggattaaccggggtgggtaattctttggtggatcaaccaagggccgtggtgctaagctctgacctggtttcccttcaagcacctacctttccgccgcgaccttacgggccaaagattttttgcac

SEQ ID NO: 8382 - DNA, 1111 bp, Emericella nidulans
aatgagaatactcgtcccgggtattctttgatgactcccgtctcgcctgatcaaattcaactgatgggtttgccaacctggagtaaggttgtgattctgggagtgatgtctgagaaacacgagtctgttccgcgaacgcagtaagagtgctgtgaattcctgcaggagatctaacagaaggctgtgggtgcctgtattctacagcagaggctgcaggaatttttggggccagtattggccatgggtgcccgccgacgtcagttgaaagtcgagtcggctctcaaattggtttggtggtacaggctgtgtttgaatggtactcgggactccaggtagtcctagaggatttttgaagatcaatcgctgcgcatagcccttacactcgcgttttgatttggtacagttcttgcagattggcttctcttctccacatttgatacgacgttgtcggcaggctgattacatccgtcagtggtttttgcgcaaaggataatagtacctacttaaacagccggtcttagtgcgccttctaggggttttcgcaacagccagctgctgcgttgccacaatcttgttaggttgatctggcttagtacccggcgggtttgagctaataagattcacgttctccatgaccgcagagtaaatacatctcaaggaagggctccaattccatagtcaggatgtaagggcgcttgatgaatgtagaaggaatgactatgaatcctgaaggtgtgattaactcgggattgtggggagttcgggccgggggatctggatgtcaagtgtcagccccctaaatggtaaggttattaaccccaagtgcacggaccttaaagcgcctcgtgtttattatttagctgggcctctcgtgcatgagatcctctatccaaattgatgatagagggcctgtgtttctgttgtggtcatattcttaatgcgagagatagagaagtcccaacgtacagcttatatagaaagagaccttgtcgtattaacgttctcaacttttgctgggctacaatcagatatattgggtcgcaataacggtattttaactgaaggcggggagagcaaaatacaccgcctgcagtatccggcagaacggcaa

SEQ ID NO: 8383 - DNA, 608 bp, Emericella nidulans
atgagcaggacaaggacattatgccagttgctaaagaggcggatggggatgaccggataccgggcgattttccattcgttgagcatggcaagagcatatgtcaacaggccgaagattatgaggcaaagaactgttgcagagccccaggggtagtcgacgccgccgaattggaggccgaataggaacatgagggtggcgccgacaattaaaagcgtgcccgaccagtcgatggttttgagaccggcaataagaggcgtctttggtgagtcaactttgaggaaaaagaataagacgaggaaagagaacccgccaattggcactggggaggttagttccaattgcagctgcagcggacaggatataaagcatacagttgagatagaaacaccaacgccaggtgacgctcgtcgtaaaggcgcctccaacaagtgggcccagagcgcctgcgatggcccaagtagatccaaaaagcgcatagtacatcgggcgttctctgccgacagtcagcaacataaacctgaatgagcagggcaaatttctaactcaccgaacactgaaaaggtctgaaacagagatattggccaatgtaatgattccaccggctccag

SEQ ID NO: 8384 - DNA, 801 bp, Emericella nidulans
atttaaaggcggcggcggggaaaaccacccgaaccagatagaaaggagtcatatttagcaccatccataatgcacccattcaaggctgacggagaaacccagactccagcgcccaggaagcaagccccgagccagacccaacgagcccaagcaaacgagagacaaaaaagccacagctgaaccaactgtggaccaaagaaccacaacagcacaaaaccgagccagaactaccctcgaatgcaaggaaaaaaccaaaggcacaaaccccgggtcaagcgacaacccacccatgagaccgcagtgtacccaacaagccccctcaaaagggaaaaaacctttgactccaggaggcccacccaaaggacgggaaggctggctgccgccgcaagcccccaaggaacctctcaaaaccgtaaaaaccaaaaggaacccaaaaagggccccaaccaggcacggaaaacaaaaatcttcgagccgaacgccaagacccccccttccgaaaccaaactaacataaaagggccccaacaccacacccgataccaaaaaaaaaaattttgccggggttccccgaggggggaaatacccccaaacaatgcccaaaacccccccacccaaacacaaagtgcaaaaaacccaaaaaaaccccccgcaaccaaaaaaacccacaggaaacaacgttgccagggaaacaaaccccctgtttaggcaaagcaaaaaccacacctataacacccgcaaccctcaaaaaaaccaaacaaccacaggaggaaaattgtgaaattcacacaaataaatccct

SEQ ID NO: 8385 - DNA, 1129 bp, Emericella nidulans
ggacaataggggcagggacgagttgaataaaggtgaaaacgaaaaagagggaaaaggaaaaaaaggaatgtaaaataatgatagacggtccaaaaaaagagaaaaagatgagagaaagaaaaatccaaaaaatggaagaaagattgtttagcaagataacaaacaaagatagaaaggggcaaaaaagaacacaacttgggaggataacagcaacacaggaaagggtctggatagagaggcaatacaagaatcatcgcatacctcgggaaaggagccccccctgcggcctcaaacgaccaggccacggcctcccccacaacttgcttgaacaaaattgtttcgttatgctggtagttaaattttggttgctgctaaacggtgagggagcaaggtctagttccaaaggaaagaaaaattctcttttcttttatcaggaggtttcttctctttaagtcgaatctggtatctttatggcttgtgttttactaacatttagtactaaccgaatcaaactgtttccgtgattacgtttcgttttcaatatgtcctagtagataaactgcagtatccgcttggcccttgccaatcgcagctgatattatcagcatgcccaggttttgcaggttttgcttgtctgacataccgaatagtaaatgcctcacctctcacgctgcagggaataatcggcgtgtgtattcattgtccattaagattcgagcaatccaaataatgacgccagccagtagtaaatcccgtctgacggtggagtataaccatgcctcaggcctccatcatacttcctacttgcgttctccatattgcctctccccgttcagtcccctacagtggaggaattctttgtttttaatgtactaaatatcttataccttatttaatgggccctctgttcctatttctcccccctccccccccaaactccttgaacccttgttttgctcaacaattagtgctcctgtcgagcactcctcggttagccattccattataactccgcaaatcattctagaagccgcgcatactacaaatactgagttacacatccaaccacagctgtactctgtacaactcgaactaccgcagcgtcaacatggaacccccaagcaggacg

SEQ ID NO: 8386 - DNA, 1728 bp, Emericella nidulans
cagcctatatattgcgtttcgggcctcactaacgtaagttcatgcccaggcctaagcaggtgactttggactctgctctccaccatgtgcctggtagtgatgggccattttcccgctatacgcgctgatgatgcggacggtggaatccgcgcacacgacggccagtaaatggccttcacaacccaaaaatagtgtcagctgcgcaaggaattccgaatcttgtgcaaggaggaacgtaccatcaattttccacctcacagcccgaatctctccacttccatcatcgttatccaaatacgggtcccccttgtaagagccgccgaataccttctgaccatttaggcggaagacgcgcaactcctcgtcatcagagaccacggcaatcaggtccatcgacggacagtatgtgatcatgtccgtcttgcattttgccggcagcgacttctcccctactggtgtgagttgcggctggatcggggaaccaagttcagccattattgaaggtaccaaagtgctctaggccatcatataatacgaggcaatctgtcgttgctgacgcgaaatcgcgagttttttcttggatttgttgttgattgttggaacgtgacttgcacgggtggaaactgggattcttggcggtgggtgtgtacttcgaaggcctgtatacttcgaaggccaaactgttctctatgcttcggaatgaatctaggatcttactgtactttttttttattattgtgataaagagattgattatagctttgttaaaatattaccaggcttaactcgttctataattgaagaatgatggtgcgctaaacttacaaacatataaaaaatcccgctctaatgccacgctatacctattaatgctactatactcacaatgctgaccaaaaataaaaataactcagtgctaatcttcagtaagatccggcacagacccagattgaatcatgtttttcaagtagctcaattcatcgatcatctccttcatcgtggcagactgggacaagagcacgctgtaacggctgggatcattcgtaggggttatgttcctgtcaggactcgcatcctggacgccctcaggaaaatgaagtgtcgtcgccggggggctcgttaagccaaggcctttcaactccatggctccaaaaaacgccgcatggcgcttggggttactctcgagaagttcctcgtcttcttcgtctatacaaagcccggggatgttgaggtctgatggagataaagcgattgtaaggcgcgggacagggagctccattcgtggagagtcctcatggtgagcgggagacttcgagcccacggtcaggtgtggggtattcgggtcgctgggagcattgtccgtggaggcgtcggacagctctgagagcccaattgctgggacattcagtgacccctctttctcattgaacgtcaagcatgaagttacagactccggcgaaaccatatcagtatcagtgctccattcggagaaacggcttttttcgcaagggccgtcaccatccacagaatcaggctcggtgaaagtagagaaatggctagccagagcctccatgtccaatgccctctctttctcgtcgagatcacgaagtgcctcatccataaccgaggaaggagagtttggcagcgtgggaagcctcttattcatgacggctactggggtaggtgtcatggattctttataagactgcgagtcgtcagatgggcgtc

SEQ ID NO: 8387 - DNA, 639 bp, Emericella nidulans
ttcccctctagaaacggaagaatcaatcgcactcagaacatcctgcaccgcagggcccgtagcaaaatgcgcatgattccttcccatgcacttaacccccccagattccagaattaacggccatgtagaatggtatgttccatggacaacggtctcgggcagtttatcgggattatccagtgtgagtctttctagtaggcctgattctgcttcgacagttttgatgctgtggccttgtgttgcgcggataagatagtgtgcgggtgtttggtcggtcttggaagccgccagggctgccgttgtcgctgttgctgttcctgttgatgttgctgttataggttcgtcttgagcggatgccggttcttcgacctttgttggcaatgtatcggtttgttcggagggaggttgatatagcaacgcaaaccgcttcttatccgacgtctcgacggcacttatgatttctgggaaggtgaccttgagcgatttcagctttcgccatgcgagctgtaaacatctcgttagctggcatgcccaaataccttcctattccatccgctcctatctcattatgttttgacttcttgagcgtgaatccagacataccacatccgctacattcgcatacccctgcgaatcgat

SEQ ID NO: 8388 - DNA, 835 bp, Emericella nidulans
attaaaaggcggcggcgggaaaaaacacacgaacgagagagaaaggagagcaaaatgggaacaaagagaaagaaccaattaaagagaacagcagaaaacaacacagaaaagcacaaaggaaggacaaacggagccaaaccaaaacacacaaggcaagcttgcgaaaaaggaaaaaacagccagtagaacgaggggacgaaaaggaggaaggagaggacgaagacaggcaagacgcgatcgcaaggacgcaaacacgcaaaaaacggaagagccggggacggccagcgctagggaagaatagggtaagggacgaaagcagtcaagcacggggaagactacagcccccagaaaaacccacggcaggccggcgaaaagaggaccgccagtcgcaaaagacacaagaacggactgaagagggccaagactacccgaaaggaaagtgcacctcaaaccagaaactaacataaacaaacctaatctaaaaaaaaggaacctcaggcaaacgaagggtaaaatccaaccgaaacgcacccccaaaaataatcaccgcagaccaaacagagataaaaacaggccgccccaaacgagggaaaaacacatagctcaaaacagtccggacacaaacggcaataaaaggaaagaaaacacacggaaaaaagagaaacacgaaacaagtcaaaaaagaacagcccaaaaaagtaaacaaccacgaataccgaaacgaaaacacccacgacaacaaaaccataaaaacgcctatagaaaacacaactaaaccaacagcagaaaataagaagcacgataaaaacattgcaaaacatacacaccacaatcg

SEQ ID NO: 8389 - DNA, 905 bp, Emericella nidulans
gccttggatcctacaataatacttaccccttaatcattcgataacaggaacaatcccccgaatgtcaattgtacacgctgctcctcgtcgatcctgacgccccaactcccgacgaccccaagtttgcctactggcggcactggctcgtttccggcttgactgcctcacagagcataaacgcagagtctgcaaagacgttgacggagtatcttgggccgggaccaaaggatgggtaagtacttgacgctcctcgcaatcttttgttgtgtatgatgtggtgctgataccggtggttgtgcacagttcgcgccctcatcgatatctcttcctccttttccgggaaccggaagggttggcattgagcaaggaaagacgttggcggtgaggagtttgttcagagacggtcgttccaggcggcggagtgggtacagaagcatgggctggtgctagttggggtgaattggatgttgggggctggagatgggtggacggagtaggtagagccctgtcatggttatgactgacgacctggtcctgttatctttctgtcctcttgtagaattctcgttcttagaaaacctgcagatagaaagggcatctgaattatctagagttgtccttgtaatagtacctctaatatcgcggcaaaatgggtaatgaaggacagggcgtcagcattgttgaacgcgcaggcgtgctttttatagccaatactataaaaatcgatcctcaggaattcccttcctctgcttctaggagtagcttttttatatgtaagttgtcacggctaaacgagataaagcttttgtccatgtttgttattacgtctatcacagtgcccccctacacatccatgacaactgtacctgtatcttaaactgcgagaactgcccaagtagaagaga

SEQ ID NO: 8390 - DNA, 527 bp, Emericella nidulans
ggaagtccatctataaaatctgttaacagaagcaattcattgaatctcgatgtggacggttggtggcggtggttgactcggcgattgaggttgacgatgccgcgggagagcccagcatcaaaacatcggctacgcgtcccaccactacatcacgtgagtatatagccataaatttcaggcatatatacctggtctcggagtcagaccatcaacaatcacctgcatctgatactgcatcacttggagacgtttaccccgcgcatatacgagtgaatctgtagaacctttcagatgtactaacagtcaccctcagaagttcttctatagacaagtctgtatccttttccgatcgtgaagtgctagtgctgtttttagtatttcgaatggcccatctgggcgcagatatatattgagagagctaggacgcgaattgaaccctgagaaaaggctattcttttccagaccacgagtgcttcgtttcatatttctgagagcatcactgctatgctaccagagagtagaatata

SEQ ID NO: 8391 - DNA, 1163 bp, Emericella nidulans
ctatgtgactgctataggatttgaccaaatttacgaattgtacgtcgcttcggtgaagcatttaacctagacttgttgaaggggtgcataggtactcatttccacggatgagcagaagggccagttgcagggccttgtacggccaaggaatgccagcatctagtaactcaaggttggtatttcgtgggaagagagaaaagcagatcaggcagagtcagaatttatatggctgcagctctaaaaccgttcgtagggtaaaccaagccctcctacctgaactcagtagacgaaacttgttcacgagtaaagtagaatccattatttcttcgtggtgcctagcgctcaatgcagacggatggcttcctcggtggccaggtccggctgcgcccatagctttctgaagcggccttataaatggaaaagaaatttcatcgcgcctgagccactcgccctaggccaggaggcaagtaagtggtagtcagagttgtcgccatagtcacatgtctagtcaaatgccctctcttgccttcagcctacacatcaaagctcccttctcccaaaggacatacgacttctgatcactccagttctcgctttccttacatagctcaaggtcgaagttccagagcacccgggcaagaatcacacgcatctccgcaaaggcaaggttccgcccaatgcagttccgcgggccgacggaaaatggctgcacgaccgcccggttatcatggtagaattgggaggacgggttggtctttgcgtctgggagccacctctcggggatgaagttgttggggagatggaagttgctttcggatctgtacgcgccggattggtggacggaaacaatggtctgcatatgtcaatcagtacccggccatggttttcagaggtagttggaaggtgaggtttactcctgggggcatctcatatccagaaataaatgtaggagctaatgtcctccgctgcaggccagtcgggacgggcgggtacagtctgaacgcctcgtcaaagcaagcgagcaggtacggagctccgtcgagactttctgacgtgatgtcggttcgctcttatgacagagcgacttcgacacgattttgttagactcttgggttcgaagatcagacgtactcccgacagaacgtcgggcgttcctgccgctt

SEQ ID NO: 8392 - DNA, 1602 bp, Emericella nidulans
actgtttgtcttggcctccgcacactcgctgcttgtaactctctcagtatttttcggactttttttaacggcctgcacgcagccctggaggatcaggctacaattgccggagcagacaatggatccccacagccttccagctaacgacacccggagacgccgtaacgcgctggcctgcaatacgtgtcggagaagacggacaaaatgcgacggcaagagacccaagtgctcattctgtgccgagcgcggcaaagactgcttctaccaggagccgaaagatcttccaccgtctccgcgagtggcgttttgaggaaaagggcgagatgcagcttctaatcctattctaggttgaaggcggagctctcgaggatatgggaacaactggatcacatagcggcaatagtacagggccgcaatccaaggagctctgcctcccctaacgagcagcagagccatgctcctcttacagcccctggtgcgcctcaggggtttccattcatgacagtccagagtgaagcattcttgatcttgcttggcctggataaatacttgcctatgcaccttgagcacgtggaacgcggaagacaaattatcagcgctaaaccatcgctggagagcattgtgatggttgaccttgcggatgcgtcagtgtatgtgagcacgcatctggattcctacatttgccctgcccttgcgacgcatgtctgactccatattcaccctaatatagtcttctgcacgcattcacggaacagatatatatctggtatccgattctgcatgccgactttaccaatgaattcctcgaggcagtaacatcttgtttccctttctcgttgtcctcatgcctgacgcttctcgtgttggcgattggctgcgtggtgaagtgcgaatctatcgtcgacgctctgcaggcacgcccggaggcagcatacattcaagcggcctcggcgatgctcccatgcgtgcttgcagacagtagcccacgaagtgcacagtgtctgctcctgttctccatataccacctatgctatgcgcagccatgtcaggcccacgatttcgtggtaatggcttcccgtaaaatgcagaattatatgttgaagtgtgtagaacgtgttccagggcgagtatcgagaaccggagacgatgtgctaacaagtgcgtcacgcagtgaacctgacattggtaatgataccacaatcattggaaactgcttctggatagcattgttgatcgaaaggtatccagacctcagggccaagaaaagcaacttagacaaactgaccatttgtagtgagctcagagtccagcttgacttcgtcgatagtgggatctggaatatggctctcttcgcccctgcccccacagcctcgagcatctggacctggcgggagctgaccccctcgttagactccccaggatcgttcacttcgaacgagagcgtggatctctcccgaagcgacgatctatcatactttgtcgcggagatcgcgatgcggaaaatgctgcagcgctgcacatgggcgacgacacgctggcgcagggcagacacgtctacgcgcccatcgtcgccgtcgaacttgagcgccaattagacgaatg

SEQ ID NO: 8393 - DNA, 900 bp, Emericella nidulans
ccgcaatgagatggggtttcggctcgcggtcctgcagtccttcgccgtgctggcgtcggcattcagcggcttgatctcgttcggcctattccagataaaccattccgccgtgaagggatggcagtggctctttattgtcgagggggccatgacgctgattattggagtgattgggttctggtggttaccggacacagcccagagcgcgtggtttctcacgcagcgagaacgagacgcggcttctgccaggctcctgagggatacgtctgcagagatcgagacaaaactggagctgaaggctgcatttcaaacatggagcgactggaagtttcccatctgggctgttatcaccttttcctacccggttgcgtatgcgacggcgatgaacttctttcccattgtatgtccccgaaagctacattaccctttttttttttttttacattattatcaggttatttttactgacgacgcagatcgtggctcgcctcggctactccgtcgtcaagacgaacctctggactgtagcgcctaatctcgttggcgcggtggtactgctcgtcgtcgctaagtcatctgatatcttccgcgagcggtccttgcatatcatctttagcctgacggtttcactggtgggaatgttgatcctggctagtattgatgtctcgcataacaagggcgtctcgtacttcgcctgcttcttactcgcatctggtgcatacattccgacgtgtctcgtgcacgcctggcacaataacaataacacgaacgagaactcccgcgctgctaacactggcttctttgtcgggctgggcaatatcgctggtgttctgagtgccgctaccttcaggacagagtatgcgcccaagtatgtgcccacgctggttgcgacgtgtgcgt

SEQ ID NO: 8394 - DNA, 738 bp, Emericella nidulans
gtaaatcatctaaaaacgcagagcaggatttatcagaataatgttaggggacattggccaggccaggagttgcatgttgacggcaatgctcttgccctcgtttgagatggcacgcggttcgtgtttcttttcaattacaaccaaaatatgaagaccattaagacctaagcaggttggagtgcgaaaaggaacccgtgacctggatcagcgctccttctcttctcattctgcaaatttggttaaaatcattcaaatacgagtttatatgcgaaaatcactcttggctgcgactaaactcgaagtggataagcagtttccggcgagctaaaacggacagcttcgccatgttgctttgagctcactcgacatgtgtctaggaactttatgatacattacactaccattctctataccaggcctgcctggacgtttagacaagccagaaagtgcttcctggatgaaaaccatccgtcgtggtcctagctaaagagacggaatgtctaccgttttgggaactggttgatccccacaacagctcttcattacaagaagttccacttacctcgcactgagttcttgtttcgtctgcagctaggccgaagccatgcttgcctgcagagggattaggcttcttcaacgctaattatgaaaagaggcctagagcatcgggcctccccacagatagcgctgagacaagctgctggaccagagcccggcattcaatacctgattagataa

SEQ ID NO: 8395 - DNA, 837 bp, Emericella nidulans
acactttgatgatttataatctggaatcactctttgacgagacttgacaagaggtgaaaccacttgcagcaggctcttaccctatccgacgtgatctacctgcccagccctgaacgccctcgagcttctacaccatatccgcgattcacctttggtggcgaggcagtggttgaggtattatcagtctaggtaccatcctcaccaatcttagcatacgcattatttttcgtacttgtagcctatcgtacgccatgcctccttgcctaaagttgtacgagagcttcgatctaaaagtcatcatagcattctcattgaagggtcatgattagcaacgcgatagttattgcgtccgagacatacttccgtatcccttgcctcctttttgcgatttaccaggtacagaacgggcataaaatggacacaaaaacacgcaaaagtcatcataaaggatacagcaggccattaaactgctctttcgagtattctcttcctacaccacttaatacctcggctgctgtccgtacggaggctgttgaccgggataaccaggctgagatccgggccgttgtccatattgttgctggccatagctcccagacgcttggctgctcggtgggtaaggagcagagccatacccctgttgttgtccggagctgtaaggcgcgggtgagccatatcccgggcccggttggctatagccgccgtactggccttggggaggtgggctgtgcatagcctccaggcgcttggctgtgcgggggtaagcagggctgtacgggctgttgctggccggaattgtatggtgcggatgagccgtatcccgtgctgactgacata

SEQ ID NO: 8396 - DNA, 438 bp, Emericella nidulans
aaagttgcaaaatgtattttccaccgtcaatactgtcattcagacacacgcataaagttacatagaatttgaagacactcaaataatcaacgcgatggaatagcgattccgagaacaataggggtcctccaaaacaggttgaaaatttttgactgtcattcctcaaccgcatatggttagagttctgttgagagctccgataggcgaggaatggctctctttaatggggacgttggatgatgatttactactgcagactagacgaataatactcgacctctaaatcaacgttcatagtagattaggaaccattgggatctgaggacgagagatcctaaatgcgcctgggtgtgctcaatggagctgctcactcggagagtcagttcgttcttccttgcatccggttgccaagacctcgaaactcctcattttgagttc

SEQ ID NO: 8397 - DNA, 1141 bp, Emericella nidulans
aacattaaggcgcttggtaagacggaccgaaacctgcatcagttttcgccagcaagaacacaaacgcaggagtctggtatatgtacaagaaaatttaacaaaacccattaccatgcccgtttcccaaaccatggacaatgctgtagaagtatgcgttgagcgccagagtgaggagagtttgaaaagcaaggcagtcgttctaatacacagtatatgaagaaatatagattaaatcacctccccgcttgaccgaaacattgcagacgagtaaagaggacgtcgaaatatcgtcggacatgagtgtgttttacaaaagagccttcttggcgacctgcaatgacattagttaaggaggacgcgagcgagtcgttatccggctaaacttacactccaagttcccgcaatagttgccacgataccaccagagatcagcatgggcttaaggccacgagtgctcttgaagaccattccgctgacggcgccggcagcaatgctgttggcagcatcatgcttcccccgagcgtaaccggcaaaagagttgagaccgttgtataccattgcgaccacacccgcagagtttccaaggaaaggtcctcgccgtgtaatcgagttcagcacaccgttgagacggatcttgggaggcgcggtcactggtgtccgcttcagtccttcagccaaaccccatgctcctccgatcgcgagcgctgtgacataggtggttccggttccatagcagaggtcgtccgaccatccgcgcgacggtaaaacagattgtgagccaggaagctggtcaagcgcggagtcttcgagtgtgatatagtcgagagtatcttggttcagaccagctagaggatgaagctgcgatgggtcgggaagggcaacctcggaaaggaatgagctggcatctggggcagcagatgcatcaaggccgtctgcacccttcgtctgtttgcggccgctgagcgagtcccagatggacattttgggctgattcggaatgaattaagaggtaaagaatacagagtcgaagagaaaaacggggaaagaggatgaaagttgctcgtacagcttcaaaagggtattgctggtcttcaaagtcgccaccgagtttgcctggattgggaatctcggaaagagagcc

SEQ ID NO: 8398 - DNA, 103 bp, Emericella nidulans
ataaaaaactgattccgtcaaagaaaaagtctaattgtctcgcggaaacagcgtaaggacgtctttgccacatgccgacactgggcagtcttcctgacctcat

SEQ ID NO: 8399 - DNA, 639 bp, Emericella nidulans
aggcagggaacagcgcgtcagctctgatagattgagcacgattggttggaagatatttgaatggaaatatgaaatattagagatagtagtaaattggagaatgcactatgaatctatgaccagaaatccccccgaaccaaaaagaaaaagccctcgctaggcatcgtaggtaacattaacctgccgactgaccataatatcattatgaccccgggccgccgcaccatgaattatcatcttctggctgtcatcgtcgcttagttgactatcttgcctgcctcggccgggagcgccatgcacttcagtaacagtagataggtatgcatttccgggatcgctcttgccgccgtgctgagagagctcgtagttggaagggaatcgtgaccgactgcggctgctggtatagcctgttcggcggaaggtgcggtcgaagaattggtggaagagggggcggagggttgcgatgttgccgacgatcatgccgatggcgttttcggcgaaaccccagatgacgacgtcagcaatggcgaacaggtagttgtcctgcttggttaggttgagcgtgtacttgagacggacgcatgcggagagggaagcactgaaggggacaacagtcagtattcacggaataggtaatgg

SEQ ID NO: 8400 - DNA, 923 bp, Emericella nidulans
tttaaatatataatcgttatataatcgtttgaaatcttagtaaagaaactttgaaattgagaggatatgacagattactcctttggaaagctatattacatgctggattcttccttcttgcttatcagacctttcttgttgaactagacagaaaaaatatacttatacttattgatatagtatttgattaaagacgagtcaagtggagcttggatggctcgtggtgggacgagttacataactaagcagtgctgccttgcgatctgccccaggcctcaacaactagtctagccaatcgacttctccgcaggcggagcttccatcaggtacctctcgacatcatcacggccgagcttcgaatcttggctgtccatgctgctacccggtcgttttatatattcggtatgatataggctattcgaaatcgactggcgcactatggcgctggatacatccagcggatatgccgctcacagcagcctgattgaaccagatccgcttcctatgttcgacgtcaggcatgtccagcttcagttccctctcgctgccgactttgtggccgcgcaggtagccgacaatgtacttattctggcactatcgactgggcgcattttgcggatcgacttgaacaaccctgagcatattgacggtttggacccctcagcaacatgacctcggttcaagggactgctctgaaactgactgctgtgtaaaaagatgttgatcttccgaagaagtcttcagaaacgggtgttatacgtcggatgttcttagaccctcccgcttcccatctcataatcaccacgaccctgtgtgagaactactacctagacacgcagtcaagacatgcaaagcctttatcgcgcctcaaaggacttcttatcgagagtgtcgcatggagtccctaccttgcgacagcatct

SEQ ID NO: 8401 - DNA, 793 bp, Emericella nidulans
gggatcaaggaaaggcggcggcgggacacaacccaacacagagagagaagggagagaaagggaagaaaaaagacaaacgaccgaaaaaagaccaaagaagacaaccacaagaaagcaaacaaggaggacgaacggacgcaaaactacaccgccatggcaagcgtgagacaaacaacacagcgccaaaacaacgaggagccaacaaccaagaaagaacaaaacgcagcaaggccaacccccgaaagaacagaaaaaaaccaccccaaaaaaggaaggaacaaaggacagacaaggctaagggcaaacagggcgcacacaaacaacaaacaaaaaacgaaggagaccaacagcccccacaaaaacaccaagagaacacacaaaaagaacgaacgtcaaaaaaacaaaaacccgccgaacagccaccaaaaggagcaaaacccacccacaacaacacagcagaccctatcaaacacacaaacaaccctaacacccaaactcaaaatcggcggcccgcacacacgagaagagcacaatcaaactagaacgacaaaacacccccaccgacagcaacacaccaaaaaaaataaaccaacacccaaacgccagaaaaaaccggacaacaccagccaagacaacaataccaaaaaccagctacacacgaccagacacacaaagccaaaccacacaaacgcaacaagaacaccaaccgaacggcaaaaatcaaccgaccagcacacaaactcaccaccacaaagacgccatcacaaaccaccaacaaaacacacactcaaaa

SEQ ID NO: 8402 - DNA, 948 bp, Emericella nidulans
acaaacccgctaaagcaccctccatacaatagatcaagtcgtgtccaacacaggcacacgttcgggagatcagatgccagtatcggtgtgccgaccgcctggagagctggttgccacgctgtaaatgcgtccgacgacctccacataaaacggttgtcttgcccgctcggactacccccggagccgccatgattgctccctgtaggtagccttgcgcgccgagggagtgggctagggcagataagtcgcgagatttctgctgggtgcagttggccaaagagcttgcgcgcatacaatccaccgccgaggctgcttcaacaactcccgcgcagcagagatccttggctttgtcttgggtacggttccagatggtgttcggtacccggccttgagaaaggcatgggctggggctgaacccatctgtccgatcccaagaatagagacggctttggagttaactgaatgtgacttcatggtcagggtggtggattcgctagcggttccttgtcatgcgtgaacgaatagcgacttgagcgattatgatgcaaccgcgctataccagtgtgttgagagctttatatcttttcgaggttgccgacagtcgtatgttcgaacaccaaagaagtaagacttattgacagataatgtgagactgttaacctggtgagcttcactcaggaagccgggggaagggagggagacaggatgattgaagaaatactgaacggcattccgtaaggtcaacataagtggagctcttattataggcctcagctaattcgatccagataggaaacgaggcttgtcattgtccctcttccgcacacttccgcaaactcaaattcagaggattatagacagggttggcgcttagatactgttttgcggcatggggaggctacgggagggatgtactgcggcgcccggaaggggaattgacctatcctc

SEQ ID NO: 8403 - DNA, 1095 bp, Emericella nidulans
catactgaaatgttccgagcttgatcgcggccggaaatcgacctttatcctccatgccattcagttgatcttgccaaagcttgagactgctattgaggataacctgccagaagctctggacctggccaggttggctgaatctctggtcgaaagtttagatgcaacgccagccaaactgatgccacttagacgaaacggcgatctcatcgatgagaagcttcatcaattgttccagatctgcctccgaggcattatcttatccaatgggggcgttcttctcaaggagacattctacaatatttgttcaatctatgttgcgcgtatcgtctcccctgacactggaaatgcgactatgaggcagcacagtcagcaagtggtcaaatcatccggccgcgctttaatcgaggctatatgtgatgacgcctataccggtcaggaaacgtgccgtgtatcagctgtgttactgctcaactccttggctgcactggataaacaagctgatgctactctagctgagtcgatcgctcagtcaaattacctaagtttgtttctagacagcatccgggtactaccacttgagttaaagaatgccccaacccacggtagaatacctacattcctactgcgaatgtcgttaatctgcacctacagatacactttactcttatattatacccagccgttgtggccctgttcagcagtttgtaaaccaaaccccgcgcaaccaatgttgaaagtcggctttttacccaggggaggacaattttttgttggccccgccctgtatggtattttctttttccgaatttttacccccttacaaaaaattttaacccttccccgaaaaacaatatcttttttccggattttccgcaatttcgggtaaaactattttaaaaccctttttgaaaaaaggggggtgtttttttttttttaaggggcccctccccccaaaataaatgggaaccccctggggtccttggagggttccctccaaaatttcagcggaagccccctgcctttttttttgagggcgacccggggttccaaacttttttttaaaaacaaaaaaaaccccccccttcttttggcggc

SEQ ID NO: 8404 - DNA, 737 bp, Emericella nidulans
acgaggtatgtcaacaccacgccagtttcgccgagtatcttctaactagaaatagtgttactccattaaaggctaatttcatgcatacgcccggtatcaaaggggagattaagctgtgagtggattcggcgagcagttcctgtttagacgactgtttaaagcataaatcttgcgctttctgttatctatcaagcgatgctatgttctatttgtggatacacggtctgatagtgctatatcgcgtagatcggataatgaggagcccgccttctattccatagtggattgtgacgacccctacgtccaagaattggtcgagcaagcactccgatttagtatgggatcccgttgccggtctgtatcctctatatcagagcttccctcccggtccactccagttttccagtaccgcgaatacgaacgtttggatttcgagcacgccatgacgaacccgacaacgtccctgataaacgcctacatcatccgcaaagctctaattcgaaaacactacctcgctaacaccgtctcaaactgggtgaccaagcacccagaaagcgtgttggcgacgacgtcaaggtctcagtggactttgaactcgactatgctgaattccttgacgacgctctacttgaggcttacgaacttcgcgaatgctttgaggagaacgaatccagaccggactcagagaaggtatggtggattcttaaaccggggatgagtgatcgcggacaggggat

SEQ ID NO: 8405 - DNA, 876 bp, Emericella nidulans
gatacgtggttatagacagctcggagagcgcgatagcataattgctaagattactgtgggtgtttttgtcctccgttggatatcattgtactgattgaaccaggcactgtctcaagacttcggtttaaccgacgaagagcttctcaaagtcgtgacacgagatcccgaaacgcagcccccaccgttggattttgaagagcatcctaagagtgcggaagacatccccctagaaaggcacgggtcgttactgcttctcgccgcccaagctgcggttggaaagctgttcagcggaaaggctttgcaaattaaggtctatcctgatctagcacggattttcgataactacgttggcaaatttcggagccttgatgaggtcgctttcgaacaaccgcacgtgctgctcgattccctgcttgcactgactgtcctatctctccaaaggccaataccagcaccttcggacgaaagcgagttcacgaattttgttaccttgttgacagcctgcaccgttcgccaaacttacagcactgtgaggaggattcctgctgaaatcataaatgcaaatccctcacaacttgctcgcttcaaggtaattcgaaaagtattggaggacgaacgctatcgcacaattaaagatagggcaattgattggcttaagaatgagatttttaaggcagccaagaagcccctggccctggggccaacatttttctaaaccctaatacttttccggcctctttcacctctttttgctttccgctttggacctgaatttgtttcaccctggacaatctggtccggtacttcaacttaagcccttattcttcggcgctaactctttaacattaaaatttcgggggcaccccgccgttcagt

SEQ ID NO: 8406 - DNA, 259 bp, Emericella nidulans
  unsure (1)..(259): unsure at all n locations
atttagttgcacgttcaacttcaaagaaggtcgaatatttatcgtgctagaaatggtctgagcgagatgaacgtaatgtattgagtcgagaagatactttccatctattttctgtaattgtcagattggcctttgtcaataaggtttgcaagtaacgtcagcacgtacgcgcttctcatttaggacagaagacttagagancttgagcgtagtatgagttcaccagtgtgncagntaagcggttagtgcagaccgtcgg

SEQ ID NO: 8407 - DNA, 951 bp, Emericella nidulans
  unsure (1)..(951): unsure at all n locations
gggacaagcacacggacattgcctggcccaagtacaagggagttgagaatcgcttctgcccggctggggtgtacgaatatgtggaggattcaagtaaaccgcacggggttcggtttcagatcaacgctcagaagtacgttccttccctgtcgtccttgccttcgagtattgcttgctaacgttattcagctgcattcattgcaaaacatgtgatatcaaggtcccaacccaggacatcaactggcaaaccccccagggcggagaaggtcccaagtactttaagacataacaggtattcgtgttcaatattatgagatcacttagataggtttcttattctctgttggaagaacgttttttttttagtgtttcggagttggcccagctcggaaaatgtatatataagttcctgtcatctgtattctctcaaaacttttagtatatcaggcagacagcgtttcatagttgtacgctacatggtggacgctctgggttgtagattggtaccttattagagcggaaccaaggagtgccgaccatggtttggcattcctaaccagcactttcttccaatgacacattccatcttgatttacatacatagacggtacctacatttatgatgcatcattgaatgtatttatttcactcaaactacttctatctttcatgttcatgaaacagagcaggcggggccacgtggaccctccactcaaagtgaggcgtaaagcgctgccctctgatttgtagccttcctttagctcgtctgtgtcgctcacttctgttcgtctggacgcttctcaactcctctttttccctttaccttccatcaactncatcattttacatcgcctgcggccctatattttcatcacgttccacggccaggttgcctgcaggtatagccctctgaggatctcaacatactttgtgattcgacccgttggacca

SEQ ID NO: 8408 - DNA, 980 bp, Emericella nidulans
gctatactcggaaccttaaagaaatcgaggaccatcttcacggggttgagtccactttggagcggcagattcatgagtttacaacttcccgtaatcgcgacagcgcaggaaacggggctccgaagacagttttgaacgaccttgctgctgttttggctgacgtcgagacgggtatcttgggtgttgctagccgtttaggcgcagtcacggagcaggcgcaggaagtcgtgctcggcgcaccgtctggtttgaggcaagcgtagaacactgctgtacgttatcttcatcaacctcctgtattttatgatggcatatgaaactgggcatcaagggcaaggagcagcaagcctcacttacgtgccctttgtgcctttggacttggcgttgattttaatagagtaatcaggaaattataccacctagtgcttttaatcctatttatgttcagaaattaccctcctggcttttccggtgtcttatgagttaatttcagaagcctcgaggacgttgcatcctcaagatatatttgtcccattatagtatctccgcacttctactacaaccctccagattttgcccattatttaccattaactttaccattcgagtagatcgtcttctgcttttgaagaatttccctcccagtgggccctttcttctcggttatgttcgtgttcaggtgaacgtcagtgacaacatcgctgttattcagctaacacacatcgacaacactacaactcggacactaagctaattagttgctcagcacatcgaatagggtcgctagccgtcggaaaaccgatcccctgaacatgagaatccgaggagagaactaagtgtcccggaagcaagcgctccttctgactttgcttatcgtcgaagctcaggcggagagcatactcctcgaatgggacaatatcttaccggaaagctattgttcgacgacgccagcaccgaatagccctaagttcgcggccgta

SEQ ID NO: 8409 - DNA, 666 bp, Emericella nidulans
atcgggtctgtgaacatctcgccattgagcttccgcgccaggatgccgccgtccattttgctgcagatctgcgccactacggcggagtcgctgtagtcgtggtatgtcgtcagatcggtctgcacatgctcccagccacagttgtcgtttacgggccgagtcggatcgagcgacctgcgttcctagtcagcagctcctcactcgcatgaagaggtccatctgggatacatacttggtcaaccgatatagttctcggatatgccccctctgaaccgcatcacccttcagattcttatacccccagctctcattgacgggcgtccatgcaaccacacacggatggttgcgatcgcgcataactacgcgctcccactcctcattgaagcggtccacatactcgccgctgaattcgtatgcgttcccgatctcgccccagaccagataccccagccgatcagcccaatagtagaatagcgggtcctcgaccttttggtgtttccggcatccgttaagccccatcttcttcgcgagaatgatgtcttctttcagcgcgtcgccggacggcggggtcaggcccgtcgagggccagtagccttggtcgagacacagggtctggaagtagggcttcccattcagccgaaacgtgctgtcaccggtatcccaggt

SEQ ID NO: 8410 - DNA, 167 bp, Emericella nidulans
  unsure (1)..(167): unsure at all n locations
tgtggtaaatgtgttgggataggcgcgtttggatcgcacaaagtagacatcgtgagggataatcctgagggtacggcagagatgtcggagaagacatnggttggtgttcgctggggaggtgctgatcacagctctggtttgagtgtagtcatgtcggctgtttgaca

SEQ ID NO: 8411 - DNA, 929 bp, Emericella nidulans
cctagtttatgccataatgctgatattcgtgagaaggctgattttagaacagcgttagcggtcggagtgacttcaccatcgtctactcctctacttcatgtttgcccagcgtctcagagcaatagtgaagacctgacaataaggggcaatcacctggatctgattcgtctgatcttcggttcctcaagttcgccaaatgacgagctggagctgttcgacccgagctcctcacaagctgatgagctgatgtactccgcagttgtaccgctataggtccagtggacgggggcagctccgcatgccagaagcttacggctggccagcaatgagggaaagctgaactgagttattgaagcagtatgctgcagtaagagacgaatggccgtggagcatccgccagtcaggttcagctgattttttcttttggagtcagtgcttggtattggtgtgttccgccagccacagtgcgggagacacagacagcctgtaatctgtgcattttggcgttctgtggagctgcgagaatgaaagtcgacgcctgagagatcgacattgccaggagaagaaggcgataggtctgcagagccagaacgtgatgcctttcgcagccaaaccgcgactttggtaaggatctcatatccagtcctgtggggtggatccgctctccacgccagttctcaaatcctcctggcccaagcgtagtgttcatgggggcacaaggcgctagagtctgctctgaggacattggcaaggacttttttttgctgacaattgccgtcatggaaaacacagtagtgttctccttcccagtgcggacgcattatagtcacgcgaggggagggggaagcatatacgattcgagcaaagaaaaagcaaagatgtgacagtgttacagacgagctcgaggagtaaccaatacggagcagaga

SEQ ID NO: 8412 - DNA, 183 bp, Emericella nidulans
atgttaggggatggtaagttgcacgcattggtgaagtagacagttgacgatggtcttgatatattgataaatatgaatgggtatacgagaggtcacagtaatgccctatttgttgagaggctggacgagatagatatgtctctaatcggattcgcaggtagattgcgctcaggagtggtgctg

SEQ ID NO: 8413 - DNA, 1098 bp, Emericella nidulans
tatatgatgttgactacctcaagattcctgtctataagatgaagttctattcgaaacaacttgcttttctatagttctggagcgcaagggagagtacctagataggtatccaggtacggaacaagctgccagcctgaccggctgaaggacgcaattttctctgagccaggccagagtagttaccatccaccaactcacaggcgcaacacacctgctatgctcgtatctccactctcaacaacatatatataccagacgatactcaaacctcaaacccctcccggctcattcctctctctctctctctccaggcccagaaagctaactaggatcccgaaatcataaacacacttcaagacgccggcaagcgtaaaacttgccccaaaaacgcccttatccgccaaaaccccggtaatcaacggccctgcactctgcgtactcgtcttgacaacgttgatagcacccatgatcgccgtccgtttatccgcaggcaaggccgcggccaggaaagccgagcgcggcgcaacgtccatattctgcgtgcacgcgcggaggataagcagcgttaaagcaagcggcagatcaaagagcgggattagggcaagacaaatggcggacggtaggtgcgtgaacaccattgtttttatattgccgatgcgttttgcgatggaggatgcgagaagcatggagatcgcggcgatgatggaggttgtgaagaagatgcttcccaaggtgccttcgggcagggaaaatttgcgtttgaagaagtaggtcatccaggatctgattggaatttgttaggcatgtgtaagtaaaatagcaattggagagagatgtgacatacagtgacgcaagacccgaagcgaacgagtccaaaccaaagagaatgaaaagacggataataagtgagacgagatcgcgctcgccaagaaacgaaaggaaggattttcgtccctgctcttgcgtctctcttgtttaatttctggtttcgagaaggggctttgtcttggtcggtgcgctgctgcttctgctgcttccatttgggccgtatattggtcgtttaaccttatggttaaagaaccgacaaaacaaactgga

SEQ ID NO: 8414 - DNA, 1344 bp, Emericella nidulans
agggcgcaattgccaatgctgacctcactgacaatcaggttcccgagcagtcggcatccgcgcccaacgactgtcattccggccctgccgcacttgcgctatctcaagatcaccaatatagatccgatctgctacccggacgatatatcgacgatgctttacaaggccaggaagctgagggagctaaaaatgcactggtcgccgcgaatgaggaacatgcaagagccgagcgtgatgctgcacgactattttcggaagtgcatctcagcgaagcaaccactggcacttagatctctaggcttgtcgaacctgtacgcccggcatagcgaagacttcaacgccgcatttgataacggcacggtagaggaagtaactatgcttcaggaggtccgctcggagctggccaatctgaacacatttgtggatagcacatggcccgcggcccctcccaacaaaccgatgcggctgaagagtctgagagcgaatgtcttcaaccaaaggcaagctgaatttctcgggagctttaccggacttgagagaatatatttggtcagctcgagtaccgtttccgatagcctcaattcgccgcgggagccaccagtgacttgtccatccgcagccacccttacaccacccgcttcagaaaacacgaacttgaacggctgctcgagagacctcataatgtccgctgactctccgtctaacttacctgccctgcaagcaagggtgcgagatacttcaatcaacagcatcgttctcaaccacgccgccacgctccgacatctgctccttccagcccgatggcgctctcctcaagcataatagctcgcctcgtccacgcaagtccccagcttgagcagcttgctttcgctgcggaaatgtcaagcatggatacactgggacttcttcttccctttctccgcaacctccaagccctgcgccttctcgtcccgacggcctccttgtccactggaacagatgaggcccgcatttcacaaccaaagcctacaacttctaaaccatccaaagacacagacggtctagatcttggcgccaggtcatttgctgatttcgtagaactggacgatgagattctcatcgaaaggctcggcgaacgactcgctgatcaacaactattccaacgtcttaaagtcgttggatttggtcgcaaagggtttgttctgggcgaatattataccgtttctgtggatcgaccacagccacaaccagagcccccacaaggcgtccaatcccgaacaccagctgcatcccgcgcaccgagcgccgaggacaagagtccgtctcctacgtcgatttcgacaaacgcaaatgaatggcatcaat

SEQ ID NO: 8415 - DNA, 1257 bp, Emericella nidulans
gcatgagtgagcgtcaatgatgatatttttgcaatgaggtaataggctggcaaggcaaaatccaataaaatatcgaatcaattcatgatgactttcgtggttacgttgccctcagcgggttgggtttccgaacgaaaaagggcgttaaagaggggctttctctgcttggctattgtcttcctcgagatagtcgggcgtgctattcccgtatctgggtgagagttgctaccaaagtaaggactaataccaaggtggagacttagattccttagcaatgttaggtaagttgtatgcataaattgcggactcctaaactaatctcgtaattaatccccataagttcccatgatgatatactaacgcccatgaatgctaacacacccagtacaaaaaagaaaccagttaaatcagcactgtaggcaacactccgcataaatagtatgtttctatcatacaagcatagggtataaactttctgaggggtaggcagccggcagttgctacgactcctccctcaacccacagatatcagtccccagaaccatgtcaatcatgtaccaaaacctccagtaaacattcgatttatcgtaatcgaatgtcccgtcctcgcggactgctggcccatcaccaacaatgtcgccagtgaaccagctcagtatcgggattgagcgaaggacgcgctccgtgactgtcggcgcgggcgggagtgcttcggagataggccgcagtttcgtgcgcgcacatgtaggcacgtgtgtcatgaattcggagactggtgcggccgtggcttcctggggtgtgtggcgctgatgaagggtagcagtcgctgtgctggtggaagctgtggatgggagagactgttcaatgcctgtggctgttgcggacgtggcggtgctcgtggtgtcttgggagaaggagaagtcctcttcgtcggcaatgctggcgagattgttgacggcgaaggagcgcgggagagttgttgcgcgagagggacgacccttgtccttgttctgaaggaaagccgtcgaatgcgatgtgctcagtgtgcgcttgttgcttgacatgaagcggttcgcttgtgtcgagcccaccggaatcgggacgtcttctgctggtccttggccatgataaatctcacagaagaccaagtgcccgtcgatttcctgcggcgagtaaaagaccgcgcggcctgcggcctccgtcgagtcaaaggtaaccttgatccagtgaaaccacccgcgtatcgtttggatttgc

SEQ ID NO: 8416 - DNA, 635 bp, Emericella nidulans
aacaagaacttccagtgacaactgtttttacataataagtggtgcgtagctcttgagtccgaggtggcttgtactgatagacagacaccttttcggttgccctcagcgcggggcactcttccccacatctaatgcaacggagtccgaactcgtcaagtctgaacgacagagcctagcaggctactgcgtaccccctacaacttttgtttccatcaatcaatttgcacattgtataatctccttcggcgactcgttccccttcttgagtaatacttccagatatgcaatctcttaaagggcccggagctcctcaggcctatgacggtgcgatctgtactcccccatcttcatcaatagtccgctaacgatatatagggtctgggctacgagttgctattgttcacgcgagatggaatatgggaattatcggtcctcttgtagacggtgctactaaaacactacgggcagccggagttgcagaggatcacattgaaattcacactgttccaggaagctacgaactgccatttgctgtccagcggtaagtcttctttttggcacctgaaaaggccataagctctctagaagtggctatagcactacaactgctcatattgactacttctttccatggc

SEQ ID NO: 8417 - DNA, 1345 bp, Emericella nidulans
tacgctcagttcttatctcgacggagtgaatgaatgacgacccatctaatgcagagttggcaagtattctgtctattcagttgggctgtcatcatcatgacacgctttttatgggtatatatggggtttggcccgaaccaatggcggttgtagtttatttgcctcgggaagcgtgcactgtggcgataattctctcaaccacggatggatcggacagcttaggtaacaattagttccacgtactcaacgaagtcaagtcgagaggccttaccgttgaaatgtcgcccaggctatcctcctcaccactaagaatcttccgcaggatgcggcgcatgatcttaccgctacgggtcttgggcaggtcgtcgacaacaaagacggctttgggagcagcgaagggtccaatcgacttgcggacttgcagaatgaggtctttgcggacttggtcgttggtctcgttaccctctttgagcgaaacaaaggcattgacggcctgaccggtcaactcatcggcaataccaaccacggctgcttcagcaaccatagctatgatgagttagccacaaagttcgcgctcttatttggtataacttacggtgctcaatgagggcagcctcaattttcgcggttgacagacggtgaccagaaacgttgacgacattcgtcaacacgaccacggatccagtagtattcctctgtgggcacgaccggctcatcttccggtgaactatacgatgtcagtcaccttcgagtgagcgaattgatagaatggataaaacttacgtagtaacccttgtagacgttcagatatgtgtccatgtagcgcttgtgggcaccccacacagtgcgggccatgctgggccagggctgcttgaaggcaagcacaccctccacatcgttgccggagatctcctctccagagactggatcaatgatggcaggctcaataccgaagaagggcagggaagcactgccaggcttcgtgggagtgacaccggccaagggggtaatgacgttggagccagtttcggtttgccagtaggtctgtacaaagattcaccgttagtaaatgagaagacaggactccaaaggcataaatgacttacgtcgcaaatgtgagcctcttcctttccaaccttctcgaagtaccacttccagacctcagcagcaatgggctcgccgacggatcccaggacacgtagatgttccatcttgtggtggatgtggtggtcaccagccctcttcaacaatcgcagggcagtgggtgccacacagaattgggtcaccttgtgctaatcaataaaatcccagtagcgagagaagtcggggtaagccggggtctctc

SEQ ID NO: 8418 - DNA, 801 bp, Emericella nidulans
gagtttgtcaccaagacgtctcctgggacgagcttgcctttgtggagctcgtgctgatgtttgacggcatagctcatcgagcccaggtgcactgggacatgcggacgattggcaacgacgtcacctgcttaatcagctgcctgttcatctattagagagaaggaaagggggatgtgatactggagaggattctacctatctggtccgaacagtgcacacgagaaatcaagccgctccttgatatttaatgaaaccgctgtcttctgcaacgcccgtcccatctgctctgcaatgctcataaatcggtgcccaaatacagagagttgaatatggtccactgttgttggctgttctgtcacagcagaggccgtagacaagacttcgataacgatatgcgagcgcaacaccttagccaccgtgtttggtgccacaacaagggtctgcgtctgatcgacgatgatggccggtccatctattgagagacccgctggaagattctgcaccaaatagacgggcgtatcttgatatcccagtttggggaagtatacctgattcgtcaagagccttccaaggtacccctttgcaggaggcctgaaggtcgtctcacgcaactgctgtcccagctgatctccctcccagtccttcctttcgctcgcaccgataccgcggactcggacatcatcgacatatataggcttcttatccggaaagcagaacgagaactcgcggaggtgagtcctgcggaactctgcagcgaagtcaccattatccggcctgagaaccatgatcgaggtctctgtg

SEQ ID NO: 8419 - DNA, 930 bp, Emericella nidulans
cccctttctctatttatcctaaatcagacggttgcgatttactcactgctctccagaggacgttatttcaacgaagccacgctcccagcactacgcagctatgcggttcccccagtgcgagagacgaaagtagcttccttacctgtacccgcaacaaccccagcgagccccaatgttgctccggctccggcgctgccgcaagcagaggctcgcgcgtccgaggtggcttcacaaggagctttggatgctgagacgcagagagtcacagcgccgcatccagtagagaaacacccatcttactctggccctcaaccatccgatagcagagccgcacctcaactagctcctgggacaactgaaatatcgcagaaggctgatggaccagctccagaagtaagacatgctgctcagaacctgcaacaaggacagaaggcaacctcctctttgccagatactcctcgcagctcccaggaccctagcgatgctacagttcgggccgatcaaaaagacgcaacaaaagcgattccatccgctcagccagccatatcaacaccgaaaccccaacatgatcttcccgcatctccccttccaggtcgccctgtgcatgttaccgaccagcccctatcccccgtctcatctgctgggccgtattcgaataacacccccgctccaactgctgcatccccggccacaagcactactgaagacgtctcagctgagaaacttccaacacctaaacgaatagcagctactcaagaacgatcaagctttgttccgacaacaccagatgaacagcttcgcttcgaagaggcgcagtctctccaacaaaatgctctcctggtcagtcaggacaaagacggtgctggcaccgggcccttgacaaatcaggttatttccgaggacctcccgtcgacttcaactgagagcaca

SEQ ID NO: 8420 - DNA, 1171 bp, Emericella nidulans
ctcatcttactcgccaaaatgtttagtaaatgtatccattgcttgggcagtcgcaaaggcttggttatcgaagccatagttgaacgtcgatagggcaatgacaaagattgacaaggaaagtgttcgattgaagtaacgggctttgtcaaacaaccagtccatgacggatatatgatttaggacgccagagggtactcgactctaaactaaggatcaaccagggttttgttgaaagaaaagtcgaacaaaacggaagcggttcaagaggtgcacgtggtggccatgaagtccttaagtacaagttgccgaactcaagtagcatgagctcattcccctccattggaagcgtcagaaataatagtacagtaagaactgggccaaaacctggggaagctaaagttgacgctctttaaagcttacagcgagatccgatgcaggtcggggctttctgctacacagagcggctcggtatatagaccatagaccggatattccctgttggagcggcatcagtcacataaatgcccttggaaggacgagatatcctgagaatacttcccgccagaacctggacttcattcacaatttattctccaaatggcgtcattttctttccctcccaaacctctcccgttgaaggtcccgtccaacaatggggggtctggcccaactatgtcatatttatgcaggattaactgagatacgacgcactgggatgtacaacaaacggcacagctggaatcaagacaccgaacatagacgcgtttcgctggcgtgccactcttattactaactgcttcgctcaggcttcggtttgctctcagtcaagatgtagtatgttcaccggttgctacctgtatgtgagcagtcatcgcagtctcgaaaacctcataaccgtgggagcccaagatttttttcgcagcacgagagagaatggctatcatgtagcctgcctggcacctcgaggcgatacgtccgccccgacagtcacagagctgagtgtgacagaatatggttttctggaaacgcccgagtttatgcccaagtttgctggggccagcaacaaggacatcaataaggatgatatcttggggcgattgttctataaaggtcttaggaacgccagcgaggccctggactatatgatgcagttgtgctgtcggcattgaag

SEQ ID NO: 8421 - DNA, 1263 bp, Emericella nidulans
ttgatgggttgggcgtaagtttgtgggtggtcggaggtgataagggagaggagagtagtcttgccgcagccgttggggccgagaatcacccagcgttgaccgcggcggacagtccagtgcaagccctcttgaggtttcttcctgatattctgagaccagcctcccagcacgaccttgtccccatattgcacacgcactccacccatctcaatgagcgcctcgccgtcggggggcatctggaactgtaccgggttctcttccgatgagggcactagttgcaaatcaaagacgagctgcttgtcgaggtagcctgcctgaatgtcgccttgaacttttgcagcgatcgcccgctcattagcatttattctcctgctgttcccggtctttttggcccatacaacgaagtgcttttgggcctcagcccgcgtcgcctgcaaaagtactcggtttgaatgtccggtgacgagaagatgagtgatccaatctgggattggatcctgcggtcgtaaagacagcaccagtcgaggatccgacttgttcgctagccggtggaggagctccgatatgcttcgaacagtagctggatcaaggcccactataagcattgttaattgacgttctaatccaaccgaaaccccgagaaacttactgaaggggtcgtcgagcagcagaagctccggcttgccgagcagagcctttgcgatgcgcgtccgtcttgtttgaccattgctcaagtttgcgacgggcatgtctagcagatcccccaggcgcaaatccttgacaactcggaaaaaaaggtcctcatcacgaacagtgccgtctttttcttcctccaacgggttgagcgacgtttggcccttcaggtattgctggacggtccagtcggtctcctcccgcaaactctcataccgagcactcaggtatgcaccgcgcgtgccgccaatcgcccccgagccctcgccactaaaaccaatatactgaatcgcattggcggggtcccgtaaccgagtgtccttctgcgcaatgttgtctgtgaggaggtacggatagctgcgtccagtgggtgggatacaagatgtactggccgcgaagcacgttgaggaactgcgtccggcaaggggacccaatgatagcccaatgctgatggccttctttgcctggctgagatggaaggaggaaatttaggttcgggaataacgtgggttcgcgcccttgcttcatcttctgggtcggatagatttcgagaatgtggcgtttcaatgc

SEQ ID NO: 8422 - DNA, 526 bp, Emericella nidulans
ggccctacaaacctctgacgaaccgacaaaggtccttggtcgcgaatacatccaggaacagctccgcgacactctgctcacgatgcgagtcagaacgatctcgaatctggggacattgacatcgctcagattgagcgcatttaccggtacgtcccgatcctctgccggctatactcccgcttcactcaatgatatcgatccaggcctactaagaatttatttttgctctagaaagattgacttgcgtatcattcccgcgttctgggtcctgtacttcctttgctcggccatccgatcgaacgttggcctcgcacagacgatgaacgccgaatccgggcatgacctcggctccgtcctcaacgccacaccgcaccagatctcgactggtctggccttgttctatgtctgttacgtcgtctttgacctgccttcgaacctgataatgaccaagttgagtccgcatgtttggatgagccggatcgttattggggtggggattatcgggagttgtatggccgctatgaag

SEQ ID NO: 8423 - DNA, 1081 bp, Emericella nidulans
tttggccgttggcataaatgcaactagattcagtacctcgttgtttgagcagggatacatgaccagtctagccttcccgccctctgcccactccatcagcgcgcctcggcggactacatgtttcgtcgtttcggatgcgcgaatatcggacgctgaaagcagccagcggaacaagatttgtctgcaggagtgggtgagggcgcattgggggcgatcttcgttcgtacgatagactgcttgcgatttagcgcgccacgcaaatggtgatatggaggttctcacatgtagcccgtccgcaccgaccagcaagtctccctcaaagacacgcccgtcatccagcgttactgatgggcgattggtggatgtattgacagaaacaatctcgcatcctgtatatactttcgctgtcttcagcgccttggctttcaaggcaccgtgcaagtcgcatctatggaccaggtagtattcctatactgtgttaggtgcgcctcacaaccgagatacaagccgacatacagcctgccagaatttccgaataggcccaaggtcggtgtggaatttgacggttccctgatggtcatgacgcattacctatcattgttagcattggctcaaccacgcaggcaggccctagagcgtacctcctcgagcagagtccctccatagtcacgcagatcaatgtccatccactccagcaaggcggtgcagtttggaggtgcattgatggcagcgcctgtttctttgttgaacttggatttttctaggacctacttcagtcaattatcgacgacccaggagaagtcacagagttagacctaccacgacgtggtgaccctgccttccaagagcccctgcagctgttagaccggctattcccgcgcctatgatgataatatctaggggttgagcttccgccattatcgtgtctacagtaagagatacttattgatcgatccagagagcgggtcgcgcggggaccagcgtcggagatatatacatgactggaatataccgaacgggactttaatgaccacatcaatgtcgcaagactagaaaatgccgcgcggggtcctctttccag

SEQ ID NO: 8424 - DNA, 1520 bp, Emericella nidulans
cgtgagattatccacggatgcaccgactggccttgcagcacatacttctctattgctctccttcaccagaacgtcgagtacgagggtcacatagacctcgacaatcagcagtatcgtgtcggaggagccggagtcattgacaaccttgctgacttggccctggtctccaaatctgtttctgctgatcaaattaagcctctcgctcggctactcctccaagggtcctattacggaagcgtttgcatcgagagttctccgtttggtgtgcgatgcggtgataactctcacgtcgaaccccatggctcagcttccttcaccacaaaccctccgcgccctaccaccccagacaatcccagattcgccgcgtgtctcagaccagcagctcctaacttcacaactcaagagccaaaatatctccgatatccttgtgcactcggctatcctcagccggacctggcaacaggtgcttccaagcatgtactcgaatcaaaaaacattccaacttgatacatccttctacgacctaggtggcgacctctttgcccttggtcaagctacttggcttcttcagcaggagggctaccaagttcgaattgaggatctcctggcccgtcccaccttcttgggacacatggccgtgttagctcaggatgtcctgggccagaccttccaggaagatctcacgaacacgagccaggatgaaacctcaacaccggtagggaaatcagagaagaaggtgcggtggaagaaggcatttggattgatgggcaagttctcgaagcgggagtcagtctcgtcttgatgagcataaattgctcaagcatttctggtctttggaatttactgtatcctttctattgttattgtccgaacagttactgtactattattgcatacctgcttatccagcaagatatattagaaatatgtatatccgtgcatgtagtaatttgatatccaaacatctacatggtatgatatggctctagtggatggtttctgcagtgcagattttattactctctggatagacaaatagttggcatataacaatatctgcatcacggcccatgcatgaggtaccgcgagcattcgacgtcgctctgatcagctgcttcagtagcagtcaaactagaaaattactgcccaaccctgacctgtttaatattagtattagtagaccgcggcaaatccgtggatatcatataacaaattctatccatatcattatccatgcggataccaaatacataggttactgtttttgtacacgtccaactccatataaatataatataaacatctcgttgctttctaacttgcaaaggccttgctactatgtagaaataatataataaaatttgtatatccggtacaataagtcggtggcacagaaagtgtccgatactggtgtacacgtcgcggattaagacctactcatatagtgcgcctcgttctctcaaaacttctcttattttgagcacttcctccgctgaaacaatatcgccatgtcccagcgc

SEQ ID NO: 8425 - DNA, 1020 bp, Emericella nidulans
ggcatcaagccaccaggctaccaggccggatacaatatccacaccactggtcacctctccctacgctgtctcgacatgctcagcactggtctgaagcccttttatggtgctgtacatttcccccggctgttctgcccgcagctcatcctggttggcatacgcaaccttatacatcgtgtaccatggtcgctcaaacagcttatccaacgcttccagcgatcgcccggtggtatcctgcacactgtcagtatactcgcatgtagtgtcaccgatagagtcatcttactggcatggcaagcgatacatagatcaaccccagcacaccgatgcagctgaaaaacaggaatgcaccccagcgatgtgtcgccgcgagcaaactgggcatcgccttggagcagccaaagtagaaggcccagtgcaaggccatagagatggacatattcagggatcggatgcgcgtggggaaaatctcgggcccaatgaggtagggaatgctgaaccagcctatactccacgctacggcatgcaggtagatcgcaacgatggccgccgtcgatgctcgttcagcatgtcgagaggccttaaccccggcgattgtcatatctttggtggcgcccaaatatgctccgacaaagaccagtgtgagaatctgcaggctgatccctaccaggagagatcggcggcggccaacgaagtctacaatgaccagggcaaaggccagcgtgctcgcaaacttgacaataccatagatgcctgtcgccaggaaagtggcctcctctccgacaatgcccaggtatccgaagatcgttggcgaatactgagtaatggcatttgcgcccgaccactgagagaagagggtggccatgaacaggagaaagaatcttcgtcgattctcaaccggaacaagggtctccttgatcaactgccatgacgaagcagaggcaacggattcatgctcatgctggatctgcgaacccatgcccgccaaattcggccgcgatgaccgaatgcccaacgtgc

SEQ ID NO: 8426 - DNA, 791 bp, Emericella nidulans
  unsure (1)..(791): unsure at all n locations
gccgggatcataaaaaggcggcggggggaaacaaacccccgccaagacagaaagaagaccaagctccgacaaaagacacagcagcgaatacaggaaaacaggatcgacccaaagacaagcacgaacgaaacaaacaccgacccaaacctaaactcaccaggcaaagcgtgcgacaataacaaccacgccagcgcacggcaggaccaaccacgaaaaagcacaaaaccaagaaggaccaagccccgaacgcacggaaaaaaccacgacaaaaaagaaagatccggaggacgagcagggtactcgaacacaggcaaacaacgaagcccacagacaagacgagaacaaaacctacagcaaaacaccagacgcctcgaacacactgatcacaaccgcgaacccccaaaaacgccaaaaaagggcaaaaccacaccaacgaaaccacatccccaagcagcacacgaacaccaacacactcctaacaaaacggagacccgacgcagccggaaacctgctccagaacgccacgacgccaaatatcccgaaaaccaacccaaaaattcaagcgaagaaccacagctgaaagcccgacacggacaacgccacgaggaaaaacccttacaagagacggcccaacaacccctcacaaaccccccgataaccaaccaaacccccacaaaccctcacccattcacctcgaatataantaccactcacccctacaaccggaaagcaaaaaaaacccccccccctccaagacacaccctacgagacaccacagccacattcccacc

SEQ ID NO: 8427 - DNA, 1341 bp, Emericella nidulans
gcgtaagaaaaagcccggaagcaacggagaccgtgaaaatgccctcataagtgcctgtattttgacttgggcatcagcgacaaggcgtgtaagaacatgaatccggatgttggatgtcgggatggaactcctgagggtgtttgccttcttttaagttattaccaattgaccagcactagaaggatgtccaggtcgtagcaaataactgtattcgcgttctgcttcgggcgtctcaagtttcagaccctccttctcagccgcagaatgggtccagccagccctctggccccaatcttagtgggccgcattggcaagctaggggagctgcacgcgatctgaacggtcagtcagggcgatcgtcaatattgcaggatggggctgtggtcgctatatgcaggagcttccagcttctgccaccctgtcacttcgcagatccgttgcgacacagccgttgttgtgctgtttactatagacattctctccgtcctgcagacattagggggctcaggttcggccctggtcacatctcctaccgaagcagattcggcccctgctgatcgtttccgtctagatttctttagactaagggcgacgggatagcgctggacttggcctctagccgaacaaaactggcaaatgaagaacatgactcactacctcctttcatgttctgacctgacaaagcaacctactcgtttaccctaagcgccagtcgagacggtaaacacccaatcctccgggaaagtctcatatacaacaccttcctccgcaaaaagaccctcatacttctcgattcgtgttttcggatcctcagcctgtcggtaaaatccgtaaactagctttttgaccagggggtcactccacatcttctccatccactctagggcttcgggagtcacgttgtcgaggggaaggttatatgtgcgaaaacgctatagccacgcttagcaaccttgcagccatgaacaaagcaatagacggaaaatcatagcacaggaattacctacccataacacgggccaaaaccatgcatcggcaatactgaatttcccaaacagaaacccttcatcctggtcttgcgctacgcgctctttcgtaacccggcgcgcgttatcccatatcgtcaggacccgtttaatctccctcttcgcatcctctgatacagggatattacctgtatattttgcgatgaagttcgtatgaaacgtactccgcagcgtcatgaagccagagtgcatttcggccgttgcgctgcgggcgagggcgcggagagctggatcggagggccataggtgcagatgcggattccggtcggcaagaaactcgacgatgagaaggagt

SEQ ID NO: 8428 - DNA, 1180 bp, Emericella nidulans
cgtatacgggaatggaattgctttggtgatttacactttctaagaagagtggaggctcatgacacataggcatctaggtaactcgaagtaaacacaagaaactcgaagtatataccgcttgaacttctcttttttctacctgagccgaaacccttctgcctatgaccggtgaccaaagaggtgagaaatgccttcctcacgccagactccgtctgccagggtccaaagctttcatcctgtgtgtatctccgcgcttgtatacaggaagtattgcgccttgctccagctgtcagcggcgccttatggcgggaagttctaccaggaggtctcaggatcaggattgaaggagacacagaaactctagacatccctgctgggtacgggcatttggacgatcaaccacaacgagcggtactatccccagccgttcagcttccggcctgaacggtggatcccggaggagttcggcgaagaggcggtccagttagctacggcggcctttacaacattctccatacggccgtggaactgcgtgggaaaggcgctggccatgatcgagatgacgctggcgatggccgccgtcattagtcactttgacttccggagggccgatggtgcggccgggggactcggcgaggggaaggggtcgttcgacgggcagtttcagacattttgggcgttcaccggtttcaaggatggaccgatgattcagttcaggccccgtaaatattgatgactggagtcgatacgtctacggatatttggattgtgactttgccgaaagacctagcggctatggcccaggattgcctagtatcaggaaggtatgcgtgtacatagttgcggcatggctatatggtctgttgctgtttaatatcaaacaaaccgtggcttgcagaacatatataccttccaccagagcaaatgtctagccaatttttcttctcatcgctgggtaggctcaagttaaagcttatctgggctccttccagtgccaaatagggttgtcagatgagatttaaaaagggttcgccaaatggtaatgtcaactgaagatcaggtaagtgatgaaaataacggataggatgaaaacgaccaagtcttgaacgtggagaagaatcactattgcattcttctgcataatagccgcctgctcctttgccaggaattgtagatgcga

SEQ ID NO: 8429 - DNA, 597 bp, Emericella nidulans
accggagatgacgatcgggtcgaagtcgctgtctgacgtgtcaccgaatgtcttgtcttattagcttcgtcccgtcacaagataccgtcccgccgaagagagagaatgcgtaccgtcttccccgcaaagatcaccgccgccccggtctgcagatcctgaaggtcaatggtgctggagggcggggcgtacacgtccgagagcatgatgttcgagcaggatgcaacggccgaggagatgccagcatagtcagttaccgtgcatgttgtgccgccgttgccggtgtatggagtgtacggggaggctctagtggaggttggagcttcagtagttgcagccgcagcgaaactggagctgggaccagggctggaactcttgatctgggtcttgaaggtaaccaccgcgctggagctggagctagagggaacaaagacggggatccgcgaaggagttgccgtggccgtcgaggtcgtgataacaggcacagaggccgggacagtgctagtggcagggacaggagtggcagtagcgctgtcaaccggaccgagacagctgcatgcactggagaggtgcttgatcttggagtcgcaggcggagagg

SEQ ID NO: 8430 - DNA, 1076 bp, Emericella nidulans
tgactggtctatactactctgaacacgggctcccctggaccctggaagttcaaactgagttccattccgatctctgtggtgttgatgcagcaacggcggacgggtggatagggacccaaagctggaatgagaacttgacgcacgaagagcagacattggtattgctggtctatatcgccatttgttagcgagaggaaccgggcaattagtgctccgctatcattccaccactgccgctcagcttcgctttcgaagcatgcgtacttggcgaaggtcttccatgtgtgaggcttcgtgtggtcattttcctgctccccggactctgttatagctccagtagctgggccataagctgtgaatgagttcctgtccatatcgaagaatatttcaaaacttttctcagctgattgatgtaataccaacggggcgtgggtctgctgtgccttatgtactccgatagattgccctggtagatgctcctttcaatggcagaaacgcatcctgaatgacagataggcatgcattccagtacgaggaaagggagggcatcttacaccggagaacgtaagggtcaggagtgtcaggctcgggctggtgcttagcctacccgagcaaagggtgtttcaaccacattcacatgtggttggcgccctccagttttgtgctggtgaaacaaagcgcatttcattcatccccagccatggtccattattgcctacttcagctaaaggttacactacgcctctgatcctgggagaagataacttgtaacctcaatttccccatccccaccaatcatgcagctaataaaggaatgcaagccgcggcactcacccagttcaagtcctccagctagccgttccaacatacgcatataattatcacagaatttaccccgtccctgttctctaaaccacccagtcaatgcactccccacagcgcggtcattggcgtgctctttgcgaacagggatgtagaatttgacgctgggaaggtccgcgcctgggggacatcgaagtaatactggaatccggagagcagggtagctcgctcgcggctgtgtgttgagagtgggt

SEQ ID NO: 8431 - DNA, 804 bp, Emericella nidulans
  unsure (1)..(804): unsure at all n locations
attactaacgtctaatgacgtttatcactcagttgcacgccgtaggccccctaacatcaatttatatgtctttcctgtctggtaaaatccagaggatgcgtccttgaacagctggaggtcatatcaagcagcctggtacgaacagaaagcttgcgtatatcttggatgatatcaggtaggaagagctaataggtagctcattatcaagctaaacaattcggtgcactcagaaaatatccggcgcagcatagagggcgtacgtcaggtgctttggagtcctcttgccttggcttggtttgggtagtcccagaggttccctaccctgttcttgtgcgtgggttactgcaccattcttccacgtcgaattgatggagttgtcgcaccattccgaatgccctcgagcccgacgaaccactcgtgactaaggcacacttccacagaattctacgagatgccctagatggtcaaacagctcagcggaaaataagagtttagtcactcctctgctcacctgcggtcagcgacaaagcgtgcatttaaaaagatgtggacgcttgtctaagaaatctgaacaggaaagagtacttgtaactgtcttgaaactccggtacccccagcagggaatgaatttcaacagcacgtctgacttatttgggcgaggagtactgagttcagcataggcacactcagtgcgctgtctgttagggtcctgcctcatcttcttaacttntacgagtcacacattatgagcaggttagcccaaaagtagggtgcataggaatatgcggtaagcgaacgtaaggt

SEQ ID NO: 8432 - DNA, 1808 bp, Emericella nidulans
  unsure (1)..(1808): unsure at all n locations
aaatctaaaagtaacaaaagaagaacgtaacagaaaaaaaaaggtgttgaccaaaaataaaactagaggttgtgtaaccgaagcccagaaaaacttcaaataaaggcccaaaaccaaatctaagagtgttgccagaaacccaggtcaggaaataggggcctccagccgcacagaaatgttagctgtccaatattgcctgccgagacggccaagggattaacccttgataattttgtagcattttttacattacggaaccccggtatatcttcatgtcaaaaccccactcgggcgaagacccacaggcccctcatagaaactttggtaaccgacttgacccaacaacctgtttcttgaatctttcttaatataaaagtcaagtaaaaggttgggccccaataaggtggtcaacaaaagcccattggaatattggggatagcactaccctcgggataggttagagctccatagaggaacttgggaaagaaccactgtccaaataagaaatccaaaaacgggtccagacagtcctgacggtctaacttttgcataatggcctttcccagttgtaaaattgaccggggtaaaccggcatccgaatcatctaaaagttcgagcagtgcgtccacggtggaagcgaaatattcctctgcaacctcagtccttaatgggtctattgggtccatatcatagccgggcgggggctctatatgctccaggaggaatgcaccagtctggaggatgtccatcagataaagctcaaacttgggcttcgctttccagtcactaccagtggcccacagcgtcaggatatggtcgaccagagcgtacgatctgttagcaccatcggcaatgagcttcgcgcagaccgaggaccacatatccaaacgtagctgtgcctccgggccgtccgagtccagggaagctgcatagacattgaacagcaaggtagagaggggatccgttcgctcaaacgccaaaacacggtccttgaatggaatgccagatgcagggacagttttcgaactcagacttggaatcctggaacgggacgaagctggaaacgaatcaccgccaacttcccaagaggaaacagaagaagatatcagagcagacagctgcatatgagtcaagctgcaaagtttctcaaacacaaactgaggatccgtccggacagattgcaaaatatcaagaaggtcggcctgcgactgggggctcagttgacagaagaaatccggagagcggtcaaaggcaggctcgcgagagcttggccaatcctccgaatcgtcgggctggcaaaggtagcgttgggccaccagagaacaaggttcctgaagatcaaccattgtgtggtagagagcgatgaaattggccttgtcgtcgtgcttgagtctatcaaccaatcctcgttgcacggcagcaccaagacggagcaggcgcgctgagacacctattgacaccttggtagcatggaggcgctgttccaactttctcctgcgcgcctgcttgtgctggttgcggcggtaacgaccagccaactcctcgaaggaaaccttagggcgctctcctaccgacatgggaacgggtttccggctagatgctgtttcatcctcggaagaaatgggtgttgaaatgtaccgccaactcgagcggtccgagtctccagactcacctgtgatgtgactcgaactcgagcgcggngatagctgcacatgagacatgctggcagtcgcgttagcgccaggaggtgcaagttcacattgggcgttcgttttaagagcggcngggagcaggtctgatgataagca

SEQ ID NO: 8433 - DNA, 1609 bp, Emericella nidulans
  unsure (1)..(1609): unsure at all n locations
cgaagttaaatgtcgttgttcctggaaacgggttacggttaactggtcctggggcgggaacgggggcgatctgggtttgactagggagaaaggcagaagacgaagtgtctagttggcgtgttaaaatccccaggtgcgaaggtccgttggcgttggcgacgacggcgacgaagaaggaagaaaatgactgctgcaaggatggccgcacccacgacagcaatagggacggcgattgcaaccttggtcgtggtgctgaggccgccgccgccgcctccgtcatcgctgtccgcggaagctatggaggtactggacggggttgagtctgaggtaaagcttgtggtagacgccgaggtgtatatagatgtctctgttgcttgggtggttgatgctgatgggttgtctagtgccgtgattgtcgtcgcctcagtggccgtggcgtctgcccattctgagatggaactcatagggttggattgtccatttacgtctggctgagtgccctcgccagccgattcgccagctgcattcgtcgccgtataatgttgccccagtcgatgttgtcaacgtccgatatgccggccattgttgtgaggagtctcaagtcgtagcgagccgtgtgtcaaacagctagcattctatgtccgtaaagctcgggggagaaagtagttacttcttacccccacccagtcgaagtaagattctctcgagtctcttgactccgctttttcatgcagatgaaatactcaattatagtaacaaagtcagtaagcactctcgtatttgggctgattgacagtgaggtgcgctagagtacaagacgccaagtcgccgacagggaaatgctgtaagggagagaggaaggagcgaaaaggaaaaggaagcggaagaagagaagaattagagagaagacgaatggcagcgatgaagagtgaagaaaagaggaagagagacgaggaagagctgacatggcgcagcggctccaacaagtatagccctagcaagttagtcttgcaagtatcccgatgctaattcctgcgaaaatcgataatagtgggcatggctgaacaccactcgatacgactcggcgctcacgaaagcggcatcatcatccacccgatgagcaagagggaccgttgtacaatcgcagcggcgcggtaagacggttcattgtcctctatctttattgcaattgtacttgatccctgtcggtctacggcagtgatggcatgtaccagtaggcgcccgcagggggcgtgaaacgatctgagtaaacgtgtcgccgtcgcaaaaactccgctttgtttcaaaggctagcgaggctgtgccggctgctgatcgatccgcaacctagctcttgaaggtgcatcgtccattcgtaagaggatttagtctgcggttggcctgttgtgggtggccggctcgcgctcttatgggctcacagccctgttcttgcgtggcagtcactcgtcagatcttcgtggtttgggggccgttcctcaagcgcatatccactattaggaaaatccatcgacccccccagtgagagcccaaatgcgcggacaaagaagtagtcaggccagaactagtcctttaccccgtgtntgttttt

SEQ ID NO: 8434 - DNA, 269 bp, Emericella nidulans
tgtagtctttgctgatagggtacgaacgtctgaacaactgttgcgttgagtggagaatacggtcatgacagcatttattgacatgaggcctattaggattactgagggcagttaggcagtcgggagttgtcgatcggggtcgatacttacattgcaggtattgcaagtaggactttgaacgagctgcgggctcgcaatatccgtagctgttatgctcgatcccgcacaatgttcttgaactgtttgtcacaggttttgtgagcgcttgc

SEQ ID NO: 8435 - DNA, 131 bp, Emericella nidulans
  unsure (1)..(131): unsure at all n locations
gatagcggcgactngtgccctttccggacatcgataacgggntgtttcagcccgttccgcgatntccaaggggtgatcagcctgcgcagantccgatnccgtgttgcgcggcaagaatagcaggagtggcg

SEQ ID NO: 8436 - DNA, 110 bp, Emericella nidulans
ccacaaggcacggacgctctaatcgtaatcacttgtcctgcactcttcgtcagccgtatgatcgcgcatatcggtgagttgcctcaaagcgtacggtatctcattgaaag

SEQ ID NO: 8437 - DNA, 854 bp, Emericella nidulans
ggatttattgaaggcaccgggcggccccaccccacccacacagaaccgagcccactctcccgcacaccacacccaaccccccaccgaccacaccatccgccccaaaacaaccacccaggaagcacccccccacccagacctacagcccccccggcaacgcccagacaccaactcacaacgcccaagcacaccaaacccccacaccccaccacagcccccaacccaagccacgacccacccccagaccaaccccggccaacaccccccccaatcaccaccgcccccacccgacgaccagccgccccgacccaccagccccccccacacacccaacccaccacgacgcggaccaaaacccccccgaagacaccccgacacccccgcgaaagcaccactgcccaccgcaacacccccatgaaccgcccaagaaacctcccctcccaccccccaccgcaccccaccccccacccccagcccccgcccacaccccactcctccctcccaatcgcccaccccgcacacaacgcgggaccgctccaacccgaacccacccaacccctcccaccccccgaacaccacacccaaaccacccacacctcaagcccataaacaacccacactccccacacggcacacgacctactcccgacctatacccacaaacaccccaaaccctaaccaccccaaccaaacccacccccacgacaaaaccaacaccgcaccccacccaccacactcccccccccaccccctcacccccccaccaacacccaaccaacccccacctcttcaatcacacccacccctacctcacccaccccccaccccaacactacccactcaccacacctctc

SEQ ID NO: 8438 - DNA, 121 bp, Emericella nidulans
cattcacaatagaacactgcaagcaatgcattaccatgctaacctataattccatccacagtaatgattcatcggtacatgttaagaagtccaccgggagtcagaatatgaagacccaaaa

SEQ ID NO: 8439 - DNA, 109 bp, Emericella nidulans
cggacgccatatagatgagaaacaagaaataagttcttatcggtgtaagagaatgtgatggttctgtatttactgatgattgtaatcagcagtttgacagatgagaagt

SEQ ID NO: 8440 - DNA, 769 bp, Emericella nidulans
  unsure (1)..(769): unsure at all n locations
gaacctctagtttctataaggccgacagcgtcttcttctttcttctgtgctaaacgcaatacagatctaccactcttgcctccataacgctggcccgtgcatcccatgggctgcccacgccagcctacaaagtctccaaggctgccatgaacgccctgacggtgcagtatgctctcgactacgagaaggagggatttaccatctttgcgctcagcccaggcgtatgtagcctgtctcctctcttcttctgtcttaattcttggatactgatgttgatgcagtggctgaagactgaactcggcggcggcgacgcggccgacctgactgccgatgagggcgcgcgcctttcgctagatattatccttggaccatcgcgcggtctgaacggacagtttactaggatccatcttccgggttgggagaactcaaggcaccaatatgacggtagcaatgctccatggtaggtggaagtagcagccagatgcaaccacgcaggaagcgagaagcgggatgcaagacttagacctaggcaaaaaaatttgaagactatcagttctgattcccgcatcaactgatgctgtcctactcttgcacctccctctactaccgcttggtcggagacccccagaccttgtagccgatccagggacatctcagatcttatctgggtagcctaagcacagtaaactgagccaggatatatnttccggaagggtctgcagtgtgctttagctggcaccaacgctgcagacccgccgaggatgcccta

SEQ ID NO: 8441 - DNA, 109 bp, Emericella nidulans
cacatagacctggcacataagttctctcggcgagcttaccagtgtagattgcgatattagactgacacgtatgttgcttctgctgcatagtttcagtatctcgaagaga

SEQ ID NO: 8442 - DNA, 937 bp, Emericella nidulans
ggatacgaaaacacagccatcagcatatcctgaagacgacgaaatgagcgtgctagacgacaagattcttgataccacttcctcagacttcacatcgcctgccgaccaccggaggcattcatacgaacaaggcccagacgcttttcaacatcgtgattctgtctggtccgatatctcccaatcattatcaagcacgcagtcccgtcaaaattcgcaagtgggccatccgttctttgaatctgctcccaatcctttcatgaggatggacgggctcccgtatgtgcactctcaacagtggtcgatttccaaggactctggttcatgtacaccctccgccatgtatgagaactaccccaccgacatggagaatacttcggtcgccccctttgctggtggcgctgtgggaccggtgaataccgtcagcatgccatccatgacctatcgccagcatatggcctttgcgccggcgggtgccgtcgccatgtcaccacagtcaagtcagggctggatgccggcgtcgacggacatgcctgaccctagttctcgaccgaagaacagccctacctaccggaatagctctcctcttagcgtccgccgagatggcatccgcaagaagaacgctcgcttcgagatccctgccgagaggactttgagcaatatcgatcatcttatcgcccagtccaccaatgaggaggagataaaggagttgaaacaacaaaaaaggttgctgaggaatcgtcaggctgcgtaagtggtttccccctcaactctcttcctttaacatgctaagagatttctagtctcgattcacgccagcgtaagaagctttacaccgagaacctggagaaagaaagaagcattgtacgcaggccatcaatgaactggaggaggagctaccaaattgagactccggaggcaaaaccttttcccagaagga

SEQ ID NO: 8443 - DNA, 1112 bp, Emericella nidulans
  unsure (1)..(1112): unsure at all n locations
gagcaattcacaagagcgcaaacaggtgtcatattatcatcaacatggatgatgcgatggatccgctaaacattcacaagaacgagaccggggcccagaacgaggagcaggaggagggactcgaaaacaactgcgaaaactcaccaggctctacaacacgtcacaactccgtctggaatcctcaagctattgtcaacgatctcaagttgctcgatcatattttctaccacacggccgccgcggcggttgcaactgatacctttctcagcgaaaacgtgattgagcagctatctgcgtgggaaagagccccctggctcttccaaatcagcaaagtagcagttcgcgctgcggcagttgagccaggcattgtgaattgttatgcaacctgtgtcaagcacgtgcggtcgctgtttcgcaatctatatttctcgcgcgtctggacatttcaggagatgttgttgggcaaaatattacaatgtggggggtcaatccgagtgtcatgcaatgcataggccagttcgacacttggatggatttggccatcgacgccagcgacaaggccgtcaagctcagcggatggatagaggcaggcagagtattcaagaccagtgggattagcggcattctgcaggtgatagaagaagacaagtactggctttcatttttgcggacacaggttcagggcatcagctcggcgaggaccgatatcatcgctggtggcccgcactggtggcaggaaaaccacaaaggaatctgcaacattttttctgcaatatccatcttgccgcgaacttgtgaggagcgcgcggacatctacaggggactcttaggtgtatttcacggcttgttcactgaagaggagattaaaaacttgggttaggctggcggcagtgaggaactagaagcgatcgccttcgccttcttcagacaactgtccctccgaactgaccgtgcctggactcgcctggcaattagtagcggacggcgcggtaagtgggattggattccatggtatcgaacccatttacatacaacaccgacatcttcgcgtgtcgtcgatcttgatccctganccagacgtacgtgagactcgtgcgtacatgcttcaggac

SEQ ID NO: 8444 - DNA, 214 bp, Emericella nidulans
  unsure (1)..(214): unsure at all n locations
aacaaatttttagagactggacagccggtgccgtaagagcaacggagctagcaatctggcgtntgtcaacgttctcttatctgctcgcgatgttcagagggaacgtcggtgacgaccacagaggtctgctcgtaacattgtgantttctttgtctagagatgtgaccctgctactcagctgaccagtgcaaatccgggtcagttggatagtgat

SEQ ID NO: 8445 - DNA, 1248 bp, Emericella nidulans
tacaaagatagaaaccgataaatggggaacgactttcatgagagaaaaaagcagagaacctcaaaaaaaaggtccgcctcaaaaagacttgagtcgccgaggggaaaagtacagacgttgccaagcaagaaaaacgctgtacacgaatggccagtatgggtgtccacggccccaaaaatcccacccgtcaaaaggggcacttcaatgttcttgggaaaagccataaaagcctgtcaagataaaacaaggttaaaagagtttgtttaagaggatgcccaatatgccatgccatattccattcgacaggtcattagcaaattttgtgtcaaacggcaggcctatatgttgaatgctttccacgaacctcatggcaaaagcgtttccatccagaatccatactacttcctccggggtaagctcgcgcaagatattgtagtcatcctccaatccctgtcctttctcttcggggccgaggtatccactgtccattttgggatccatgatctgaatgtgcgacaagtctgttagctgaacgttcacttctatggtagctgccatgcgcagcagctaagatgactgcacctacttccagcgcacccacggcctcgaaaagcgtaaagtgttcatctttgacgagttgaccggtctttaattctggagaatgtaaattagccaagctctattcctgcctaattgatgtagaacagctccggcggcagtcttacttgatgcagcttgcgtaaactcctctgtgatgtcgcgtggaacaacggactgcgaaacgattcgcgtcattgaagctcgattctggttatttaatagcataaggaaaagtggaaattcgcagcctgctgctccatctaccagtacaaggaggagcggcgtcgctttaaaggtgagggacaaaagttgatgaggggatgcggcggagagtggaggtgtccgggcggcctgcgaaaacctaccgagcagcaagaaacttgaaagcgggcagtggtttacaaatgtctaacctctacgtaccacaagctctgagataaatcgagaacgtgactctatttccggagttgaagaaggagggaacaacccttctattgataacttatcgacaggccatatcgttacaaagattctgccctccctgcttccggcttctcatctccccctagatatgttccaacgtcctaaaatacaaccattcaccgcgcgtttaggggtttatcggaatgcttatttcttctcggcctg

SEQ ID NO: 8446 - DNA, 518 bp, Emericella nidulans
tatctgtcttggccttgtcttgtattagatctagagctgcgtcggaactgtcataatgctgggccgacttctgaatactgcggcgtcgactttgaacccgtcggcatattcttccaggcctgcccctcagcttgaatcggttaccgaagaagaacatacgtccggccttttatttcccgatgcgagtgtgcttcgacgctcgaatacccacgcctttcctctccagaccgctttcaattctcccaatgtctccgcagccggtgcctacgatgatcgcgggggtgtagagttggaccctcagaaggactttcgggttgtcattgcccagaactctctcggtgatagggagccatgcatccttcttgatactaaggccgaagcagcagaaccgggcccccccggacctggaatcgattctcaggcgtttgaaaatcccggtcacaggcatgctcgcaccatgtcgtctctttctcgcgggcggcgaggtcatctgactcaatcatcattgatagatcaga

SEQ ID NO: 8447 - DNA, 1553 bp, Emericella nidulans
ggcggtcagtccttcgctgtttacctcgttcacggaactcttctccggactgtcctttgctggatgctctacggcattaccggccagcctttcgaccctaacgtgaagcaggagggtaaggatgagcccgtctggatcccaattcgtccaccatgggttgttgctatcagcatcccactgtggatttgcttagtgtacttctgcgcgacaatgtggacaaaatatgtcgatccgttctgtgcccgcatgacccaaaagatggagaaccacatgttcatccaggacgagaaacctgcacaggccgaaacactacccttgacctccatgccgatgcagacgatgccaattcaaaacgcctaaagcgacacagagtttgccagaaaatttcagttatctctactaaacgatgcatctccacgatactgatacatttagctttctaccttcaatttccaacgtcttagagatttgaccatacattttccttcccttttctaccaaccttctctgttgcgttctctccggatttctgctttcttctgagatatggcgggtccatgcacaactaaacattcatcaatggttggaattgatttgagtcgtttgttgtactagtctacttgcgcttagcacttgacactggccttcaaactggtcttctttacacatacttattttacttaccttttattaatgtacaaaaggaacaatgaacatagctatgattatagatggcttctttgcctcatttgatatagctttggtgttgcgtagtttgtcttcggctgcagacgtagtatatacctactaagtgcttgctaaatgggacatgcgatgtgagtcatgtttgccctcaatttacctgcattgctataaacgccttatatattgctaaaggcgtgcttctttcagtcttcagacaatattttcgacccaagttgatactctttaagtgaattcgtacctgaggtttctctgtgcatccagtaattaatcatctagcttatagtaaccattccgattcaccaactagcaggcctctaaatcgcattcactttggttccttctataaccgcgccttcagttctcccccttcatcatgcataggcgtagttcgacccctttctcttactgttgctttcccatccatcctttgaataactcatcatacctcctcctggtttcactagcgcatcctgacccgttgccgtccgatagaaatatcaaccagcaaaccgattcaagtctgttccctctgcataatccggcagtttggtaacatgcaaagaaaagtgcctgctaacttgagagacctcagatacgcaatgattcaaagcctcatgagcataacaccagggctcccaacgccccggcatcctatcatcatcccaggccggtccatagcgatgcccgctttccgtgacctgacgcaggaaaaggtttgtttgtcgcgcgctcaagaagctacgttgatatagaaatatcaagtaccagagttgccttggaaacatgaaacacctctgtcattgccgttccagcatctagcagaacaa

SEQ ID NO: 8448 - DNA, 995 bp, Emericella nidulans
gtaggcctgagtagtcggaactgatagatgtccagattactatacacccactactttgcttctaggtctgattaccacctagtcctgaatgtcaagagccagacgtagcaacgagtttatgctgtattattactcgatatcatgattcagcgttgttactatcaaccctttaatgcctccactcactcctttctcctattcccgcagcataagagaaataacagggacgtatacagagggcagaatcctttacctagtgcttacgcgcccttctaatcatagatgcaacctccgcctgtcccgaatcacctttgctctcatccacaaacccaaaccgctcatacagcggcgctccagctctgctcgcatccgcatacagtgcgactccctcttcgtccgccaggccacaatcccactgtacaagcatcgagcccgcgccgcgccgctggtaattggggtgcactaccaaagtatcaaggtctacacccatcagtcagtctcaggccctgattaggacgcatctgggcaagaaccatacaataatgcttgagtccttccataactctcctcctcgctctttcctcaatctcaaagaacgcctcgcattcagctgctggcatgtcgtagtgccaaagaggataccggctccctcgttcttcagccgtcgaaaggtcccatttagcatacgcgattatgcgttcgcgctcctggccgtgtttgtctcgagcgcttgaatcaacgatcttgacgtatttttgaaaggtcttggggtgcagatcgtgctggtttgcggcagtcagctacgagcgcacgcccggggtgtcagggaagagctggcggattgcggggtcaatgaatgcggcgaaccagcggttgttagggcggggatgtcagctggcacgatgggtgatagtttcaatgtgctgggggttgtttttgaggtcattttcgcgggattaattgggtggctatagggtagaggggtgctggcttta

SEQ ID NO: 8449 - DNA, 962 bp, Emericella nidulans
ttcttttacttgatcactcatatcctcatcattcagctgtgtgcggattgtccccggcagaagcgcatttgatttaatcccatacttccctaacgccacggccgttgactgcatcagcgataatacacctgcttttgtaggtgtgtagtgcgtttgctgcccgccgcccacgagtgcagagatactcgatataccgattattgagcccccgggcggagattgcgagaaggccatttgcctggcggcggcttgcacggcgtagaaagcgccggtcaggttggtggttatggtgtggttgaggagctggggggttacactgtccaatgatcagtaatttcttaacccttccgcttacagtaatctaaagggaaaagaacacttactcgaggaactcctcaaagcggcaaacacccgcattacttacgaacacatcgagtcttccgaacgcttgcacagttttctcgatgaattccgtccctgtctcgggcttggagatgtcccctgatacggtgatgaagcgctctttgtctgtttgggaggtttgttgtaggagctctgagacgtcctttttcatggcggtcagaaggggctcgtcgttggagccaccgaggtggttgacggcgacgtaggcgccgtgtcggaggtattcgagggcgatcgcctaaactatgttagcagtcttctgctatagagattcctgatcgatggtctgcggggttgaggagtcgatggggttgagtgggatacgtacgcgaccaattccggtcagcccgccggtaatggcggcgactttgccattcaagagctgggggagagacattttgttcctgactgctgctgaagttgaaggatgcgaagagaagatggacagcttgaggtgttgagaggatatgagtggaggtcgggatgttcggggtctcgcggtgatgttagcctgagatgagtcggcttacagtactacg

SEQ ID NO: 8450 - DNA, 246 bp, Emericella nidulans
  unsure (1)..(246): unsure at all n locations
tgatatgtgagatctttgagaaggatttgggctaatgccgttgactgtcgtgtctgcaaataggagggagatgatgagaacacagatcgtaacccaggttaatcatccaatttagttgtctaaaggagtgcgtgacgttgatgtttattngacctctatttgatctagagataagtatggagccgttcgctaggcagggttcgagattcggtgtactaatatgcgatactagcagagtggagcaca

SEQ ID NO: 8451 - DNA, 943 bp, Emericella nidulans
aaccgtatccttccgcaaaaggcaaaaccataggtccagcgtaacagcgccaccaaagtaactaaatcctcagccgtcgcgttggtggcacggtactcttgacagatctgaccaaatctcaagagggtatgggtgttacagacaagcactcggaggtgtgacaaatgacgccgggttgatggcggacatccaaattctagttttgtaaatcttgaaaaggtcggtaacgagggaattaaagttaatataggagtcagcaaagtaatagaaagtgagtttcttccagtccctgttccttattagtgtttgctatttaagcggaacaaggtaatactcacatctggaactccgcgtcaagaatctccatattgaggcgatgttctgcaaccttttgctggcagacacgcttggccttcgcttcatttccttccttgtcacgcaaggtcaatatttcatggttctgggcaagtcgcttaatcaactttggcttgatttcaccagcagactcctgcacaccgtgtgcaccatgagttcccatgccgccaatagcgctccggctgccagggacactaccgcctgcagcaccattttgtccttgcctagagaacatcatcaaccatttgtaatgttcttcggcgtattgctgtttcagctcccgcgccttctgtaaggagatgttggcatgctgtatggttccaaggtcggtgccacggtctgcttcaacaatgactagatctccaggatttacttgaagaccggtatcttcttgtatgtagaagacgtctgcacggtggcacttgaacgtgacaatgtaaagcagttggttctgatgcggaaggacaggttgatgacgaacatacgggttgaaagtttggtgaaacggaggcgtcattggggattgggcatcggcggcactgcgaagagaggggtctcgagcaaaata

SEQ ID NO: 8452 - DNA, 1166 bp, Emericella nidulans
  unsure (1)..(1166): unsure at all n locations
ctggccccacgcggcaaggacaggataaaattaccagttcaagcccccatccagtgctgcccgaataaggtagttgtattcgttgtagacccgaggtagtcttcgcgaaagccagaactggctgaatattccgacgacaatggcacctcccacccatgcggtggttccgtagtaaacctggcccgcatgcgcgaggatgattgtcgtgttgagtggccagttgcggatccgtgggaagattttgctcagtccncagtggatggctgggaagacgaggccgataatcagacctagtgggacaatgaggtaccgaaccatgtgtcccgtagatttcttttgcaagcgaccaggtgatggcctgactgttgagactctgaaccaacgaaccactaaccacgttgtttccgatcggatcaaggagaatctcgcgttggctggtgacgatggtgatcatgacgacgtagttgagggctgcgccgaggagggtaccatagacttgggttgcgaacatgattcgatgaggaaccttggtgtattggcctatcttgagccagtttgcgagattgactgagagcagaattacctggtgcgaccagctggcaaagtacagaccagccaggggtcggcctgggtgcagagcaccagcgaccatttttgagagctgattagtcgagacaccagtgccgtacagaccgtatagcacgcaggagaaaggggcaataaaagacccgagaatgagggatatgatgtacccccaggctgggagcgtggtctctccttttattgtgacgatcaggccagcaaagaaggcgagcacaaaggaggcatagtaccaccacatgggcacctccttgtacttgagcatgccctggtagtgagggtcgggctgtgtcctgctccgtgcttgtttccatgcagtctccatgtccttccagtagaaaatgaggacgtgtgagatcagggcgccgatggcgaggttctgggtaaggtatccccaaacggtgctcgaggtgagactcgggaggccgacctgctcaagcttgacgtagtcgatcgttccctgggagtttattacggagtccggggagaatgtggtcccgttgctgtgaaagagcgaggtcgacatgaacgggaagctctttgcatcccatgcgttgccatagtat

SEQ ID NO: 8453 - DNA, 828 bp, Emericella nidulans
gcgttaatagaaagcaacagccggaaacaccccacacaaagagaaagaagaccaaaccaccaccaaacaacaagaacccactaaagaacacaacatccaaccacacaacaaacaccaacgaaacacaccccaacccaaaccaacagccccccggcaaacccgcgaaaaaaaaacacaccccccacccaacgcaccggcccaacaccgcacaagcacacaaccccgacaaacaacccccgaacagcccggacacaaaaccccccaacaaaaaacacgacacaaccaacaaccaagccaacacgacacaacagcgcatacccgcagagcccccccaccaccggggaaggaacaccaaccacccaccaagagccacgcacagccccccgcgacaaaaaggacccccacccgacagagcccccaagaacgcaccagaaaacccacaaacaccccgaaacgaaaacccagccccctaacaggaaaccgcaaaaaccacgaccacccccctccacaaaaccgcaccccaccaaccaacccaggaaaccaccgacacatgaacgcaacagaccacaaaaaagacaccgcaacaccaaaaccccagacaacaccaagggcaggcacaaccaacacgcagaacacccccaaggggccaacgccccgacactgaaacaaccctaacaagaaccgccaaccacaaagcccacatagaaaccaacgtgcccccacccaaacaacacacgagacagaaacccaacaatcccaccacaacaaacaccccacccccccaaacccccagacaaaccaacacggcccacaacaacacacccccca

SEQ ID NO: 8454 - DNA, 877 bp, Emericella nidulans
gtttcagatctcctacagcacaaggtggcgcgaccttgggcttgtatgggtttacattcttgtcaatatcgtggcgggaatgggactgtactgggcgttcaaggtcccaaaacgaaggggtagcaagcatgcttgagagaaaggtggaccgaagactgggtagaagtagggctaatttagttaaccattttctttaatgtttcagtgtccctattctttgcatccccaaatctagaccttcgagcgagctacaaatctagcttctatatcctgatgttcagggcttaaactgcccagttcttttccagggtattaacaacctatcaaaccaagtatttattgaattgctatgctaggtgcttaagaggaatactataatactaagggtagtcaatacaatcttatacagtgttaatgatactagtatatgataggagggtatggaggacccgggcgttttggacagatacctcagccgaaactggggttttgcccgagcgccatataattgtgtctggctgatcgggcaatgtcttctcgatcggcgagctcgcatcgagattataccaccgagggttctgaactgtagatgttgtccggtatttgttgtagaagaaggttaattgatttgctgagagcgttattgaggccgtaccaaaagacagatgggggatacggtggtgcctgctgctgtaacaaactgttgctgcccgtgatcaatatgttggttgaggctggtgcggatgtctataagagggaccagaaaagacgcagtgtgttggagaatacgagggcggggcgaacaaagacggacgaatgaattatagataaatacgatgatagagatacttgtaaccgagattgttctctagggtta

SEQ ID NO: 8455 - DNA, 1038 bp, Emericella nidulans
gtttatcctaatccacattcgtataagtaatgtgtctgtatatggttctttcaagcatgatcatcaaataaaaagcatatttctttatatatgatctatttattcctgtaattcttgagtaaatgttgggacgtgaaggtattgctttccccgagctcacgggcgatggctcattcggtgcagcgaggcacaagaatacatggagactgaccctttgtagcgcgcttaagcggaggttatcagatgttttatcgaaagtagagaatcaaggatcaaatttgaatataagaatattctagtatacttaataccaagaagttcaaagatagaattcaagtgtaataacccctatatggcatgctgacgatatgaaacttcctgggtatgccttgcttctccaaccccaaaactggaaaagaagaaaaaaaaaaaaaaaaccaaaaatccaagaaaatccaagaaagaaaagtataagaaagaaacaacgagtatagtagcgaagggaagaaagtcagtaggatcggaaccagcgattgacaaccaagaacaccagttactcgatgctgtttgctcatgtgcggtagatcttgacaacgttgaggatgttcttcctgcagatgggacagatctcgacctggcgtgcgcacgtaacgcaagcgcaaacatgtccacagtcatagaagagagcgtcctgctcctcgccgaaacaaatttggcagaggtccatctcttcatccgcaacctcccagtagctgatacctttgccgtggcgcttgccatccttgtatcccccaacatacttgttgcctgtcttacgttcgacgaatgttccctgaccgtggcactggtcctcaaaccagtcaccatcgtaagtatcgccggtcgggtactccataaagcccttgccgtggcgcttgccgaggacgtagtcgccagtgtaggtagcgaccgagtcagatatatgcttgcctttcccgtgatagtagcccttcatgaagtcgccgctgtagaagtcagatgtgaaggtggcatcaacag

SEQ ID NO: 8456 - DNA, 873 bp, Emericella nidulans
ttatcgggggcggggatggggtcagacggcggcgcttggaagggtgctccatagctattccatcttagcgtagaattctagaaacctcttgaatgaattctgaatgttgctgctttgataatgagaaaccagcgaaagattccgcgtatgccatcctaaacagaaggcggtaagagctttactattacatggatggggagctttatctcatctccacactcaattctctatgatgtagactcctcgaaatggcagacccggaatcaattcgaatcctcaccctcaactgctggggcctcaagtacctcgccaaataccgccatgagcggctctcagagataggtcggcagcttgccctcgccaacccgccgcccgacattatcggcctccaagaatgctggacgcaacaagactacgaatcaattcgcacccaaatcgcccatatccttccttacggcaaattctactttggcggcatctggggagctggtcttgccattttctcgaaatggccaatcgagcagacttctatgcacgcgtatccgctcaacggccgcccaacggccttcttccgcggtgactggttcgttgggaagggcgtcgcctgtgcgcggattcggtatgggcagggaaagcatgatgttgcagaagttttttgcacgcatctacacgcaccctatgagcaggagccgcacgacagttacctcgctcatcgcactgcccaggcgtgggagattgctaagctcatgcgcggcgctgctgagcgcggacacctggttatcggactgggggacttcaatatgcttccttcttcgttcgcacacaggcttatttgtgcacacagccccgtcgtcgatgcatggcaggtgatat

SEQ ID NO: 8457 - DNA, 351 bp, Emericella nidulans
  unsure (1)..(351): unsure at all n locations
gaaggagtgaggaagttctggaaagttatagacgtacaaggtcaggaatgttctcatctcattggtatgagtagcccaggtcagcatatgcgttgtacggntaaatggaaacagacgacgcttgtgagcgatacggactgaacntgttggcccattgactcggttggagctggagtaagtcgacctggacacggccaatgggttcaaacgattctgtcgtggaacctgacagggtcggggacgatgccccngtttgtaggcggagacgggatcggtgatgatcgagtcgtatcccgattgnactgaatggtgcgtctcantctganttacgatgataggcttggttttgtg

SEQ ID NO: 8458 - DNA, 1404 bp, Emericella nidulans
gactgagcgtgagctgcgtgaccatgatccacttgacggcgccggcaatcccggcaactttgacgctgtcagcctgttctggtatacaaagataatacgacctggtaaccacgcaagattaatataagcaacagtgattactggtggctcacccaagaatacagctgtcccaaaaattactcccgaggtccgagaaaggttcgtagcaggctggaaactcgttctgccatcgctgtccaaggttggcggtgaaatttatctgcacttctggtctgattaggcaatcgtagagcctgtaacgaacctccaacctggggcgtgggacagcgaagaaacacttaggatgaccgccaatcagccgccgatttccgtccgagaattgcggaagtacatgtttttattggcttcgcacatgcctcgtgggggatgcgcacaaacggtgacccactgttgacagcttcagcttcccaagcctcgctcaacttctgctgtgatttctgctgctgtgatttctgctgctgtgtcgccgtcatgtcgtatccaagactcctggcttggtgaatttctgtgcacacattcctgatcctgctctgctatacttgttctcatttcgccatcatagtatacgataatgacatggatttccaagatcttcttgccaagtccgcttttttcatagtcggaatgttgatgctgcggcaagcgcatgaactcatattgtcccctcagtttcacccctgagcgcagccgaatataatatcactgactacgttaaagcacgcgaaagcacgcgctgcggatctcgtttccgtctattttgctcttttggtcgaggcaagcgagagcgaatagtactgacttaatcgacgttcccggcgacttgacgtcatggattggtggtgtagagagggcagcacgcaactattccccactaaggagaattaatggctgccccgttgaaaaggaggaaaaggaggaataaggaggccccccgagtcaccgataagtttccgccatagcggtttataaattacaacgttgattgactgcattagtatattacacaggctgatcatccgagtcacaggctggtaatgacgatacaaccacctgttccttacagccttgtcacgcaatataactgtgcgggctctaaagcagtcgttcccaactggatggaacgttgcgcctcttggaccaggattctgtgacagccagaactccatcattcgtcttggcttgagctactgtcaagatcggtcaggcgagccttatgggggatgctttttatgctcctcggaatcttccctcaccgttagcgactcgctgttcaatcacattctatggtttctacgccagtagttctatagttaacttgttctgatccgtggccctcatggatgc

SEQ ID NO: 8459 - DNA, 890 bp, Emericella nidulans
tgccgcgagggccctgtatcttagctgaaggaacgtgtcgctcctgtattcagaacgcagagcacttcagtccatcacgtttcgcaatgaaaagacatcagctatactgggcgtgaacgcgcgcgagctgggcaccgaggctattgatcgcatgcttatggacctcttcctcggagtcggcgctttactggtgggcacgggcacaattatggctatctggggcgccaaccaccgcgtcttccaggccagcaacttgctctctggcttcatcggcaacggctgcgctgctctgttcggcgtcctgaacgcgttctggtcggcctatctggtctaccggttccagctccggtacgttgcctgcgagcgtgatccgaccgtgcagagcatccgagcaaaactccggcaccgggtgcgcaggtttcagtggcatgcagcagtcaatggaatgaccggcctagtgtctgggatggcatctatggtgaccgcaaggatgtggtgggggtacgttgtactgattccttgcgttattgtcatgatcgccagcaatctgttctggaggatgaagctcggctacgatcgaccggtcctactcaatctacaagataggaaagcggcagaggagaagcatcaaggtgaagatgacggcgcggtcgagattctggcttcgctggcggccgtggaaggagtacggagcagactccagcaccttgctgatgctggatccttgaagactaacctcacattcatcagcgagaaccagatgcttcaatcgttctcgatgtctcttctacaaagctggtccgattaccgactgttcgccgcgccagggagactcaccgtctccgtcgaagacttgacggttggatcagacgctgagagggctcggatgg

SEQ ID NO: 8460 - DNA, 1371 bp, Emericella nidulans
agagagaactcattttctctttaactcagacgcctccgtccctatatccatccccccgattgtggatctttccctgatatcacagctatgaaaaatcagcaccagtgtggcacgcttccctatgtttggtgaagcgttaatggtgcttagtacttgccctcatgctggataagcaatccaccctcaacccaggagcatttacaaggtggaagactagattcgacatcaagccaccgtcttttgtctcaaatttatggacagcgccaacagagtacttggcaggacatgctggatttagaggttggtcccctgactgggagtttacagggtcattggactgagctagcacttactgccatatcttgttagccgaagatataatcaccacgcaggcggcctatcaaaggaaatctctctttgtcctggactctgtctacgtggaaatatttagccgcaattactaaggctaggatcagcgtttacaaatctgtactggggatatacttgatcatgcattcactactctaaaggtggctacttgacagagaaacaccaaagccttaagagtcggcagatccatctcttaacaacactcatcaaacagaactagctcgatgtcgcctgggcgaacagtcttccgtcccctcatcagtaccatttccccgtcatccaaatcatcatcacgttaaagcatcgacttagtcagagtaagccgcaatgccccggtcaatctcagcgacaatcccctcggacaattcattggcgatatcctccaaagcggccggaaccttgggcgtgatcgcatcccgcagaccctcagcggccgccttctgatcctgaagcgaggtaagaacatcgccatcaagaccatctgccacgaagttgggctcagccgcgatcacagcatcaataaggtcgctgatgtcgcccgtcagatcctggatgggagcgactagttgaagggcctcgagggaagtcagagagtcaaaaccggcgacgctggccgcgccgtcgttgataatcgtcacaagctcggttgacgcatcttgcacggccgaaccggaggtcgagcccgccacgtaggaggccacggtggatgaaacagtggcgacttgggcgccgatagcgtcgaagacaccggtgtagtcggatagcgcgcgcttcgccttggggatgggctcagcaaaggcgctgtaagccagggcgagagtgaagaaaccggtggtgaacttcatggtggacaattggacagacagcgagtattgatggctattggcttggataattggagaatctgaagagctagacatttcggtctttgtgggttgaagagtcgcagaactgaggaccatgtccgctattatcatccgg

SEQ ID NO: 8461 - DNA, 318 bp, Emericella nidulans
atgcttggaagggtgacagtcgagaaagttaaggcacaagttgtgacagtaaaagtcatgcttgtgcaggctcaaccgacgatcgagacgaaccggcctgatgaccaggtcacttgcctatttacggaagagttgggcagtgatgctgtaggcaatactggacagcggaagtgggcgagaaattgatcaaagggtctacagacgtgcgagcatgacagtttgaacgggtgcggggtccatccacatggtcaagtccgagaagcctcgtctgataaacgaagggggtgcagttgctaagaaaaccacggttaagaccgc

SEQ ID NO: 8462 - DNA, 921 bp, Emericella nidulans
attgatgatacctaatttagtaagtttcaattttatatttactcttttctgttccttcattcccttttcacttgggtaatattttggttttatttttgtcttgcggtacagcctgtcaaagtacatagttctagcatttagtgagatttgattgttgttagcccctttttattaaaaaaaaaaaaacctcaaggtacacgttctactagaatatgctataaagtcattttgcagtgcttggacgataatcgacataatgaggaatttagacctcgaaagacccatggtgcattacacagcagcatccctggagttagcctctggatgcgttccgggcacgttgcaatacccgagggactcagcaaagccgaagcttgtgaaaatgacgaccgtaggtgagagatacgggtcttgctcaagacgcacaagggcagggttgatatgcactgtaaactggctattctccagctcattgcgaagatcaccggcctggtcaacgatgccgcgcactcgcgtttgaaagtcagcattcttgtgcccggccaccggcggacaataacgacgtatcaagtccgcggccttgttgctggggagcggcatatcagggcaccatatattgtcgcagaggtgcttccagacgcccgagacgccgtatttgaaccgacggtccgcgcggctcccacagacgtcttcccatcctttaaatatgtcggtccatagttcattgaatttctcgaccctagagaaacggggagtattagcgaatatggttgctaggaaatcatgatcaggggcgtctcacaaggcttttgcctcatatctttctttgtcccggcggaggagttcttcggcgactacgtagtatttctctcgaaatttgttcgtttcagcgcattcggtatcaactgacgttctcgattc

SEQ ID NO: 8463 - DNA, 1214 bp, Emericella nidulans
ccgcaggaagaagcacgagcaggagacggctgctaaacaagagataagagggagagtgaaagtactccgagtatgcggcatggtgtccctgagaccgaaatgggtttagtgtgagaacccaggtccctttgggattagtgtatttactcctacaagtatgagttatacctaccccagcttacgtactttttcggtacacaattggggaaaattcaggagataatgcaggtaaaaagccaaattgatggcttgaagagatatcaaagtacccaagatcaaagccctattcacatcgaagatgcacgccatcccaccaccgcaacgccgaagaatatgcgctccatcccggtctaaaacaaagaaacgctaccgacataccataaaagaaagaaagagaggaccacgaaggagcagctaatcactatcatcctttggccgacgaccgccacgctttcgttttggctgctcattctgatcgctgccgtcatcttcatgcttgcgccccgtcggttgatctggaaccttagcaataatatctgccaggaaatctaatacttcatccttcgcaacggcttgcttaagatgcgacgcggttacacgtttcgagttccgatctttggcttctttagcggctttcgtaaccagtgaaatcatgaaaagttcaagtgctttggctgtattcaacatgttagcatgatctcccagattacagggttgaacgggctgatacgtacagacagcaataggtgtcacttgcgcaaccttgcctacatcctcatccgcctgcataatgcgcttgatgcgcgccacaggaaatttggttttcacctcaattccagccgccggatccagtttcgggtgctctacgggctctgagggttgttctggcttgactggctcctggtatagtggctcctcgtatttgggctcctcatacttcatttcaggcgcaggcgccaggcgcgacttcaacagcgcgggacaagcgggaggatcggcgagccatatcggcgtcaaagctgtggtcggggtacgggggaatgtattgctgcaaagctctggcggacgcgacgggcggctgttgatagtgcggggtgaagaagggcgaggcgtcgtaggatgtgcgatgtgcgagcgggtttccgaattggtagacgggggaggggatcgcgggttggaaggtagaaaggtcgggagacgtgggcgataggagt

SEQ ID NO: 8464 - DNA, 241 bp, Emericella nidulans
  unsure (1)..(241): unsure at all n locations
gttgtaatttgaaagaatcccagtactcacagcaacggtcggcgataatggctcaaacatacgtgccgaaggatangtgattactgctcaggagctgaaagtntccccaggctggatccatacgtacaatcatatgggnttagtgnggtttccattgacataccttagtaggtagtcaatgtgccatngatccataaagaaatgctccaccatgcacttgtgatcggatgccaattagtgt

SEQ ID NO: 8465 - DNA, 1815 bp, Emericella nidulans
tcggaaaatcgcggccagaatgacattggtcggatctcgcacatcatgtacacctgcagcccgtcctggccgcgcaccagcccgttctcggccatgagcgcaagcagcgccgcgcctcgtcgacagtccggcagaagggatcatgacgatcgcgttcgtgaaaccgatggtctggcgtagctgcttgattgcgcgacactcgagcgcaaaggcctccctgtaccgcggcgagtaatatcgggaggcgccccgaaggcccagcatcgggttctcctcgcgcggctcgaactgcgagcccccaatgagaccagcgtactcgttcgtcttgaagtcactaaggcgcaggatcgcgggccgtgggtacacggtcgcgcacagcgccgcgaacccgtgcgccagccggtcgacgaagtatgcgggcttgtcgcgatagcccgccgtcagccgtgcgatctggtccttggctgctgggtcgcggagctcgtcgaagtgcacgagcgccataggatgcacctggatgctgttgctgactacaaactccatgcgcgcaaggccgataccgttggcaggaaggcgccaccagcggtacgcggcggccgggttggccatgttcagcatgacctgcgtcgagtgcgacgagggcgagggcgaggggaacgcgagactggaaaggtcaatggtctcggtgcggatctctgagaggcccttgtagacgaagccggcgtcgccctcggcgcatgagacggtgacctcctggtccgagtgcagcatgtaggtggcacggccggcgcccacgactgcaggcaagcctagctcgcgactgataatggccgcgtgtgaggtgcgtccgccgtggtcggtgacgatggcggcagcctgcttcatgatgggcacccagtccgggtcggtggcccccgtcaccaagacggacccaggcacgaactgactgatctcgtcggctgtctcgatcaggcagacacgcccagaaaccgcagcgtcgcccactgagaggccgcgcacgagctcgcggccgcgggggccgaccagcttgtggcgctggaagacatcgaggtcgcgccggcgcgagtgtactgtctccggccgggcctggacgatgaacagctggccggtgaggccgtcgcgggcccattccatgtccatcgggcggccgtagtgctgctcgatcagacatccccagcgtgccagctgcaggatctcgcgcgggctcagcaccatcgcctctcgctcagccttggacgtgggcacattgcgcgtgcatccttttccctcttctccatgccttccctgagtgtagatcatcttcatcgccttttcgccacagcgctggtcaatgattggggtcaggccgggatccgccagcagaagcggcttgaagacatgatactcgtccggggtgactgtcccctgcacgacattttcgcccagcccccaggcagcattgatcaagaccacctggttaaagccgctgtctggatcgagcgagaaaaggactccagcaccgccaatgtcagaccgaaccatgcgctgtactccaaccgacagggcgatactgacctggtcgaagcccatggtctgccggtagctgatcgcccggtcagtgaagagagacgcatagcagcgctggcaggcctgcagcaccgcctcctcgccgcggacgttcagaaaggagtcgagctgcccggcgaagctggcatcgggtaggtcctcggccgtggcgctcgaccgcactgcgacgtcgacgtcgaaggcgccgtcggcatcgccatgccatcatggccatcatggccatcacgg

SEQ ID NO: 8466 - DNA, 601 bp, Emericella nidulans
tgttgcctgcggcctggcgttggtggaagaaggcttggtaaccgtctaaaagacggatggtgccttcgtttgggatgagctgtgttagatggaggaagtagcgccctggagctagtcaacggcttttctaggcagtttacggtgcctgagaggcgcaacggggggcagccctactgcgaggatagtcgagcacaggctttcctgcgctccggcagattgcattcagttcacggccgtaaaaggaaatatcccagtcatgcaagggtttatgcaacccatcaagcctacagaacaaatcagtcttccaagaacccaaaatagctccttaactaagaatgcctactgatcaatcgcaacaggcatgtatcccacccgcttgaagggcatgaggcgaggcgcgcaggccttaggttcctgggaaacgagcaggtcgacatctctcagcctctcacggaggaagtcaaatgtctgattttccggctgccggcggtcgctgcctatgccgtggtgaatatgtagccgattctcaaagattactggacgccgggggtcagactgcttcgcgataagtgccagtgaggacagaattgcatcacagatc

SEQ ID NO: 8467 - DNA, 2060 bp, Emericella nidulans
gagcaaaattcccttgttcctccaaaaaggattttggttaataaaagattaaaaaaaagcttaaagggtcaaaattacccggagtaaaattttcaatgggcggggtaaatgttaaaaaaatgaaggttttattttaggcttgcgtagattgccccatgagaaatttttgatggaggtacatcctacagccctaatctaagcatgtctaaaatacacctctcagagtctcccccaaaaagcctcacgcctttttccaaattggccttttcggcccccgcaaaggtcatccggaagtgcagctcgccgttgggtttcttattccaagaaaaaagtgagcccttggtgatcaaaacgcctggactaagcgcatcagaaacaatctgggcctccagcccttgaaggcgggaatccacctcctctggcgtcgcctttgtttcgaatttgcctattacagggtgtcgtctccagttcactttaatccaaagaaacatgccgtaccgcggcggcacccactctgctatatctcttggaaggtgctgttggcatgcgcgtaaaaggatattacgacgctgtcggtactcccctgagagatgcagcaaccaggacgagaagccggtgtggccccacccctgatcaaggaggctccatagcattagttgtgacgagccactcactgctatggtactaacttcctggtaggcgagaaacttgtcgatgatttgcgatgatgcagtcacccagcccgcgcgcagccctggggcgagaatcttagacgtcgaatccaggcgcacgacgcggccagatgtatccagagagaggtaggatgggtctccagtgctatagaatgcatcaggagatatctttgtgggttcttcggcgtctgtacttgcttcgttgtagggacccagacggaggaagtaataagggtcatcttcgattatgatcaggtcatgcttgaccgcgatcgcgtagatggctgcacgtctctccagagactggctgtatcctgtgggattttggcctgtaggtatggtatataatactcttggtttcctgcccttagatgtgtcccaagaggcgagggttctttctaggacatcggaccgaagaccatccgcatccatttcaactccatacactcgtgcacaggtcagggttgcagtctcgagtgttccagagtaggtgtattgttctgtcaaaatccaatcaccccgattgcagaatatccgcagggcaacttcaagcgccactgtcgcgccgcaagacagaaaagtacgccagtcttgatatggcggattatggaccagctcaatgtgttccgtgatgaatcgcaggagatgcggcgaacctgccgcatgaccgtaattcattcctagcgagagattgtacgtggcatctcgctttgtgactgtgtaaaccgaatggccagagtcgttagctgtgctactcgccagggaagcaggcgagacaccgtggaatgtaaatgattcccacggataatagtcggctgttggtcgtccagtaccaagaggaatgatcttccgtggtccgatggggctcgcacctttcttgaaatcggcaccattgaagtccctgctctcggcgctgaaatgatggtccaatcgacaggcgacaggtctttggcgagtgggaatggacttgaaatgctcggcaggaagggcggtcgcaaccgtcaacggtaggggtgcggaactggcccgtaaagattcatgtcctgaatatgtaaacggctcatgttggcagagcctgattggataacccatggaaggatgcttggaaactggtctttgaactgatgcgcaagctatatcctcactgcaaatgcggctatggagattcggaggaacacccccataccggtcgtagatcctccgaaccaaggccgacggatcaaatgaaattacgccccctacccggcgggaacccgaggagttgacctttccacaaaaaatttaaataacgggcccctaaagaatacaacggctttcccctttttatattactttcccctgaggttttgaaataagtgacagttttag

SEQ ID NO: 8468 - DNA, 1071 bp, Emericella nidulans
gagtagtggacgcgaagcctgccctgaactctataatagtatggcatgagcatcggggtatatcagaaaattgcctagaatatagtagataagggtgaaggagaattatgaagaactggaactgccagcagacagtgagacaatccgcccaaccccgagaaccatccaatacgccaactctcttttcgttcctccaacaccaagcccagcagcagcacccaaggaatccttccctccttcctctgactccatcggactatctgagtcccactccatgcgcacaaacactggaatctcaaggacatcctcatcaggctggatctgttgcgacgggtcagaggcctgcccgctccaatcaaactgccctgatacacccttagcggcatcctcgctgtcgtcggggtcattatcagcattgtcatcgtcatcatcgctattactgccggtcccagtagctgaccgtctcgcgcccagaccaggcaacgaaccaggcacaacctctagcacaaccgtcgtccagttgcggcccttctcccacacttttccagcctcagctaccctttcatagggcggtgcgacgggttcaagcgcttcgctccaggcgtctttattagcgccgatatcgaactgcggacacaggattgtgacctttgatgcaacgcggccgggtgtcacggagggagttgccagtgtgatccggacggggtcgaacatgtgattcttaagcgtgaggaggagctgaattggtttttgtggctgaagggagttgaggtctggtggtggtggtgggagaggttgggaggctgaggggggaagaacgagcggccggagcgtagggagggggatgtaactgattgcaatgagtttgatgcggtagcggacagactgtggtttgaactccggcttgacgaggatgtgcttgcatgatttgcatcgctttgagcgtttggtgcggagaagggttgggaggggaaggagtcttcgacgaagcgcgcgctgaaggattgaggctgagcggtgcgttgttcaattgaagcgacgccatcccagccgcagtcgtctgaggcgagg

SEQ ID NO: 8469 - DNA, 604 bp, Emericella nidulans
ctacagttgtagcagtgcattcacgaactgcaacccagcggcgtatatatggaattacgtgtacaatgaagatgtgggagagttgttggaatatcaggcacgaacatgctactttacatatcagggatctgatgcagacagctcaaaaccagctcgaactaccattcctttctcaccaacccgtacctctatccaatcctgagccatacagaataccattgaatccgtattcttccccaccagccctaactcttctggctacttaaacagccaacgtaacctccccgtcctcgacataaactccactccaataccagctctcctctccaccgtcgaccccattgtcaagcctcagcacaccaacatgccagtcttgcgaattgcttgacgcggacgcactgacggcttgaacagcaagttctagatcatctgcgccagtcgaggtatagagctccacgctaccgccgtcgaaatcaatcccgtacgcaaaattgtaccagacgcccgcttccagcgcggtcgaccactgtgccgcgctgttggcatagaaggtcaaactcgaagccggtgtctgacgatccgccgtacttgagttcggtgaaat

SEQ ID NO: 8470 - DNA, 723 bp, Emericella nidulans
catcagcagacgccgttttgtgcgccctcattcaacgatgtccgattgatcctcaattccgcgcagttactcggtctggtgcatacgaagggcctcgagctcgttacgttcgatggagacgtaactttgtatgatgatggggctaatcttaatgctgatagccccgtcatcccacgaatcatccgcctccttcaacaaggcatcaaggtagggatcgtaactgcggcaggatataccgacgaggccaagtattatgaacgactgcaggggctgcttgatgtcatgcgcgatgcctctgatcttactgacgagcaacggtccgcactaattgtcatgggcggcgaaagcaattatcttttccgttatgacgcttcctctccacaccggctcacctacgtcccgcgcgagaattgggtgattggcgaaatggccacctgggaagaggaggatattacacaactactaaacatcgccgagtcgtctctccgcgcttgtgtcgcgaacctgaacctaccagtctccgtcctccgtaaagaccgtgcggtcggcgttttccccaagaacagaggccgcctatcccgcgaacagctagaagagaccgtcctcgtggtccaaaacacggtcgaaaggtcccaagtcggatcgcggctcccattttgcgcattcaacggttgctccccttctttgtgtccattatctcgtcaccatcatccagaaggaaat

SEQ ID NO: 8471 - DNA, 1097 bp, Emericella nidulans
tcatactagcaaaccaagagggaaggtgcaaatgaggtcacgataagagcaagttgaaagggacaactgtcagtttcacgtgccacaagtgaggcaatgaatagcaggcgatgcgactgaataagaaacttgagatggagcacccaaggttttagtcttccctttgctggtgagaaagaaattttaggggtatgttggccgctgtggctgatgaatcttgacgcgaaataggacgcgctaagttctgaggagcctgggctatgtgaattatgaagaaggcggtgggagggatccctggaggagacagggttgaaaaaagggcggtcaggtaaaaagacgggtaaaaaggaaattcgcagtcagctccagaaacagagactgagaaaatcagcctgggagcggattcccttaagtacggcggcgcgtcgcgaacattaaaaactccatccgagacgctagcccaaacaatcctagctcaagccattcagcaggccgtgattggtcgccggatgacgcgttctgtagcttgctacttgctattggctccgggcaaccttatgagtgggtcttgataccagattcccctttgtcggaaacgcctggaaaacacgcaaaagaaaagggacaaatccctctgcaagacgagaaaatcatacaatcatcgtaccaggacttacaatcttgtcaaaacctggatgggaactcgatatgtccgtgaatgcggtagagtcaccacttgtgctaccgagaggaagtgagaacgaaatgacatacctaaatatgttaggcaatcatggtgggatttgcatacaagcagtcatcttgcgtttggttgcgaagcccaggcccgagcatagcgattgttacctgctccaggggcggtatgcatgtggtaactgctgatccgctgattccgtaccccagggttcagccctgaaccctcccttgcatcggatgtggcctagcgtgtagcgttgaaggtgcaatcaatccgtaccctgcttgtactctgtcatggcctccttgtagataatatgatggatgtcgaaaagaattaaacccaaggtcgctgataaatagagaacctagacatgctt

SEQ ID NO: 8472 - DNA, 1007 bp, Emericella nidulans
tctgctatctggtcttgaagttcgttctcgcgtcggagaaactcctccctctcatctttctcaagaacgatgctgggtgtgctagagcgatcgccgatgcgtgaatctggtcgtggagtttcggaccgggatacatcatggagacgagatggagtactgggccgagggccgcgcgcttcagcctttgcggcgcctacggcttcagcgtttctggctggagtccatttttccctgggcacggtttcaccactgcgccaactagagacttcggattccagtgcggaaatgtagttttcaaaacttgtcacttggctctgcgctcggcgaagtaactgtttgagctcagcaggactcaattcagcattgaccttcgccttgttcttaatggccttagctcgtacaccaaaccgcagggttgagacagtttcggcgtcattgtagctgctgggagaacagttgataatcagggtggtcctcgagttacctcccaaactttcttgcagaatccgtgtgagttttgagtcacggtaaggtatatgggttgactttccgtcggtaagtgcgttaataaccattccgagagcgctcagactcttgttgatcttcttcgcttcctcgagagtctgaccgctagcaccagttttgccgaccttatcactacctgccaaatcaaccaaaaacagctgaccactctttgcagagccagtttccaggttcttttgagtcaccgtgatgacaaatatggaatgccatctggatgattcctggttcatgttggttgcagcaaccgctctcgcatttccgccacgtcgcatgactttcgaaacctcttgtacgctagagacgtaaacctcaagcagacctttgacataaacacctttgacttctcttatcacggcaggttgtcgtttgcggcaccataaacacgatacgtccatattatttcatgactacacgacggtgtctcatatgcttgatctaaggtgctggcagatcgtcacataccg

SEQ ID NO: 8473 - DNA, 978 bp, Emericella nidulans
tgaactccccggacctactgtctaaactctacgcctgcaccaacagcttagaagcctcagttgataaagttgatacagaagaaatgcaggatcagactgccgaagacgtaatctgcgaaagccctaaatgtcacaaacatgcattagcatactggcacctgcaagcatctccatttccaccaatcaatccaaatacagttattgaaaatgcaagacaaaaggaaaggagttttcacctttcatgtgaaacaccaccattaactccttcaccatactcgacaaccttacccccagatcctttacctttactcgaccccggaccttcctcaacagagctcgtctgcatacgcaaactagccgtgagaacaaactgtcctaccgcagcacagaacccgctaaggaaggcattgaagggctgttcaaattaaacaatattagcgacaagtcacctagagaaagcggtatgggagtgtacatagttccctgccagcacacaataagcgagttgcacaccaccaacaagcacgagaaaggccatgaaggcgtctaggagcattgtgcgctgcggcgtactggtgaggtactggtgccagacatggacagcaatatcagagacagatgagtttgcggatagcgttttggggccggaggagagagttggtaggggtgttgatgttcctgatgttgaagctgatgcgggtgcggaggacgagggtgttgcggaagggcgtttggagggcattgttcgttaattcggtagttttgggcctttaggtcgtcgagcttgagtttgtaaaagaagtcaaagaacgaaacgttgggctattaaagtgagttacgacggagaaggacgaaggggtctggagctatggcaagctgtccagtcggaatagtcgctttcacgtgatcatgcgcggagtatatggtgttcttataaccaaaaaccaggcaagacccacacagaacctcaatgggaag

SEQ ID NO: 8474 - DNA, 532 bp, Emericella nidulans
cattctagcgtcattgtcactgccattactgcttacttgcctgggatttcttcgatggcgcctagaggcggacctgatcatgacaggaaagcgccctccagaatggctccaaaggactcccaggtcagtgcatcgaacgagatgaccggcaatcctccctcctccgtgcagggacggtcgcgaaatgggtgcatcacttgtcggttagttgaatgccccaagttgccgggcgaaaggattaacagtcgtagcatccgtcgcgttaaatgtgatgaagaacgaccgcactgtcgacgatgtcagtcaacgggccgcaaatgcgacgggtacacgcctctcacgggccagcaaccgaagcagcaaccgccacagcaagcggcgaaggcaggctcatctgagttgcgcattatccagcacacgccgcaggtgacccagcccacgcagctttgcatgttcccggcgtagatacactgctacagaagacgaatatcgagcgctggaattttcaatgtcaaacgtctcatgctttgga

SEQ ID NO: 8475 - DNA, 716 bp, Emericella nidulans
tcgctattttttggaagatgacttattcgtcgaccgcagtccgtcattttaccgcgcccaagcctttgggattgacgatggaagctccccgctcacatccggctcctgagccgaagataaagcctaccacagtggatggaggcttgacggatcaggttaagaccaagagtggtgggatcacattcgcacaccaagactctctgccgaagttacctatcccggatcttgagagcacatgcaagaaatatctcgacgctctgtcgccgctgcagactcctaaagagcaagaagagaccaaggctgctgtacgggagttcctcaaaggcgagggtcccggccttcaagagcggctgcagaaatatgccacatcgcaaacgagttatattgaacaattctgtacgtgagcatagttgacttccttccagcttctacgaagtctaagctaacagttattctagggtacgactcctatctgaattacgacagtcctgtcgttctcaacctcaaccccttcttcttgctggaggacgatccaacacctgcgagaaacaaccagctgactagagcggcatcgctggttgtttcggccttatcatttgtgcgcgctgtcagacgggaggagttgcctccgataccgttcgaggtacgccattgtgcatgtatcaatattcccggctatttggtactgcacgtgttcctactgagaatggctgcgt

SEQ ID NO: 8476 - DNA, 1400 bp, Emericella nidulans
gggtggggagtgaataggggagaggaaagagtgatgagaggaagattggagatttggagagaatgatgagaagatgtattagtggagaagagtatgagtataatgagagtggaggggaggggagtaaagagatgagtggtgagttggtaaatgatagagggaagtgagaaatagaagaggatgtagaagagtagacagaatggaggaagtgagaagagtgagaagtatagaagggaggtgagcgtaaagagagatggaggtagaggaggttgaggttagatagatatgaagatagtgagagtagggaggtcgtagagaggggttgatagagtgttaaggagatatgagaaatttaatagagaggatgaggtagagacggtagagtgaggcgaataaaacatatgagaagtaggatgagggagaaggataattaagaaagaagagatgagatgagaagagtgagggaggggagggaggaagagaggtgaatgtgtggggtaagatgaacagtgtgaacgagaggggaaggagaaaaacatctggggcgggagaaagaggtagtagaaaagaaggggaggtatcaatggattgatggaagcattgaagaggaggatctcaaaccaggacggattaggaatgatggaggagacgagggggtgtgacacaacgggactgtaatgaggcgggaagtgcgggattgcaagccatggcaacgctgtttgtcgagaaatggaatcagctgccgcaacaataagacttttggcgtatagctggtgacttacggaacagtcagaccagataaaagggagatgctactagacgcagccgatactcacctgtttctgctaggacggtgtcctggtatccgatgaattgacggccatagaagccccggttcgtcttatatgcagaaaggaccaggttctagccgttttgcggaatatgtccaattgtattgacaatgttgaggttgtatatcttggtatttgtgttccattgccgcagagtcgctgtatggtcgtcatcggttgtattaataagcgcaagactgtaggtgattgtggcagcatttccttcgtacgaaggtgaatctcacgtatacacctggatggtcagattagactgaagcggaggaatgtagacttgctcctcgtaggctccaggaaagataagaagcttctgggagacatctgttgtggaattattcatccacctcttgcatagttttttacgattttgggcacccaggctcactttgatcgacgacgattgtgcctctcgatggagatgttctggccttagaccctgtgcaaattatttggaattggttacctctcagacaggatatcaggaagcattcagacacgcagaccgggtacaacagctagacacaggaaaat

SEQ ID NO: 8477 - DNA, 822 bp, Emericella nidulans
ggattttttggctgcaacggggggtatcacaccacacatattgaaagtagtccaattttcggcaaaagataatgaaccgattatagactgcagaatccacccacaagacatgcacgaaggaaggatgtaccgacccagacctagagtgccatggcaagcgtgtgacaatgaagctcctgctcttgcaacgtattggccacacattaaagaggcagagagacgaagactggctagccgcgattgcccggacataaatccggccaaaacgagctggtcggcggacagccagccgttcgggaccactgggtattccaacgaagcctctcagacatcgggggggatcaaatgctccgagaagtgctccggaagctccggaggatcaggacgccggccgcaaggcccctatgactgctcagaaaggcctttctaaccaatgtagagccggtgccctagctgaaccggaaacacaatcttctcgtttcaaagctcagccttgtaagatggggacagcctggtcatgaatcacagacaccaatagtaccgtagactaacccaaaatttaaaggtaagcctgtgagcggaaattttaacgtggcaattcctggagggaatcatatttacagcgaggggaaccaaactgcctaaataaacccatgggccgcctatcaaggatttcggaataaatcttctgttcttcaaattttaaaaatcttctttaactaccgtaatttctaaagctaggtactccatcccctaccctttcttcatacatgctttcacttaacacctactataaacacccaaaacataccttactcttct

SEQ ID NO: 8478 - DNA, 918 bp, Emericella nidulans
atggtaaggctgtatttgaggcattctacaaaaatgaccttgcgcgccgccttttgatgggaagaagtgcgagcgatgatgcagaaaagagcatgctggcaaggctcaagacaggttcgttccgtgctatcttgagctgatcacgattgctaatcgcgtctagaatgcggatcaagtttcacgcacaacctcgagtccatgttcaaggatatggaagttgcccgtgacgaaatgagcgcatacaattccataaagcgcgaacgccaaactccccttcccgtagatctccatgttagcgtgctatcagcctccgcgtggcctacgtaccctgacgtccaagtgcggataccaccggagatcgcaactgccatcagcgactttgaaaaattctatgacactaaatataacggccggaagctggcgtggaagcaccagcttgcgcactgtcagctgcgagcacggtttcccaacggcaacaaggagctcgtcgtcagttcattccaggcaatcgtgctcctcctcttcaacgagcttccagaaggcgggacgctcaattatcgacagattcaggaagctaccactctatgtaagtcccttactagcctatctattactatccattgccctactgccacggttattttactaacacaatacagccgaccaagaactgacccgaactctccaatccctcgcatgcgcaaaataccgtgtcctctccaaaaagccgaaaggcagagacgtgtctcccaccgatgaattctcctacaacgcctccttcacagaccctaagttccgcatcaaaataaaccagatccagctcaaggaaacgaaggaggagaacaagacgacgcatgagcgggttgccgcggataggcactatgagactcaagccgctattgtgcgcatcatgaagag

SEQ ID NO: 8479 - DNA, 109 bp, Emericella nidulans
ttgtgtaggatcgccgaggagtcagaggtattgtcaccacgcgagtagaatagtctgtacacatctggggataggctaatgccctggtgtaggcattgcccggcgaaag

SEQ ID NO: 8480 - DNA, 491 bp, Emericella nidulans
ttggcattcaggctgagaagttctgcggtccactgaagcattaactgacatccttctgactctgcatgggctatttttagcgggcattgatctaatcaaagaggcatcaccacagttgcctagctgatatatctataacccggatcagatcctaaaatcaacctggacacgaactaagattctatggcgtataccgatttctgtgaaccatgcgtctgaatagaaatacctggacgcgcctctcccgaaacgaacaaacatagtaagtcagagccctatacaaactttatagacagaggagcaagagtcgtacccactcaaagctgagatgagagaaattagctttgggcaacgaaaaatacacctgattgaccctcgtctactccctggaggaatgcatacatcaataaaccgacatcaacaccgccagccaacccatctacaaacaatactcttctcccgggtcctaaaaataataatatattcctact

SEQ ID NO: 8481 - DNA, 1191 bp, Emericella nidulans
taaagttgtcatatttgtctccctatacatcttattgctccaatccctcattgaatgggtcgtcgtgctttacctctatggtaacaagcaggtagactcgaagatggcgccgagtttgatattcgccctcatagcggtaagatttgatccataccattgctgggccgaatctaatcagcttagtcgtcgttcacgatgccccttgtgatattacacagctttcttgcatggcagtataacaaggtactcaattactcaagccataaacctatgttacacaccgcgtgcacatatatcttgcgtttgacaaccatagtctggctgggagccagcgtggcgggcttagttgtggtctcacagcaagcgtactgtcttcctgatgggaacactggtagcttctggaatgttggcgtcagctgtgccctccatcgggcggttgttatcatttctgttttatccttgtgagtgaatctatcgacaacatgaatagctactaactggtcaccagtatcactgtttgcctttacttctgctcaagggagctttgtgagcgcccatacgacgtatccctgcttggtgtatatagccaccagccctctagtcgtgacggcagcatcttttcggcatctactctatacagcgagaagggtctaaagggcgacactctctgtgtctgtcgacacccagatattacgtatggccagggtccatatattacaccaagcgatgacagcggtgattcgaaaagtatgcctagcattcggcagcctgctccaatacgcccaacgtcatctttgcgatttagcccagacccagaagcagaagcagtattcctgtcaaaaacaaccgtcgcccctggcacgcagtcagagttgcagcccagtatttctcgaacgccatcaaccgcaacggcacatgacacataccagtctcaagagcaagccatccctgaactaccagatgcaactctgcagtcgcaatcagcccatacaagaaaccaatcatccctgtcatctcttcgccgattccttcccagaaccttaccggtttccgttcccttgtcattcgatcctcaaatccgtgcacttgctgaggcaaccacgcacattgaccacacgaagcaggagctccagaaagaagagccaatttccgacaggctgtgctttgaaaccacacaaacccccacactgc

SEQ ID NO: 8482 - DNA, 1134 bp, Emericella nidulans
aaagaagtatgactcggcactagtatgggtacagctctggataaaatgcacatacaagaccacaatagctgagaatgcgtagtaatgagtaaactgtagcaaaaattagggtccagcgcaatccatccacgatagctttacaaacatacccaaaagctgtggtacattttaccattttcgcacagatcacgcaagatgctagtgatcttcatggcagcttccaaacaatgccgggcgttttcgctgacagactcagcgaggtcgttgctttcaggggatgctggaagcgctagattcttgaaatctctcagtataaacggacggtagagtagaatctgagagtgaaagaatgcaagatttaagactgtatattgtcgctgataggtgagcactagcatgtcaacattcgcaaggtcaacaaacgcagatatttcttgtcgccattgggcaagctcagccccatgctttgctgcggctgctgattgagactgaagagtcatgcgtcgtatgctgtatagatcacgaagtataccactgataatcttagacagtttagcatggtagacgggagctagcatgatactctgggtattcgaactagctggaacaacgccactcggtgttatttgggaatcattagcaatagcaggaagctcttgatctatctcgtcatcgtgaaaaatccgaggacggcccagagcggcgctaagatagttatccaggctgtacatgcaccaaaacactcgtttggagcactcatgctcaacaaaattatctttgacatctcgccgtcgtccccggtgtaagccgattgcaatggcaagccgtgctgtggttccgaataggctccagcagtggttgatccgagattggcccaaaagatagaagcattgagctaatcgtgcttgcacacttgcgaggcggacaggtcccgtttctgctgcaagatgatgctccgaggcagcgaaatagactgcactgtcaagaggctgcgttagaatagtgcagaagagaatgtgcagagcaaccctacctgttaacgcaggaacctagcgaactatcagcaaagggcaagcattgctttccatgcgcaaaaatcatgaggagcaaagctgttatgccatcacccgggct

SEQ ID NO: 8483 - DNA, 1416 bp, Emericella nidulans
gtatgcacagggacgtcaaacgttgcgcacctcggggttccttcttgtgttggtatagctttaggtatacagttaccacgtatggatactccgtgtaggagtaatccctccttccagagcccgcgatctgcacaggacagagggaacccaccaatcagttcagaactcaaaaccatcccgtaagctacttctcgtgagctgagtaggtgagtagggatggtgtgatgctgacgacgggagcggggttgtgtcaggtcatgtcatttgtgcacactctgcagcaatgccgggacgggtaaaactgagccggcatcggcatacgacgaccgtatgcatggtttttgttttgattatctagatgcatactttgtagtcggtagactcaagagagtggcgaattcgcagccactgcctttgcaagtatggtctagcttgtgatcctcaatccgcgcttcgggaacctcggcaaaaatcgcatttctctttttgaagatagactattgatcattgtcaaagaatggactgcagaagcaatgaaggatgagttcatagtgatctcagcggagaggcccgagtgttgataatgataccaacgataagaacccttgacggttgtcaagtcaacaagccttgcagcagaacctcgctaaggaatgccggcagctggcatctcgttgcctgaccagcgggagcgatgccggtggccggtggcaaattcccaatccccaattcccaacattattgaatgacaggtcactcgtcgcttgttgctggggagaagaggacaccaattttgcaaagcccggtcgcagagagaaatggcaacgggcctctgtattgcagctgccctccgaaatctagccagagattccagtattctttgtacaaaacacataacctgacgcacccgtactctgataaagcactctggtaaaggaaggaaagacgagcgcaggagttgcgcaggattttcgagatcgaattgatcgatctgtttttgagaccctcactgaattccacttccaccctacattcccgatctgggaagtctggagtctggggaaaaagccaaattcaagcctcgattccacaggaacgcagattccagagagcagagaaagaaggttccaacccccaaaaattggacgcttgacaatgcatcatgtggccctaatccggggaatatcttcacatcattccaagccctgtgttgcgatgatcgtgcggggtagcaaccacgctgctatgctgtgctctcttgatctgataggctggcctctatctgtcctctttggtgactaggctgaagaaaacaaccccgacaaccaatattaacccgatacgggacctaagatcaacaacgaataactgttgatcgctctagaggaggctggttcgtaaatatggcgtggagtg

SEQ ID NO: 8484 - DNA, 342 bp, Emericella nidulans
ctttttttgcggcaacggtagataactccacacacagtgagaagggaggaaaattgaaggacaaactcactcattgtatttgcgaatgcacattgcgcccactggcatatattcagcaatgcctggccgaccctgatctatgctgccaaggcaagcttgtgtcaatgaacgacacacctcaagatggacggagcggaatggcatagtgagcaccagcagtcagaccgttagcgggtagccagttctcaaccactgcaaaacgggcgaacatgccgccagtagtaatctcaagactacctttttgaagagaaccatgaataaggttgggacaaacgctcaagt

SEQ ID NO: 8485 - DNA, 212 bp, Emericella nidulans
aggcatacatagctaagtgctagcgagtcaagctgacaagaacaaaagcagggtgactaccttacgtcgcgtaaggcttttgactggcacgttaagtgcagttgatgccgtgctcagtaactcatcaccggatagtgcggacttacctgataatgccggataagatgatgccatgcagtacatcactagtctgacgcgagcttgactgacct

SEQ ID NO: 8486 - DNA, 548 bp, Emericella nidulans
tagccattatctcagctctggtttgtgatttacacagtctggctggggctagtaggtgcctagagaaatcaagctgaaggcggacgcaaggagctcgtttggggcggagatggtcccaacggtcggcggagaggagaggaaaggggggcagcacgtccgaaacgactgggaagcaggatgtgcacagtctggggtattaatcatgcctacgtgagattgggcacgctctcagacagcagtcaaaagcaacgatcgaaactcaggttagtctcagcagctcagagtcatgacggtcagtcgagaacttggggtgtggacagagcggcgctcgcagacgacagcaatcaactagcgttaaggcggatcccacttggagggggagaagtggcttgtggtggggagggggaatctcgatggtgaccggtgctgaagtgccagagaccaataaggagctggaagccacgggctggatggaagctcgatgaaaagatggaaagaatggtggataaggggaccaggagcagtggagccagcgaacaggctgccgg

SEQ ID NO: 8487 - DNA, 561 bp, Emericella nidulans
gctaccgtgcagatcgactattgcagcattggagtatcttatgaggcactacctgacaccttttatactagacagctctttatcccccttaccgcaacggtaaacgcaagtctggagattgcccgttgtgatatattacctttcagtagcgattttgcatggtcgaacgacccgaattccgccagcgcgacgcttgattcttcagattccgccagcagcgatcacttctcaacagtgctctctaatcttgcccgaggaacatatggctccgaccactgcatactcctccttgaccttcggaacgcttggcccaatccgctctcggtggctttacacgttacggatgtacctcatgagtcacccgacatggctgccgcgcctactgacggagccggtcgatacactctccgtgagacccttcaacccggacaaacctctcgtttcgttctcgttgtaccgcgggtttacatccagaatcctcatgcatcaatcccctctctgaatacgggatcaaaaagacagtttgttgtcagcgcgcataagctcacgtttgatgctgaa

SEQ ID NO: 8488 - DNA, 734 bp, Emericella nidulans
cctggtggtcaagtgatcccaccatcaatgtggcggtgaaatagaaattcgccacggcatgctaaacatagctgagcaaagtcttttgatacctgaagctacagattggagactcgggagtacctgggcatcaattaatgtgcagaataatgcacctgaatgggttgaggttctctcgatttactcttcaaatgttggcatttcaacttgctcgccctgagtggaaaatactgacaaactacttagttctccttagaaatggagactcctctgcgccttgcaccacatcagacccgtccactagctttccgatttgctactggcaatccatcggcttttgctgtcccaattgagatccgctacagagctttccaacatgcaacaatgtggaatcagactttcatggtaaaatttgctaataggtctatatctgaacctcagagaattacgtatatgcacccagcaggcatcgtctcttatgccattcttcgtccgcctcccttgcatccttcttgtgctctcaatcaaaccaacacttttttgcctttgataataggtcttcacggagcaggccttgaggcggatgatgtacaagtgcgcaggatgatggatgccgcgtacggcatctgcgcgtggatgctatttccaagcggtgttacttcttggagcggacatgactggcgtgagtgcttgatactatgactcgctgtcctgccgaccctgctaactgacgc

SEQ ID NO: 8489 - DNA, 600 bp, Emericella nidulans
agtaagaaaagagtaaaagacgaagaaatatggggttgaacgtcgccccgagaagagaagtggaaaatcgagaaacgggagctccgagtagagcagcgaagaagaatgagtgacgagaagcaaaagaataaaatgtcacagcgcgaaaggaaaggtcccaatggagacgtgtctaaacgggagtctagtggtcaattggaatgtgcattggggaagggtaggtggaaaggagagagacggactgaccttcagcacccgagctgttagcgttggctggtcagtaataataggggctagttggactcaacaccgccaaatactaaatagctccgacaaagccgcaacactattgcgcagaagatatcgaagaaatactgaagagaagtaagggtaaaagaaaaaaaaaaaaagaagaaggatgttatttactcgcagtcgttgaggggtcaaagggtctgcggaatgacagcatgcggacagacataaaatgaagacagagaatggcctgaagctattgagctcgaagtggctaagcgcaaatgtcacggacaaaaagcgaaatgagctagacgtcaaaacagagtgcagaacccactaacg

SEQ ID NO: 8490 - DNA, 956 bp, Emericella nidulans
gctttgtgagcagtaggcaggagttggtattgaacactatgcccactgagagctgaggcactttggtaagatcaagatagcaaagcgaagaaggcacccaggatgtcacctcagatgtttcactagtgggcggtggtgcaaagaagcggttgaggtcctgtgccgacagatccgcagagctcaaacccagctcttccaagtgcttagtcagaggaatcaaagcatcggtgtgttccgaggtgactcttgcacctccaaggttgagggagcgaagagtggttggaagttttggaagcagcttcttcacatcttcttcctccagaagtcggtaccgcgatgcatcagtcatgacgttgaggtaaaccagcgagtcgcgcacagctggatgtgtcgtcaaaaactccaccacccgcggtccgcctaggcggatgcagcgtgaaagtccaaggtgggtaattctggcagtttccggaattgaaaacagcgcatcctcactaacctgagtgtggctaacatcaaggtgagtcagattcaccaatcgtgggaggagaacttcaaaggcagaagacgggatgccgctgcattcgtggaacgacactcgtcgcagatttggaagggtcaaaggaagaccaggttcagagttcaaagcctgctggaaaacagtcgagaagtgtgatgaggagctaccacagaagtcaacggcagccagattcggaagcccgttgaacagcttagaaatcacttctacgctaatgtctccttcgagatgctcttgtagcaagcattccttgaggttgggcaaaagctctaagaattgcagaagtgttttgtgtgtcaagttttgaatctccgaattcatctgcttcgtacggccgagacccacagatgtaaagtgagagaagtcgaggcgacgaactgggtgcccagggcaggatactgggacatgtggtgagagc

SEQ ID NO: 8491 - DNA, 124 bp, Emericella nidulans
taggagagctatctggtgaagatatagcaatccagcaaatatcacgtttattacggcgtaggattggcatctacacgtatcagtatggcagttcgactgtctcaatctgtccgccgtcattctg

SEQ ID NO: 8492 - DNA, 100 bp, Emericella nidulans
tcagttgtttgactgtctatttttccatcttggcctgttctctcatctgtgcgtgctggccactttagaagctcggtcgtgcgtgtcagtgtctgcttgt

SEQ ID NO: 8493 - DNA, 637 bp, Emericella nidulans
atgctgaagctaatgtatgcgaatgctgtctatggattatgtagttccaatcccaacgccggtgcagagataaatatataaaagcttggcactgtatttggtctctggcgacggtctccatcacgaggatacagaaatctatgatttgctgtgtgttaatttcgacggctatatgcgaaaatatcagttctaatggattagggtctagtccgaacatcggacatgtgctggtgctcggggtgagtcattccgggtgggcttggccaaggctctgatcagataagatctcaactgaaaaaagttccaagctcctcccaccaacgatccaacaacttcatcctcgttcatctcagtctcgagccattgggttggaattttcgacagatcgtggttatattgctttcagtataatgttttcatttgtctaggtacacccgaccgtgagtatctcttcacttctgaatggaggcttgtcgttaggcggggttctcgagctccgctccgctctcggcttccacccaccgagctcttccttgcactcgctttctcgcgcctactaacaattttggtctgtagcgagcaaaccgtctcctaatctggcagtatactacgagttctcgccaactgccagtgtggg

SEQ ID NO: 8494 - DNA, 1244 bp, Emericella nidulans
catttcagatgggcgtctgtttaacgagtcaggaatagataccggctgcgtaactgcttctctagttgacatagaaggggatgtcgacgacagctttatacctcatgctatgcacctctacgatccgaagctggactgacccgagataaggcgtactctatgattcagtccgcgaagtaagaatgctagaattatccacgaggcaaattctgaaatcgtataatagatgatcggcctccttaattgaccattgatgttcacgaaatcctaaacagtgaaaagcgtcttaagaggcagtgcgggtcgatatctcagctgcattactccaggagcgtagatcatgcctagtatagattagaattggactatgtctagtgaattaggcgtacacttgcgatgagtgccttaagtcgaatctattactctgacgccgtctgcctgctcattcgcctcctagaattagacagggtgcttaggatacaaccggtaactactaggttatgctatcagtagacagttagcgttgtatatcctctcagacgctcctcatcgatcagctcggatctatcagacttaaaccacagctcaagatattagcaagctgaactgctctggcttttaagtgcgtgctcaatacagcggacgctcttctagtcatccttctagacgtggaaagctccctgcgtagccgggcaaggctgtttctgtctattgaaatctgtgggtaagactgtgggaagcctggaagggcagctatacttctactggcaagagcccgacgatcactccaacgtaagctatttaacagcttatctgcttcgaattcctagttgctgcctatattgatcgatgatccaaacaaacagattcccaaatatctatgacagcggaactcttgctaatctctccctaatttactggcttcggcttgggtcttaatacaatcccggaaagtgaacctcatggcaaggcttaattatggtccgaagcccgtgctagagatatacctgggggcctaaagcgctgggggccttatgtatgtggcctaaacacctacaagttcggagggatcagcgcagatagctgaggcgttgtgcctatgtactaatggccagtgtagtaagatcggatgaatcggccccggaacagcagaccagctatgccaaaccgtgtctcagtctgcactggaataacaacgagaaggcaaggagcctgcgagttcgagatgaaggagggcctagaga

SEQ ID NO: 8495 - DNA, 1082 bp, Emericella nidulans
  unsure (1)..(1082): unsure at all n locations
cgaatgtatattgcatccgcgcatactacttcaacgctacgtcctagctttggaacctgattcgtttacttggtgatgtcgatcttcagcatacgtgctttgacggcggggagacattggcatgtcattctatcagtgagatattcaaaattaaaagctataaaatgcgtttatagactaggcgttgtttggcgttctgggaatccattgacagagcccaccttggcacagcgcgatcaaataagcagagtcctgctcgggaacaaggccatgacatctgaaggccatcgactctcatagaaaatcaagtacggatgttcaaatcatatattctctgaatcaataaaatataaccaaatcagtttgaaacttgaatcatcccggccagcaacaatacatgacgggcagcagtattttaattagactttaccttactcgaattgatcgtacttttcagtgcatggatcgggctagtgttcagcaaccgtggaagaatattaatgctcctgtcgttgtagtacgatcctgtctgcctcggggtatcttagcccgagcggtggtgagggatttcgcggggtacttgcccggagcccgagtgtcggtggctgcggggcagttgatttcggatttccaatccagctacggttcaggatcgcggcgtgctgaagatagccataggttttgtgcttggccggacgaggataagtggacgctacgataaaagcaaatctaaaaaatcgtaaaatcgtatccggggttatctgatatgttttacatgagtcacatggttgctgcacaagaagcaatttgaaccagtgccgtagcacacaggatatatccaacttgtattcgcaatttcatcaaatcatacaattagctttaagcgaaaagagcatcacccaggcggtagtgcaccgtcttgatctgtgtgtagttctcaagagcgtaagagccaagctcacggccgagaccggactgcttggagccaccgaagggagcctggtacaagatcatgttgtagttgttgatccagacggtaccngacttcagagcgttggacacgcgaatggcggtgttacgtt

SEQ ID NO: 8496 - DNA, 1064 bp, Emericella nidulans
agggaggccgcgtttgttgatttgaataatcaaattttgtcgcttcagcttcgcattgtatgtcttggcaatctccctccgccatgtctggaggtggagggttcgtcggtcctggcggtgatgcaaacggcggacctcaggggacggagtacacattacaaggtgggtttcctgcgcaaatggcattggtcgctggcctctgtaatataactaattgacatactaaatcactctgcttcttaggtgtaatgcgcttcctccagacggaatggcaccgacacgagcgagaccgcaacgcctgggagatcgagcgcgcggaaatgaagtctcggataggcaaacttgagggcgacgtccgaacaagcaagcgcttgcatgagtccttgggaaagcatgtccggctgcttgaagctgcgttgaagaaagaacgcgagaaggtcagaaaacttactaataatgagcctgtggaggatctccgggatcccaaggagattgcgcgggaaagcatcaatgctctgaaatgtaacggatccttttgaagtgatgttggcaattgattctgaccattctttcagctcaacgaccgaaacctgacgcgctaggagatcttgaccctagcgctgaggcccaactcgatcaccgccaggaggccgaacgcgataagtcacgattatacctatccaagtgctctcaggaaatcgcgtatcatgtcattccttccgcgcacccacctcccgaccttggcgaccttgagctatcgaaccatgtttatgggaaccagcagctgtcccagcagagcctagaagaggcatatatccagcagcagcgacagaaacaccaggcaagcaatatgatggcacgggaagtccctatgcagaatcaccagcctattgttaggcactaccccgataatatgggtttgtctcgcgctcctagtcagtacaatctgccggccacctcgagggacgctgtcgatagacgaggtatagaacaccagcagaccccaataacaagcaatgaggacagcaagcagtctttggaagttcccttcgggaacgtggggg

SEQ ID NO: 8497 - DNA, 181 bp, Emericella nidulans
  unsure (1)..(181): unsure at all n locations
ccgtgcttaagtcgcatcgggggctggctccgctggagtaccaggttgtgnggcgacggttttgtggcctgagtacgantctcagtagnttngggcttgtcgcgaactcgatcgcttgntctctcgcngtccggagtggtcgccgcgtatgacntttccgttgcagtgtttgagttcccag

SEQ ID NO: 8498 - DNA, 236 bp, Emericella nidulans
  unsure (1)..(236): unsure at all n locations
tcggccgtcacgggtgacatgggggaccagttcgagggtgcggtgcgtttatgacagtcctgtagggctctggaacaggcggttctttatgccgatcccgggcgcctgttgacagtggttggttacgtcgccgtgttacgagcttcctagggcgacgtagctanccgatatgtcgaccagtatgaccggttgcaagcgngtcctgataggcggaaaggggagttccttcgtgccga

SEQ ID NO: 8499 - DNA, 1211 bp, Emericella nidulans
atcggcgaggaaaggagaagttgatgctcttcacccccgcccacaaacatatttattagtatttaggggtgggtgccaagggaaaattaaatttgagaaagatttgccaacctaaaaggggagcagaaggtgcaaatcgatattgttaaccaaggtcttccagaaggggggagcgccataaaaaaattaacctccgttgaacttttttggtaggacaaaacatggggaataattacgggcggttagagggggtatttccctgaatctaaacaaaaagcccattggggaaccacacaacccaagatcttttttccccttccaccgaagtgaggggatcaaccttaaaccccatggaacagggcagctaaaattggatcaaaaccgaatgccaagccagcaattcccagccttttccatcaattgcacaaaaggacgtttggtagaccttacccagggtctcgatccgtcgttgctcgacccaagaatgttccagcggaacgttactttgtccttggtggattgggagtctttgaccaacccgcagctgggcgccctgatggttagatcactagatttgctacgagcaggggccttaaccccgatcaaggaagaatatatcttttcggtatctgacctgccagaagcattattgtccgtcggccaacagcaacatgagcgagtcgcagcaccggtggtggtggagttctccgcagatgccacagttcctttacttccatctcttcccgcaccacttcaccttaaacccgatgcgacctatattctcgctggggggctgggtgctcttgggcttaccattgcagagaatatgtgtagccacggtgccggccacttggtgttcctcagccgctccggggcatcgagccaaagacagcaagaggcgcttgagagcttccgtgctcgcggatgcaaggtcgacgtggtgaagtgtgacgtgacggaccaagaacaggtgcaagctctggctacccagattcgggagcaatcgtggaatgttcgcggcatcatccaactggcaatggttctccgggtatgtaattggacttcattcaccgtgaccggctaacccactgaccttattgcttgcaggactcgatcttcgaaaatatgaccttcgataagtgggaaacagctgtcaaccctaagatcaaaggaacgtggaacctgcacgccgagcttcccaaggatgttga

SEQ ID NO: 8500 - DNA, 1602 bp, Emericella nidulans
cgatcaatccagtggtgtagctggttctaaccccatgaggctttgacaaaagtccccattgttacgatgttacgttgctggttaccctgtatccccggtgttccactcacgggtaggtttaatttccagttcgctccgctgcctattgtaccgtccggcgtcagtctcgaaatctaccctagcaaccaaccaagtgaatcatcgcgtagtcatgctaattttaccgttgggcaagcgtgatgacgccaacgtcgcatttcgagcttgagtctgttcctgtgcggggaaccctgacattgctcgtaggggttgcggacccggtcctagggtatcaaaaaccgtcagcggggatagttaaacgacaaggaggcattaatatagactgtagtaacagtgcgtatgcttgcacaagaaccggtggcggggggagggaaacggtgcgaagtgtgtcggccccaggcggagagaccatttgtgagagatgttgcaattgaggcagcggaataagacaaagccttccttcgcgcaaaaatcctctgaaccaaacagacaacccgctctaaagaaagccgaatgcaccagaaacccgaagcagatggccatggccgagcccatacgacaaggagatgaagggaacaatcgaaactgacgaacctggcctattcatggtgagttctcgccttttgagggcagtcgatattgggggaatgtggaagtcgagaatcgaggctgagttcgtacgcagaattccgatagcttcgaagatcggagtggtttcaaggatgtctcgtttgcccacacctgctgcgacggctttggaaagtaagtggagtgggtgatattagccgcgcgtttaaactgtgcacggacatcattgttgcgttcttacgactcggcgttatacagtcatttagacacatttagacacatttagacacatttagacaatattgtacctcagtatagctattcataatcgctatcgcatccactctcagattggcaagttagaagaggtgacttcgtgtaggcatagaactaactagcataatatgacctcgacgttatttacaaaaagcattgcgcagtccgcattgacaactccggatagaaaacacctgcacagcatgaccagaacaatcactagctcgtaaatagcgctgctgcgttctgaccaagtttattttcaagctccatctgcgttgctcccttatatcaaccgtgctcagatgctggcacatcacatgacctagccgccgaaaagtcagctctcgccgccccagaaactcggtctcaacctctcaatctgtctgaccagatcagggctgttgtggtcaccatgcatcgccaatccgtcgtgcggctgtctcgccagctcggagcatttccgctggtcgaattgcctcccccgtaccttgcgccgtctctccatttccccctgaaccggtcgtgcgtccagacttcgaacttttttgttaaccggcccggcagccggacatgggaaaagattagacaaggtcccgtgctgtgtcttgcatttaacggaaccgaccaggtttcaagctgggagcggaaaatacccattgtcaaacccgtttttct

SEQ ID NO: 8501 - DNA, 2045 bp, Emericella nidulans
cgcgctgttttttggcttcgcatgagcggataaaggtcgctgttgcgcgacattatgagcgaaaggggtttactcagtctggtgaacttacgcagggcctgattttgagtgggtccgcgggtgtatcaaagcttattgctgtgctgattgcttaccctcatgaggtacgtacttattcttaccgaccctattatccaacttaaatgggtattcactatttgcacttacaggtccttcgaactcgcctccgacaagccccgatggccgacggccgacagaaatacacgggcgtgctgcagagcctccgattaatggtcaaggtggaagggtttgtcgctctgtacggtggtctgaccgcgcatatgatccggacggttccctcggctgcgatcacgctgggaacgtatgagctggtgctcaagctactgagcgcatgatgatgcacctcgtagtaagacgatgaaagacgacaactgtataatacgactactttagatcctcgatcatgaattatagataaggcaaattagatggcttgtaataatattatagataccctattttggacatgtttcttgcattttcggatgtggctcttggctgtcaaggttggtaggataacagtctttctaagcaatcggaaacgtccaccggtttattcgagatcaaaaacatagatcagcagaaaactagttacacgcaattcctaactccctctccacaatcgcaacccgaaattcctccaaatcctcgcccctctccttaatcacccatgccagcgtatctccaaaagtttctccgttatcacgaaaccagtccccaagagaaagcacgaatgtttcaacctgctctttcagcggacaattctcccgcagccagaggatttgcccagggtcaagcttcatcatatcctgcacgacgtagtaatgcggtatttcatctccccatccctccgagccaggctcatggaagatatcattccggaagcgcgagcgatatttggcagagtaattgccgaagctggtgtagtgagtcaggtggaagtatcggtcatggtcggtaggattgaggctagagtcgtgaaaaccgtaggccgtccgccgccttcttccccacctctcccaccctcccccctatcctacttctccccctcctccatccccctccctctcccctttacttccactcaccctccccccttaacttcacccccctctgttacctcccttcaccaccactactcccccccccccactcctcccttcctccccactccccatatatccacctctcctacttccctctccttcccacttctcccctctcttccacccatccacaccctccactctctactcttccactcatctcctctctttcccccttccatcatctctcctcactcccatcctccctttccctttcctctctctccttcctcattacctccccctcccccctcctctctctccccatcctcctcgtcccctccctcctctcttctacccacaaaccctccttctcatctctatccccccttatcactcccctcccttcctcacctctattccccatccctctccccacaactctttcttcttcctaaccctcgtccacatccccactcccccctctcctcctcttcctacttctctcccttttcctatcattctcttcttccctcccactcctctcacctcttctactcttttctctccctccctcctactctctctctcactctccccccctccccttcttccttcgtcctccccacccctctttactccccctcctccactcctttctccccccctactctcgctctcccctcatccccttattccttcctcctcttcttttccaacctcttcctctccctcccctccctcacccatttcctcctctacctcttctccatcttccctcctctcaattctctcaccctccctccctacctcttctaatcctcctctcccttcttcctcccactcttatcctatcttcatccctccttctctctcctctctcacacttctctctcc

SEQ ID NO: 8502 - DNA, 310 bp, Emericella nidulans
  unsure (1)..(310): unsure at all n locations
agaacaatcttgacaacgtaggacatttgcaaaaagaataccagccctttatgccatgacgganccgatacacgagtgagtctctgcttgtctaatctcagtataggattaagcatttgtatgaccctcaagacggtgctggaacatcagcantctngctncngagacgngacatctacttcngaattaatgagtcgattcggctgtcctgcatccatcacagagcctgtcccatcacngacgtacatcggtgcacttttgccagagcacagtgaggatgctaccaattaaacgagtntcagggagtgat

SEQ ID NO: 8503 - DNA, 113 bp, Emericella nidulans
tacccagattattgattcttcaacttcctgcgacgctgaagctgggctgaactacgcttagctccgtccagccgtccatacatccagcgcagggcaagcgggacttactcccc

SEQ ID NO: 8504 - DNA, 1052 bp, Emericella nidulans
cggcgcttatacaccggccaatcctcagcacttctcagggactcgccctccagcaacacccggtcagcgtccaggatacttaccaggatatgggcaacccacgccgcagtttaaccagggaaacccagtgccacagtatcagcgccctggacaaaacggatataatccatatacacctcaaccagggcccaacccagctcaaggctctccgcaaccatacacgccgcgaccgggtcagcccacatcttacaacgtggctagctacgggcctgggcgcagtgcctctcctcagaagccgccatcatatgtagctcctcgagcgccgtatagtattcccccaggctctgccccccagcaacggtacgtgcaacaaccccagccgcaacagcccacccccgggtacgccaactacactcccaaccaagcaccgaacacctactccaactccgcagctgctgtgacgtacgctcgcagtgccgcggagcaagctgccctaatggaccggaacagagtacaattggcggcgcagggatctcccgcacctcaatctcagtcctcactccaagaacaccgcacttcacaagatcggagtgtcacgcccggtaacaggcaaaatggtccgcccgtattttcatgaaccgttccgtttttctttttttctctttgtcaccacgaaggggttaaattcggtctcctttctttctctaatactacaacccttcctcctcttctattcccccaacattaccaaccttatgccttggggattttttgtcatctgtttttcagcatgtggacccaccaatacactcttttctacttctcagctcactcctccttcatatgtccttattacctcctacactctcttacccctcttaaatctatatcgcttgcatctgtcttccacccacgccctcccactttacacatctcattctctcaccttccctactatcttttcactactcccttccacctacctctactcatctttctcttccttctcacatacccccatctcattactacatccattctccctatcctca

SEQ ID NO: 8505 - DNA, 1060 bp, Emericella nidulans
agaggtgcagggcgccgttgctggcattttttccggatgtcctaatgaggacggtggaagagcctagggtgagggttgcttgtagacgcgcgaaccattccttgagacggatttgggccggtttggcgcgttctaggatgagacgggttcggttgctgcccgcggctgtaaatacttgtattgactgaagggggtaataagcggtcctagatatcggagagaatggtggtcagggccactagatgacagaagaaaagcggcccgtggcctacaaggggcgtcttccggctgggatgcggtcgaggcgaacgcgtcagtaaaatcttcttccacgagatcctgcacagtccagttggaggaaacgacatgtgatggccggccgtgcaccattgcggaccatttgtcctgcatgtaaagtgcccaggcgagacgctttctcaggcccttctcccaggtttccatccgccagtcggagcaatcctggtgaagcccgagctcaaacccagcggtgaccaattgcgcgttcaaagcagcggttgccaacgtcgacttttgcatgagtaacagccccgcttggatcgtcgatattgatgcatatggtagagattcattaagaagcctcaaagcagtggcctcaagacgagtggcgtcgggccgccgcgcgactgcgaggctggtccgatgtcaacaaacttgagggccaggacgtagacagcagaaagtaaaagtggagagatgccattcctggttctgtacgactggcggaagacatcttccatcagaattgggaaggtcgggtggatgtgctcgaagaacttctctaccaaggtggacccatagggagcaaccaggctctcgatggagaccagggtggcggactgcggacatccgcatgcgacatggtgttgacgacacgcataaaagtgccgtcgtcgctgagtttccgtacccgcgaacagcaacgatactctcgtcgttctggtctaccggaagtaggccagtagggcgggctcagctcggtagtgaggccgatgtgctgggtggtctgatgcagtatgag

SEQ ID NO: 8506 - DNA, 334 bp, Emericella nidulans
  unsure (1)..(334): unsure at all n locations
ctgccctcacctcacaaactcgtgttgccatggttcgcctcgctcgttcatcgtcgttgtagcagcgctctcccgcatcccccagctatgcggcatcgctcaactagtagtcctgagtcgatgngctgccgccttcacttcccgaccgactcactgcacggcgngcaagtttacgcgttacagaaagacttctacctatttgtgagtagccattggttgctgtagtgtcagcatcgagttagtctagggagtatacacctncgttccgcactgagcaggcctcggttggcgctggattgtacctctgtcccccctggctatgatcgccttcgcc

SEQ ID NO: 8507 - DNA, 851 bp, Emericella nidulans
atcacttgctcctctagcatactcaagtcttggaaccgcgcaaccttgaaaccgagcagcgacccaagacttcaattgtagtccaggcttcctagttccgctcaagagaaggctgtctattcagttggaacacaagtctcagagcctatcaggatggaaacaagcggcccatgtgcccttccatgtctatgtgacgaccagccatattgttttcagtatatttctcggacagtgcaggttctccggctagatgtcgtcatcaagctctcgtgggcgtcgtgtatccggtctgagatacgtccaaatgccttagagcaactatcgaactatcaacgcttaactgtcagtataattgtctgttgaaatggtttgatggagataggatatagtatgcctgaaaagaagttctggataccactaacagcagacctgaaagttgtctgagcctggcatatcaggactaacaccagggatatgcccaccagcttccacggcacattgcacccgacctatagctgcaccattattggccactggtagaatggcttgcaggctgcacaatatcaggtgtctctgaaccatcggtgagcattagtcggcgtgaatgaggcgctccagcaagcttgagttatcaatatgacaagctggtttccttgggaaggtacgcggcaatatccacgcacacacaaatacaaccaataacacaggcaaataatcagacctgcagacagctacccgacgaatctgatcgtcgccccttgaagccaccttgtctctcattcatcgccgtttcatctagcctggagccactgatacagcgaccaaggcgccaataacttgcacccaatgtt

SEQ ID NO: 8508 - DNA, 810 bp, Emericella nidulans
atttacaggctgcggcggtaaacaacccccgacatatttagaaagcagacatatttaggacaatacatatcttacccattatagactccattatcagttccaaatacatgtttgtatgatgtctttgtcgattcatacctgtactgccctggcatgcgtgtgaaaataaaacctgctgctctaacatgtattggccaaactctaagagacagatgtttatgatagtctatcctcgaatgtacatgacatatattcgctataacgacagatctgacgaacgtctgccgtctgttcgtctgtatctacatagaagtcgttcacattgatgaggattcagccataagaagttttcgtaagtccgaatatgttgctcttcacgttatacccttcgaatcgtcatatagctcttttactatttcaatgaaacctagatccctagctttacacgaaacatccaattttctcgtttcttatgttcacactgcatatatatggtaatttttgttcttgatccatagactattactttagtcgtatatccattctaagaatttcaaagttcatgttttttacgtagaatcctctacttagggcttattctatgagctataccatctttatagcataggtatattattgtttaatgtacctccctttcctattaaccatagatctgttaaatcctttctctactatcatatattctactttactttccttaattcaatttcacatatcatctttattttccatcacaattatttcattaacatatacgccatattcattcttaatcttatagttttctca

SEQ ID NO: 8509 - DNA, 553 bp, Emericella nidulans
attacaggcgtgacgaccgtgcctggccagatctggctgtttaaccatgtctcttattcacagtataatgcttctagagggtttctgcaacattgctgacttccaggttatatggattactttagtaggaggtagactggaaaaagtcagaatttaataattattgagacatcttggctgtgtcttctcaagtacaactgaactagtgtgggctaaaagcagctgacattcacaaacagtaatcaggttccattttgtgggacaaatattgcttttttgcaagcttcgttctgctccaagaaattaggcttatctagtatttgagctggagccagatcacttgggttcatagcaatctaaacttaagctttatttctagctgtaccagtgccttgactaaggtcatgtatctccttgtgaatcagtttatactctgtaaagacaaaattaactttatgcaaagatatttgatgatgttaactgagttaatatatataacaaagatttgttttactgagaaataatagtattttcccatgcttttagaaaaagt

SEQ ID NO: 8510 - DNA, 1265 bp, Emericella nidulans
ggatgtgcaaaagaacattgtactaccatctagggctacgaggagatgtatgctgttcagctgctctttctagcactaccttggatggcgctcgatcaactccgaatgtgctccatgcatcggtttctagattccgttgggcatctcaaaggagtactactactaataataatatcttgtacataaatactcatatacctacataacaatgctgagccttggtgtcttatcactatgcctatttcgcgtgtcgttcgccctaaccctcctctgactggcgcatgcacaatttcctagagattgaagtacatatgtgtctatattggaaagtttttggaaagtctataattataataccgaatcttatactggtattaggatggtactatacttaggcagctcgggttacatgaaatcacgtgctggtgcctacggcgcgagtcgcgtggctctctcaattaacgcgtccggacactcttctcgggatcggcccatgtccttttgtccacttccatttgaggctacatccactcattgaatgtttcttaatgacttcaaggattgtctggttttgattgattgggttatttgaacttggtaccctccctgagctgtcttgatgtacgagggtcacgggcgagttctgatcgtcccttcctgaatcgttgctttcgttctcccttttcccaacccatcgcttaaatcggacacaatgcaagtctccgtcccggatgccagttcggggtcaccgtccacgccaattccagtaccagtattacccccagcttctgcctcaagcgtaccgccgttctcatcgacccaaccgcaaaccaccgtgtccaagcacctgtcctccggacataagcgatccgctcacgaacttgacgcgcccataccttgactcctgtgattcaggtttcgcgacccaagcacaagcccatcccggttacaccgtaacaaagagacggtactgatattcggcttgaggatggaccagtctggaaactgcttatggaggcctggcatctaatctgggaaggaccatcatctatacaactgggagttaaccagcggagccgccctttaaaaggaattccccgcgcggagctacccggaagaacaagcctcatttggaaggggaggttaaggtaaagggggacctcccggggaaaaggccaaaaaataaaacccccccctctttttttaaaaacaaaaacaaataagagggttctcttattcaaggggggtcctccaatttttcttct

SEQ ID NO: 8511 - DNA, 1771 bp, Emericella nidulans
  unsure (1)..(1771): unsure at all n locations
agttaagtcggttttagttgtttacggtacactgatcatatcatgacgcgtggtcttcttcagcacctacgccctgcggctgttgtagagctgccagtggccagatagggcggcgtgagattgctagcaggttaatccggaccagcggagattaagaaccatatattacagaattcaagagcaataaaaaagctaaatgactttgaagactggaatatcgagctggcaaactataaaaggcctttatgtattaggttgtgctcaatttccatatttcaaataattgctatttcaagcttaatgcagcgtaaaggattcgtagagtatccacagggaaacatgcgcgccaggcgggatatacagtaaggtagttcaccacacgaggcgaagtaatggatttagagcccattgaacttatataccaggcgggccacttcatacccttcttcctgcacgaccgcaacacggcgaacgagacatttctcagagttaatagtttcaatgctccaaatctgcagagagactatcgttagtacccgtcgaggttgccgtttgaatttcagtgcccatacctgctctgctgtccagccggacttttcattgcgtccaaagtcgtggataaacaaatctgtaaggtcatcggtatccgtgggacccactgctccacgcaagaatttctggacctcctccttgatcgcgtcattggaaggcttcgattgtagatccagatctggtcgcacagaaccgtcctcccgaacaccagcgatcagccggctgcgcgagagcacgtcgccgtagatgtggttgcttcgttctctctcgacccagtccgtgatgcgctcttcagtcgaagctccgattccgccggtcagcgtttggcgcattgtaagatgtaccgtgggttcgcccgaagatggagatggctcgacgcccgaggtgaattgcaatgttatgcttgcagcgctgatccctttgcgtgtgagccagcccacgccttgctagaagaccatgtcagtcgataattctggtgcgttctggtcgctcctaccagcctgaggataccgtccatgctatcagaaacggacttgtcctacttagcgtcagcattctgtaatatgccagttggggaagccaggagcaagtataccaatgtccacgaccctttaagggttttcactgtgatatctccaggggctgccatcttgctcaggtatcgctaaatcaccgacagttggaataaggggctttctgtactggcttagacgtattttctcaacccccaagtgctgtattgtcttggtgtcttatacttcgtccctgagagctgactactgttttaggaaagtgcctgaatcacatgcgggaaacccacgtggccggggaatttgcatgtgatgccgggacaaaaaccctgcccctggcctaaccctgccctccgttcacaaatagggggtaaataaacacccggaatgctaattggtatgcaatgcaagtttttattnctttactgctatgaacttctgaagcggtgagtggtctttacagaataacttccaaccatgactttttaagacggacccacccttgggctttggccaaaaggagttaacgataactgggccagcactcgttctttgggggatccccaagggaaattgttaataggcttccactttaacaaggcgattgattccctttccaattttgaatgtgggacggaaatattagaaattatatttttactgggttctgctgctaatttatttacttt

SEQ ID NO: 8512 - DNA, 105 bp, Emericella nidulans
  unsure (1)..(105): unsure at all n locations
ctgcgacagatggncatgttcattagagtgctacaactgctgatgtttctagagttngcgcattgaacggatttaagccgactgagcccggcgcgttacgatttc

SEQ ID NO: 8513 - DNA, 1847 bp, Emericella nidulans
ggcgcccttgattgtgccccatggtcagatgggcgcaggccatgagatatttctgtgggctaatttcagtgactccgaccaccgaggagagattttcatgcttggacttcgagaagggacattcatcaagcgtttacgggttcccggtttgatggctcagcgatcgcaaatacaaggtagatccaacgctctgagcgctgcgcgtataaacgctctagtgtggcgtgggaacggcgcgtctggccagggcatagaggtgttttccgcgcatggcgacgggacgctgagatcgtgggtttcgcgagagccagaagaagcgccaactgaaactgaggaggctgaacaggcagaccgaaagcgcaaacggaatgtacttgaggagatctaccatggatttatgtcaccctcggttggaattaaggaatgcatgagtctgccatacgcagttgccctttttccacgtgttgacgttcctcatggaatctcaccacattgatgctacgcgaaagtcgacccagccgatgggacaacttgctgttaaatgctgacggagaacaccgattatccgctttccatgcagagctttgacagcccaaagtccaatcgcaggagtgggccggagaccacattttgattggcagaggaacccccacaggctttggtctcgtttaaatctcgagcccacaccggctcttgcccaatgaggaatcacgcccggcccgccgcttcgggcctcttccagctttctcttaacttttctgacctcctctcgctccttgctttttcctgctcttggtttcctgcacatcccacctcctctgattgcggcatctcagacgaccgtaggcgagcgacttctgggagttttgcgctcgaccaggtcataaagctcccatcgcaaagtcgttatattagtcttgttaatcccgtcatttcgcaaccccacatcgtcgcacctttcacgatcacggtggtaccactatgtcggacaccaagcaccggccagccgttcaaacaacagctgcagaacactatggcgaagttccgtccccagtggtgtctgcccatccgacgagggaaagttccgcaccggaaatcgctgcggacctagtcgatgaacaaaagaaagggttttttgcctacttccggaccaaggagttttacgtaactttgctacttgggtaaatgcgcaaattgaaataccatcttacgcactgctgacgatccattctgattagacagtttttggcgatcgcgaacactggcaccaacacgttcaacacgcttcttgcgaacaagaacaccaatatcccggctttccaaacattcttcaattattccctgctgaacatcatcttcacctcgtacaccatatacaagtatggtatcaaaggctggtttgagatgctatggaagcgcgggtggaaatgtgagtcctcatttcgtcccgccgaagacatatctttagtcgatcgatctttaataaatattgtcatagatatcattctttcattctgcgatgtcgagggcaactacttcatggtcttggcctacgagtacaccactatgatgagcgcgcagttgatcaatttctgggccatagtcgtcgtagtcgttgtatctttcctgttccttcgcgttcgttaccacatttctcaggtgctcggcatattgatttgcatcggtggtatgggtatcttgattgcgtctgatcatatccaaggcacgaacggggacgatatttctgctcggcactctagatctaaggtgacctttttgccaaaaaaagagcgtccttttacggtctcgctaacacgagtgaggatctgggctggcagcacaccaac

SEQ ID NO: 8514 - DNA, 782 bp, Emericella nidulans
cctgctccatggtctcaatcttatggctattgggctcctttagcttgagacgttgtatatcatccgcgatcttggctcgctgatcccgggtcggctgaacagagctctctgtatcgcgaatatgcttaaggacggaacgataatcctctagatgctgcgcataaacatcctcctgttcgcccatttctgccatcagcacgcccagcttatctgagatatccgaaatggcttcgtcctcggtggtctctccccattcggatatctgcgccgcaatcgacatgcgctgcctcgcagcggactcgtgagcggcgatcgctgaattctcgcttttgatcacccgattcatcttcttgcttagctgaggatgttggaggcctcggaaggtgccaatactgaaccgatgacggccagtgttgacagagctccttcttctgcccgagagtgttcgattcctatagtataaccaatcagttaccgcggtgttagtgagctcgtcttcagagacatacatgattgcgacttggccgtatttagacgcttgctgaggctagacaggtggtgtctttaaaaacaaagggcgactagttgtgtgttatagtcgataaccttagactgggatgcaccttcctcgatgcgcttggtttcgaagtatagggctgaaaacgctcttcggccggtcagacgtcttgaattctcgtagcttgataattcatctagttaccacaaacggattcttctctaaatcttttatcctgatctcttcgatatacttcgtgacgtca

SEQ ID NO: 8515 - DNA, 833 bp, Emericella nidulans
ttttatatggtctagctgtcttgccagcccgatacctctagactcgacagacctttgagcgaaagcacactccatggacttcttatcgcaagcatattgtcctagaacgctggccgcgatcctacattggacaatacctactcagccgttgcatagtcaggaaccagaattgcctggttgtctgtggtattgccagactctaataccctattctggtggtcagtctgggtctcgaccagccgatataacgccgtcttgacagccatgtctgcgaccctatcctttatcctatcctctacctcgaagtccaccttgaccaccaccctgacgacatgtccaacgacctcattcaacgcctgcgacattacctttgccgccggaatataccctaaacgcgtcaggaacgggatatccacacttgaccgataaccattcctgtacctgcccgcctaaccagactggttcttctgtatcaaaaattacacctctagccgatcggagaaccgccgacccagaacggccacagaccgccccctccttcaagagaaagggattcaaaacatttttaacgccaacgctttagtatactgaagagccccatacccggccggtctttatctaggaggaaaccctatttaataagaattgcaaccttaaaccattctaaatgaaacccattgaatctgatagccacgcctcttaaaaaaatcgcccgtcctaagacctccaaggttggacttttgtcccgaaatcgcgcgggacgaaaaccggcacaccccttataaagttaaaaatgaaccggaaaatttaaaaatttcttatcacaatatctt

SEQ ID NO: 8516 - DNA, 899 bp, Emericella nidulans
tacctctttctttgccggttgattgacttgttgagaagtctcatcttcagattcgtcatctgggctggactgctcttcagcagactcggcctcgtccgccgcttctccctctccatcttcatcttcattctcttcctcttcctcttcgtcctccacctcttctacctcgtcatctgcgaggtcatccgggacaacctggcctgcagccgcaagaatgcttgacagctcttttctcaagtcttcggcggatccttgcgatttcttggagggctttgtgtcctcgacttccgactctgaatcgacacccgcaagcaaatcaaaatcctcctcggtacctccgagggccaagatttcttgtcgcaaggtatcattgtcatcaatcttatccgacttagatatctcgctatccttgttctcaatcacatcaccgttgcgatcccgtttcttgcccttgacgttgctgtcggaaggagatttggacttcgtatcggacttcgttgcaccacccttggcattattcgtatcggcagtaggagccgtcttcgatttattgttcttcgacttctgtttcgcagcaccgtcctttagcctctgttcgatcttttggcggagacccgcaaaggcactctcttccagctgggaaagggcaccgtcgtttgatggcctggcggttgtgtcattcttgacgggaaccgagttagccccagtcgactgctttcctttgcctttagccatgatcaaacccttggctgtatggctgttgatgttcggctctatcaccggctgccctttttctctccccttttttttctgccgcccgaaaatgtccgcctaggctatcggactaacgtggtaccggatgccgaccccatttcgcgaagccccggctctctcctgag

SEQ ID NO: 8517 - DNA, 1159 bp, Emericella nidulans
cgactgcctcctaatatcaaggccggcatggctgttgacttcagagcgcttcgtgataaaggctattgactaacaaccctggcgatatggttggtagaattcgctgcgtttattccctacgcgtatattgtgtcctatgggctttatgcaagaattcccactgatatcgcgtacctgctctgcgtgttcttgaatgttggcgcgatacctggacgcgctttaccgggtattgtggcagataaactgggccgattcaacgtcatgtcactcacagcaatcgcttgcgggatctgtacactggcattatggtattgctctggcacgaacgaaggcgctatagttgcttatgcagtactatacggtttctggagtggtgctgcaatcagtcttactcctgtgtgtatctcccaggtgtgcaagatggaagattacgggaaaaggaatgggacgacgtttacgctcgtcagtattggcactttgacggggatcccgatggctggagcgatccaggagagtcagaatggaggattcaagggtcttattatttttgctggtgtcctttatctatcagcggcagcggtgtttgtgcttgcaaggggggtggttggagggtgggggatgaaggtgaggttttgatatatagaagttctggtcaaacatcctctcttggtcttccgaaaccgacagaatacaaaatcagagtattcagcagtttttgttatgtaaaatgttgtaaatctcccccttgttaaaacgcagttggaagctggaagacaggaagacaaagaggtgaaggaacttcagtagggaatgagctcgtaattgatgatcatccgtacatgctcacaaagcagtgtaaaggggaccggtcagcgtaagattcaagtctatactatcttccgcttgttcagaagctccgcattcaagccatgtctttgctgcttcggtcgagctccagaaatactttaccataatcaaccccaccagtccaataagcatatcttcgtaaaatgtaaacgaaacccccttttttttcattgcgtaggggtttttccattctttaattgggctagagtgcagggtatagccccaagtctccctttgggtcccaattttttaacaaaaaaaaacctttttccccccgggtttgcttaaattt

SEQ ID NO: 8518 - DNA, 775 bp, Emericella nidulans
aaaaaaaggccgcggggggaaacaccacccgaactacacagaaaggagcaccacccccccgcaacacacaaagcaccggccccagacagaaacctcaccagacacaacagcacgaacgcagcagaccccgacgcaaacctacacggccccggcaaacgcgcaacaaaaaagcaaacgcccacgcaagcatgggccaaaccccacagaaaccgcgaacgcaagccagccaagccccgactgcaccgaaataaacaccgccaagaaccacaggcccgaagacggaccaagcgacggcccaaaacgccacaccggaacaagcacgcacccaaggagaggacaacagcccccacaagacccacgacacgccaaagagagccgactgcagcacgcaagacccccaccaaagcccagaaagggccaaacaaaccccacgacccgcaggcgcccaacatgaacccgaagaccacccccctcatacaaaaaccaccaccgtgacaccagacacgccggaacctgacgccccccaacagccaacccgaaaacaaacaaacaaccaagggccaacccacacacgcaaaccccccccaggaaaccccatgacccaaacgcatcaaaaccaaggcaccccccccaacacacaacccccgcacccacacaaagaggaccaacaaaccccccggcccagcaacccacccccccccaccccccaccacaaaacacaaaccacccacacacaacctcaacacaccaaccccacacccacacacccaaccac

SEQ ID NO: 8519 - DNA, 183 bp, Emericella nidulans
  unsure (1)..(183): unsure at all n locations
tccctaccccctgaagcctgcgcaaacgcctcccgactactccgggcantacgtctaagcacctcaatcaactcattctcagacatcaggggccgctggatagatgacaacgacaaccgtcaagctacgtccagtcccagcatcgacgcattccatcaacagtacggccacggcccaagaggc

SEQ ID NO: 8520 - DNA, 1666 bp, Emericella nidulans
gcagccaatcagcgatcgattgatcggctgccgaaatcccgctttatctatgacgaagcttcccattgggacttgggacgaggcggagacattcgatttgtaagcgtggaggtgcctcggatagtttccagcccagatagtctccgtatccgaaagctccaggtctccaggcacggggttattctatctgcacccgtctgtaggtaatcgcatctatttgccatctgtcatctgtcatcacgccaacatgaaggaagctattgtccccaaaggactgtcagtccagattgtcgactcgcccatcccaaccccgcgccctgatgaggtgctgattaaggtcgtcgtgagtgggacgaatcccaaagattggtaggcttatcaccatctggcctgacccagttgattatgaatacaatcataacaattctgacgagaaggtctcggataggaaactcccagaatggctggaccaggccggtaatcagggcgatgacattgccggcattgtcgaggctgtcggtgacaatgtgaccgagttcaagcccggagaccgtgtcatggccttccacgagatgaccaagccaggcggcagttatgccgagtatgctctcgcctggcagcatactaccgcgcaccttccgaagcatatctcattcgagggtgagcccgtaatccccctgatagtttgtcgaaacttgctgatcaatccggtgacattcagaggcggccaccatcccgctggcggctttgacctccgtatctgctctgtaccaccacctccagctccccaccccttggagtccggccgcatcatctatcccgctggtaatctacggtggcgcgtcagcaattggcgcctttgccatccagcttgcccgcaagagtaatatccacccgatcatcgccattgccggccgcagcgcgccattcgttgagggcctgattgatcgatccaagggagacaccatcatcgactaccgccagggcgatgaggccgttatctccggtatcaaggacgcattgaatggcgccgagctcttccacacatatgactgtgtcagcgaggggtccagctttgttaatctgggtaaggtggttgcgcctggcgggaagattgtcaccgtccttccgttccaggattaccctggcgttccggagcacgtccaggtgatcaagaactcggttggttgtgtccatcaggatcagaaggatctgggctacgtctacttccggtaccttgctaagggccttcaggacggttggttcaagcctcatccgcatcaggttgtgcccggtggtctcggagggttggagacggcgctgtgcaatctgagagatggcaaagctagtgctaccaagtatgttgttcgcattggggagactttccgcctttgagtttagggttattgaatgaagagccatgtccagtgcttttctacttctattgcatctattaccgttggctaatacacttggttaatcaaacttgggctatggctaataattcttaccccaaaatctctgggtacacaaaggagacgtaagttgcataaccgttaaaacctgttcgaaattaatttgtaaaaaaactgctacccattgagggtttaatttcctatgggtcctcccccgagttaaccttatccgtgtaaccaaacttcttttt

SEQ ID NO: 8521 - DNA, 1409 bp, Emericella nidulans
agcccaagccccgagaagatctgcaggcaccgacgtgatatgtgtattgcgcagagcattcaggagagacaggggacggggcaaactggaacaagcaatagacggtccacggccgtgttacgtgtacacggctgtgcggcactcacctaatcaggccgtatgcgacgcccgaggactatataaacactcaaacagtccaggcttcctttgtcccaagctctacagattgcagtgcattagaattatcctcatccagaatggctacctccaggcctacctcaacctcgacctggtccaggcttgcactcgccttgtccgcctcattcatccccctcccagcttacgctcagctttacgataaagtaatccagaccgagtacggccctgtcaagggcttcaaatacttcaacaagtcgaccctggagaaaaattgggggagttccgctgacggcagcaacgttgcagcctttctctccatcccctttgccgccgacactgcgtacgagaaccgctggaaaccgcctcaaccgcgcgagccctggaatgagaccctcgtcgcggatacctggggccctggctgcccgacctcttacgcaacggactacagcgaggactgtctcactgtgaacatctggacgggcgcgaattcctcgtctgacagactgcccgtcatgatctacaatcagggcagtgacgagccgagcaacagcgctgtttactatggcggtggcgtggcgcggaaaggcgttgtcgctgtgacattcaaccgccgtgacgatgtctttgggtacctggcgcaccccgaattgaatgccgagtcggagaaagaaaatggccacagctcgtcaggcaactacggaatcctcgacttcctcgagctgctgaagtgggtgcagcgcaacatcgagaacttcggcggcgactctacgagcgtcacgatagtcggacagtccttcggctccgcgcaggtctaccacgccgtcaacagcgggctcttcaagggtctcttccatggagctattgccgagagtggcgtgcgatacccctacgacacccttcttgccgggctcgcagattcgtacgtcaccatgccgaaagctatacagaatggtctcaactacacagcctcgcacaatgccagctcaatcgcggacctgcgcaagctctccaccgaggagatcatggtcggctcgggtgaccgtgtcacagatgccgatatctggtgggtgactgcgctctcctgcatgtacccgctcaaatacaagcccgtgctagacggctacgtcctccctgagaagtacatcgatagcctgcgcaatgggccggctaatgacgtcccctttatcaccaacaacaacaaagacgagagcggtgctgcgacgtcgacagactacacggctagggagtac

SEQ ID NO: 8522 - DNA, 1155 bp, Emericella nidulans
ccacagtccccggtacccattatccccatcagggctcaggtatgtttaaagcagcgcatcctttccgtcccgttgaaaacagtcgtccctcaaactcctgccgtccaaacccacggcttcccccatgcaacgcattcggcgggttgttaatctcaagcttgtactcgcggccattgaggttattgatgacaccgttcttgatgcggttggcgacgcggccgattgtagcgccgaaccagggtttgttatacttctcgtagtattccttcttggtgaagccttggacaatgttctggccgtcgacattgaattcttggatgatggcggccaggtttgagaactttacggaagtgtggtcgcccattttgtgtttgtcttgctgatgcgcctgagcttttcaattgcaaaggttgcaaggttgcaggtgtatactgtcagttgcgcttgatgttcggcggagattgatataggtggtgttatggaggggcttctaccccgcaattacccgtcgcgcaacttggaacatcatcaatttatccttccacaggtggcctttctgcttgcggttaaattagagctcttaacctgactctgagcgctggtcgccgttttaggctaaatctggtcgggtaataatatcctcaagagcttgacgctggagagaagttgtcgcaatgaaaaaaagcagttattccagctacgggagtccttagtccttggatttgagttcaccattgctgctgccgtccgtctgactcctagaatataggctagcgttcgaattcactccgcggattagatgcacgctagtatatctgccccaaaaacctcaggcaaaatacagcaggtacaaccaataaagtgcctaggtgaatgtctgcgatgcccagttccggggttcccagcttcttaacaatgccgaaaacaaatgatttgatttgcagcaaagatgagcttgctcttatctgatccacatcagtgtcgcgagtcccaaatcatagtgccaagtacaagtagcatatatctacggcgcacggaatcacttgtctcaatattcgactcatcttcactcatcctttgcggcggatgcctaccaacttcatcaacaatattcgaaaagctgacctcctcttacactctcaatcgtatttttaa

SEQ ID NO: 8523 - DNA, 1394 bp, Emericella nidulans
cgactattttacttgtgccgtggaccaaacatgggccgaactgcccattgttggaggctgtgagattgttagattaccgagcatgccgcggttgggaaaaacagtctgtcgctcaattgactcgaaccccacgctgtttttctcggatttgccccaaggactagaaaccggaagtatacctgcatttccataccgtcctccatcaccgttcccgggacgctagggttagcagtgaggaggtgttctaactcaacagctctttttagcccgataacacggtcaggtttatgatgagccagcatctttttctggatttcgaccattgacctgtcgatgactttgcagcttcctctggtgacgaacgtgttctgagagggtagttcagcctgccattagggtgccgaacgttagccgcctcctcccactccgtgtttaacttaccaacacctttgccctaacagtctcgtggcattgacagagctttctatgttgcttgccgtctgcaagcgagatgcagccgctagacagcttggatgcgcctgaaaatcagacatccagcaccagtccgcgcagatatgactattctcaaccatcagtatacattcagtatacttttaagagaacgaatggaactaggtatccacatagcatttcagatctttttgatatccgtcaagaatcaaatgctctgtttgtagcctccacgcttcctcgttctccagagaagcgcgaagagcacgcggttgattaacaatcttcacgactcggttgcacatattcgagaggaggatattctcgcatcgttccccgcgcagtctttgacaacgtaatcgtcgtattgaaccttttctatatcgcgcacaaggccgaataggggcgcgtactgttatggtcagccttgccgctgtaggggcccgtcgattgatatgccatattttcggatgagcgcgtgctgttcttgtggactcagctttctagaggaagaaactctttgccgcggcatcttattcagatacgtgcacaaattcaaaccttttctttcgaagattataatcggatatcgtgagcctaggcacaacgtatattctgctcctgggcgctgagccgccgacaaaagtaacgccgtgtttcagttccctcgaactgcggggacgggaagattggtgcttaaatttagagacaggggtagcacaagagttatagcggttttaagcgtcccatagaatgcgcttactatcaaccgcttccaaattaggatgaatcaagctactctgcgggcgtgaacaacgcgtaaacgccttgggctgacgttaaaaactatacagccatggtattactaggaagcgatgggcaaataaattaaggccggatatctgggtcaaactttgtagcgt

SEQ ID NO: 8524 - DNA, 1074 bp, Emericella nidulans
aactccgcattgggacgagttgggaccggatcagcccacgcgcaagctgccgaagcggcgcacccgtcttcgtctggcgttttggaggcgtaagaattatcaatcgcatcagcatgagttgcctggggaatcgcgataatcagggtgccttgcttctttcgccgaacctcatatatccaccctttcgcaccatcatcttaccccttttcacatcatccgctgaacctgaactgaatcaaccatacttgttctcatttcatactggacggcgacattgacattacgatcgatctgacttgcatatacgacggattgtacgattttacgatctcatcgcgttgatagacacaatcagccgggctttcgctgttggagttatcagctgagggttgggccctcagggtaaagctgtggatatggttggatattctttgcttagtcgatatcatcattgccatggcaaggcatgtggcatgaattgccagcgcccctcggttgcaagggtttcagtcgactctggtcggccttacgcacttgccaaatcttgccttgccttacttatccttactttttactagctattctagcatgctatcctacgcttgcacctgcatgcaaatacatgcaaaacagagtcggcgcagaaccatatacctggatgggggcagtcttctcccttcagttcgtttcttattgcttttttcttcgattctttattttccgcttcatatttgtaccctctttttggtccatttccacttcttacttcacctcaccacacattcaccacacatctcactatttctttgctgtcatggaggctggtttgggatatgggcactagagtcggggcgtgttttggtttggtctttctctggttaggttgggcgttctggctatatctgcttgcctaggtgaaataaggtcggagcaggtttgcgacgtccttggaattcactagggtgcggtatcggtatttggcgtaccagtttgcctaaatttttctacatgccgtgttgcattctctttgcttccaaaacgtcattgccatagctttggttttcttatctagtg

SEQ ID NO: 8525 - DNA, 870 bp, Emericella nidulans
tttttttttattcaactgtgggtatcccaccacctattttgaatgtagttatttcttttcgcaatacatatttttcctattttatactccatcttcctccccaattacacacatctatttttctattctcgacccaaactctactctgccctttctaatttgtaacaattaatctccttcttttccactttttgtccacttcttattataccaatatctctgtcgatcttttcctcgatttctctgatatctctttcttcataaatttctattctaacgtctacttatgcttcttgttgtttgctttccacacaaacccttttttcatgtgagcctatttacccttcctccaatattcttcgttatttctgatatattctgtcttcctatctgcaataccctcttttttttcttcttttaagacatagcttccctacattatacctaacttctcttactttactccgataaattaacccttctttattcaatatgttgacccttactctaatgcatgacttccttttttcctttatttctccaccttccctattttttttttattcttataccttaaattttatcttcaattcatttttacttcaataattcctttttgtccaattttattaactcgaacctcttttattactattggttctttatttccttttattaaaccctttttccctttttcataaatcttttgttaaatatgcccttctcctcccttgaaaaaaaattcttctttccttttcctacacatatttaacattaccctcactttttacattttttaaatataaatcttttattttaacatccccctctactatatacttatttcttgttctttctttttcttctctc

SEQ ID NO: 8526 - DNA, 1107 bp, Emericella nidulans
ctctcctcgtgtactttggcatcgaggggcaccgaccaggctcgtgacagaatggcttgtatcatagccgttgtatatggcctctcagtctcaaagggttgctggcccgagaatgccagattagggtcgtgattagaggtagggatcggcgtgtaatccatcattcccccggagtatgtatcgccagttggtttgtgcgtttccccgaaaggtccgttgaagaagtcaagaaaagtgtcttggaagaatgacagactattagagtctagatcaacgaacgctggtgcgaactctgtgtgttccccttctgatttgaatgctagcatcgagctctcggcttcttctttctggtggtgatactcgagtccgcgagtccgatcgctgcgcggtgggaggagaaaatcctcggtgaaactgtccgtccctccgttaaggaggaatttgatagatcctcgttctgaaggccgctcatggtcttcttgcttcgcggaaggcgtatctacagaaatgagttcgaatccgcacgacgccgagtcgaacgtacctgaactggcccctggactacctatgctagtcttgcgcgctttgttacattcaagattcctcttgacgcaagaaccacatggggtttgtccatcgcaccggagtttcatcgacgtgcactgcatgcgtcagctggtggatgattggcgccgcgagaagccagaagggtttgccatacagattggcatgcatgtcgcctccggcctcgttggccagtctcaggaatcccccgatcgccccgttgagcgcagtcggcatagtgatcgcgcagattatcactaatttttcattagcgacacaagaaccgttttaagtcttcaacaaaacacaccatcgggcaaaagattcgctgcagaagatacaggaatgcggcttcaagccggtgtctaccgggatcccctggtcagttttcgcaaacaaattcgaggtgtcgaaggaaggcaagataagcggtaagacagccacatacgacgcaaatgatgtcgtttcagataaacaatgcgtgtgaaaccccgctggcagattgtgcagcagaaatgcttggtgggcttcatacagaatgcg

SEQ ID NO: 8527 - DNA, 1378 bp, Emericella nidulans
gccccccgtgcgtgccgataaaagccaatatcttcggcgcctggagaagatggaacctgaaaatggcagaaccgcttatctatacgcggaggctgaccaaggaaaatagcgacgttcttgtcgccggagtatactcgtgcgaagaccgccttccgcagctctgttagaaacggtgggcagtcgggatagttgtccagtttctcatggtatcctagagcgtagatcgaagctataaggtcgccgagccggcgccatgaatggtagcctatgccacctcagttagcctagagccagattcttgtataaacaacagagacagaacgaactgtggtcaccataaacatttgtatgcacgatccaattctcatactgcaagaagagctgcagatcgttgagacaatccagcgagagcgcaatctcgagcgcggaatccgctactctcatgcagaatttctgtagcgtgcgtctccactcctcgctggtatacaacgactggaagaacggcgtgtccatcgcggcgcgggtcacggcggacaggaaaatacccagcgtctcccaccgggtattctgatcggtgaactgcgcgcagaatcccggaaatgacattgtcttgcacgtctcaaaaggttgggatgaattggctgacaggtactttgcattaacgagatgccacccctcgatcgatgaagtcgctgatattggcaggtcaacccccttgaggcaatgctggacaatgccgcctgtcagagtgagattcgcaccccttgcgagccaagactggacgagatcttccatatgctggagagagaacgtgctgagtagttgcttgaggcagtcggcgccccgttgggtgagaaggtcatcttcgggttgggtgcgtggtaaggttgtctcgccatccaggacagagttagggctattgtcctttgcagaaatgtagttgaagatggcaacatggctcgatgagccggtataccctggattcgggtagcgattcggcgtgcgcgccggcgcagatgccgggactatagattctgtatcggcgatggtacgagtgctagaacccgtgtaagcaggcgaaagtcatttatttgtaccctagacgatggttgtgctaccttcgtgaaggattcagcgctgggccagtatcaatccttttcctcttaaagggcgcatttcggtagacgcagtggccttttcggttgttattgctgcagcgcgtacaaactggccggttatggtcgcatgcaagctttgatttcctgcaaggctcacatgctgctagtcttgatgccattcttctcggctctgctgtgttgagaaagtgtcggagtgccgcagtggccgcagtgccggagtgttcggggtataggagtaa

SEQ ID NO: 8528 - DNA, 461 bp, Emericella nidulans
ggggctagagctcacaaaagggactcggctagtgtaatcgccaggctttctacttctgagcgactgaaccgcacaaatcatggcgtagcaacaatagcatgattaacctggtctccacatacactggcttgtatttctccaccaaagctcgacataaacagcttgtcactccagtcacgcagtcgttgtcggcctcccagaatatcccaatagtataggtacgcctaggagctgaaacgcgctggcgatatttatttcttcgttagcagaggagggagctgtgttttacactgtggaggaaaccaacaggaaacagtttgcgatagctggtatcgaaaatgcgccaatcctcgaattgtgagccccctacccctttaatcttacactgtcccaggagcagactcctgctgagatgtccatcatgtcatatatgccgtggtacacatggatgattttgtggg

SEQ ID NO: 8529 - DNA, 136 bp, Emericella nidulans
gtggcgcttccctggcgtgactccgaaccccggagtctcggcaatgttaaagtttttcttgctgtttagggtccagcgaccgtatcccgctagcgatccggcattccacgccggccccccgcctacacgtgcgcgt

SEQ ID NO: 8530 - DNA, 912 bp, Emericella nidulans
gtcggtcgattcccagaccatatttctcatgcagcttcctctgcgtcttctcagcattgccgggaagcacatgcatcaccgtccagatccgcgagacagaggcccagaatgggccagggaattgcgcgagggggtggaaccaccgtgtgtaagtgatccacatgatgcagtatgcgagggagacaagaagtgccaactggaacaacagcaatgtatcaatgttaacgtatttgaagtaattaggtacgatcagatccattatgtgattgaccagcttcccgttagctgtgcagtgaagataggagactctgggactggggctcatggagggtgacagctcttaagtgggcgcgtacaggagccaagggtctactcagagtacagtcgtggctgcagcatttagccaaatacgagttccccgcccagaggcgcgaaccagctcgctctgaagaaatatactgacctgcaatcaatatgaaacgaccgttagtatagtgggtgcacggcccgacacggcccgttctgacagggcgatacgtagccctagtctccaaccggcacaaactgaccagtgagatttggatgggtcgagcgcggaccttgtgatgacgaagttgtttgcagcatggaatctgaatgcattagagactaatggcaggattctttcatgctgaattctaggcataccgccaaggccagcatatccttctgcggcatcttctactttcgtcttgtctactttcgccttgtctacttgatatttggggaatgtccgtggttaggtctatggctccgacaaagcagggaggatgccgcagtgcagtattgtgcactgggcttggatatcttgaaaatcggcccgagaaacgcggcttcggcgagggcctcagggagttcgaatgagcggccacc

SEQ ID NO: 8531 - DNA, 250 bp, Emericella nidulans
  unsure (1)..(250): unsure at all n locations
cgtcggtgaggacttaaccagcggccaatgtcagtgcgaagatgtccttagtcatggcgagggtgctgtaggacgatcgaaacactaccggctgttggttcaagaagtangcggtggttcggtccaagactcagcccgagttgacttaccggtacctcgcgcacactagcgttctccggtctgtcctagcggaacgtgttgccgatagagcattgcgggccgaaggacattccgattcaacctcgcggtc

SEQ ID NO: 8532 - DNA, 188 bp, Emericella nidulans
cttgtaggtggatcacagccttaaggacagcgcaggacttgacgtagtcaataaggtctacggtcctagaataggcataggacccctaaaagtaaccccccctacactatatgtagactgttatagtcaccgggtaggacatgttgcaatagactatctgtctgcatctctgtatggtgagccgtcct

SEQ ID NO: 8533 - DNA, 175 bp, Emericella nidulans
taggccacgcgtttcctgcagtcattcgtatcctgcccttttgacgcgctcagttcctggtacgtgctgaggctcaatgcgtgtttcgagagcttcgccgttcaccatggtcttctcatcgcccacttagccttcacagatcttgtccggatggtacaatgctggctagttagcg

SEQ ID NO: 8534 - DNA, 100 bp, Emericella nidulans
  unsure (1)..(100): unsure at all n locations
ctgctcatcacgatcgagtgccagccagattgagaaggcgtcattgcaangactgcaggcccgattaggtcgcatctatgtcccatagctggttacctta

SEQ ID NO: 8535 - DNA, 975 bp, Emericella nidulans
ggccgcataaccctactaagggatctagtgtatgcccgcgttctatctaccgggttgggaccgggggcagaagtggagcttacatgtgtcaatcctgcgactgggaaagctgagcctggaggactagggcctttgaccggtggaatggtgttcgatatctctactggcatggctgctaggttgatcaaagcaagctcttcctcatcggatcaacaggagggtgtcgcaggcttggtcgtattagacgagctaggcaagaaacttgaaaaggttggagggtttgaaattgcagttgggaggaatggaaaggtgtgggtggactgctcgaacagtgaagaggatgccatcaaagcaactgtagcaattgggcggtgcatcaccatgattgacgaacataatcttgttcccactgatcaacggaaattggtgacaaggatattacgggaaatgaaaatagactcataatattcaataataccatctgtcgtcgctctcacacgcgctttagttccgacagtagatagcgcggaaagctccgccgcgaccgcaacatttttttccttcagcttttttggaccacagccgtccctctagcaatcacaccccacgacattcccacgattgcgctactagcaatcgctttcagctctggagtgcgtcaccatgggccaagggtcgtcacaacccgctggcttggcgcaatctggagaatctggtaggttgtacgccgacccctcgcgacaggctattctgacataaacgcgcctctctgcagatgatgagtcgagtacacaagcctcggtgcaaaatcactcaagctctcagaaaattgtcaagagatccaaagcagaatcgcaccaggggtccagtaagcgaagacggaaatcctcccaaagcggcactaggccagcgacgacatcccctggtagccttccggccagcgttgaagagcccggtcccgaatcgccgcaggag

SEQ ID NO: 8536 - DNA, 790 bp, Emericella nidulans
gttgcctcgtcatcacagctatcccagtcatcttctccaagtcgtcagaatgcatatccaggcgcgcccagcatgctgcgctctccagcgtcaaacgcctcccttggcagaagcagcaccagcagttctgacactgttacgccctcgcgatcatcaacatcgaacttttcagccccgccgcgcgctcctttacctaacaagcgggaggaactttggcggagacgctgggaacgggctagtgaaatccttgctgataaaggggtggtcttgggtagttggcgcgtggggaaggatgcacaggatgtttgtctttggcttgtgagggaagcgctaaaggtatcttctgattctgggaagaaggaagtcacccaaaagagggagacggagagcaagtggagttcatgatacagatagtctgcataggctgggttatgttagacctcgatagagttatcatgcaggtgtatatatgtcaacaattgtatgttcctcggatcgtatctctgtaaatagaaaaccataagcctgttttttctgcgtgcgcttctgcattttagcattgatcccttaatcctaggcaaagccatgaatcgggtgtcacccagtgtatacttcaaatgggtttgaatcataatggaccgaatggtaaggactgcttacctttcaattaacctcaggcctacgggctggaagggtccgctgtccttagataagcaaattcttctgtcttccctcctggaaaggcgcacctcttttctccaggtcacgtcataatattctctcagtaatc

SEQ ID NO: 8537 - DNA, 1074 bp, Emericella nidulans
cagagaggtgctagtacacagtatattgacttatgcagagcgaggtcaagcatctcggtaatgtacaccgtttgtttagtgaccaattggatcccagtgtgatatttccaccaaggctgtatgttttgcccttaaacagtaaataggatggatatggatgcctcatgtaattactgccttgaatatcaggctatcaggcacttgttcagtaagtttctatcttatcaccacgtgatgcggagacggaaagaaaaaaaaagaaaagcgccttgggaaaaattcaagttcccgcaggcttgccaatcgataattcgtcccaacctactttccaggaagtctacaaatctcgcaggcacaatgccggccgccgtggatactgccaaaacaataacaaagaagcgcaagagaaagcacggaggaagcgctcgcgaagccactgacaatggagttgctacctcgcctgctgaaaatggagtggagggcaaggcaactgagactacgactgagttaaccaaggacaaggatgttgagcttgcgaaaaaggttgtgaaggaggaagcacaaaaaaagcgaaaagtgagccattcgcctagcgacgaggaggagagcgagagtgaagacgaggagaagaaggaagaggacgagaaggataatgtaaaagaggattctggaaaggcgaacgtaccagatcttccctctgttgatgcggttagcctaccgcagcccgatgggggccccaagaagttcacagagttgggtctttcggagaagacgcttcaaggtattaaggagatgggatttgagacaatgacggaaatccaacaacggacaatccctccgctcctcgcgggccgtgatgttcttggtgctgcgaagacaggatctggaaagacattggcattcttgattcccgccattgagatgctcagtgcgctgcggtttaagcctaggaacggtatgttgggttcttttctctctgctaatgctcttgattgtcctaacgaacatgctgaaataggaaccggtgttattgtggtctcccaacgcgcgactggctctgcagattttcggcgt

SEQ ID NO: 8538 - DNA, 809 bp, Emericella nidulans
tttagtttctacagcccggcatctgacactgatcgcacgggacaccgccctatttgcacagtgactttttttccgtaggcttcactccctgtccagggaatctgtacaatcgtagatcggtcagcaattcgcggttcaggataaaagagcccaagtgaagacagcagcatacctccccattatgaacccccacactactaataaccccccagggtcttaaaagctcaaatcccattctcaaggccggactcattcccactacctcaatgacggcatctgcgcctcgaccatttgtcagctcagaaactctcctatccaatgcttcgcggtcattcttgaaatcccagggctctgcacccagcgactttgctagatccagccgcgacgggacacagtcaacggcgaggagatgcttaggtttatactcgagtgcgttgatcagagcgcagagaccgacgggaccgcagccgatgatgactacagtttgctccgcgatctgcgcacgtgtgcgcgttcttgaaggcattctgcgcggcgaagtagcccgtcgggaagatgtcgcccattaggacgaggtactggggagagacgccgcttggggccttgacgactgtgccgtctgcgtgaggaattcgcacctgcgtattgtcagtataggaagtgacatatgttcaaggcccctgagagctagtcgacgaagatattcttacgtattcagcctgcgcgccatcaaggtcatcgcatcctaggagtgtgttctcatcacaccttgatgcaaagccctgctcgcagtagaaacatgtttcgct

SEQ ID NO: 8539 - DNA, 1725 bp, Emericella nidulans
aataaaactttaactaatcaacattttcatgcaatagttgcatcaagatggctacgctcaatgtctgctccacttttgaagcgtgtatgaagagccgcaacccacaagctacacggacggtcctcctactggcgctggttctcaggctggtgaatatgtaagtcagaagaatgttgatgcttgccaagctgccgcttaatgcccctctttggcgccgttccagtagttcgagctcttagctaatgacacgattacgtcttcagcaaccgcagcaagcacctcaacaacagcagccgccgcagcaatatcaggcttatcctggtggatcggtaagccattctcccttctttgatccatttttttttctttgatctttctttgccgagtgttgtgatctcgcttctccttgtcttttgattatttacgtgtgtttgtcctccgctcccgtcgcacccgcagctgcccctcttcggtcccattaacactttcgtcatcccatctctcttcctttccagtcctcttcctctcctttaccatccgaaaacatgtctcgaccgtaccccaatcaaggctaccctcctcctgccgggccgcctcctcagctacgtccgggtcaagctccctcaccatacccgccgggcccctcgccgcagccgcaacagcagcagcagcaataccaggcttatcctccagtcccgccgaacaagccatcgccatcgcctgcgtactcgggggctcctcaaacatactcgcctgcgccatattcgccccatacccctcatcctcagtcttattctccggcgccgcctcaaaattactcgcagcccccgccgcctcagccctacggagcgcccggccccggcccgaactatcccccgcctcagcctcatgtataccttgccctcgcgcttgctatgcttgtctacttcttattgttgacttctttggtcttctggtatccggagtaagctaacacatatcatctaggcctccggttatccgcctcagaatgctccttacccgcccggtcctcctggcccgccgcatgctcaagccccgggagggcagtacggtccacccagcggcgcgggcggcgctgttggacctgcgacccagcagcagcttaacgcctatcgccaactcctgatctccacgatccaagagaagagccttcagcacttttaccctcctgataaattggacagactcgtgcaaggcctctctcgagatggacccgctaaggtcaacaagattgtgaatgagtttgccctgcctaccgagatagccatggatgtcatcaaactttcactttatgacattgtcctctacgttgacgatagcggctcaattgagtttgaggagaagggcgtacggaaggagcaattgaagcagattcttggtatcgttgcaactattgcatctacctttgatgaggatggcatcagtcttcgcttcatgaacaacgacttcatgcaaaacaacattcgcagcgcccaggatgtggaacagattatttccaacatccgattctccggcatgacgcctctaggttccgctctgagatccaaggtacttgatcccatgatagtgggtccagccagagcaggccgcctgcaaaagccggttctcgtcatcactatcaccgatggtcagcccgctggagaacctctggactccgtcgctcagggaattcgctaccgctgtgatgaggtttcgagatcccca

SEQ ID NO: 8540 - DNA, 852 bp, Emericella nidulans
tatccatatatttcatatattaccccgattaggtggattcaaggtgatctgcagctcgccacagcctcgctggaaatagagtctagatctggtctgctcaaaacggtagggaaaatagactacggagcgccaaaaaaattaagaaagcgggatttttggcccccaaatctcgtatagatactttacctgttaatcaagccattggccagcggtacgcgacaagccaagcatgacgcgggtatcaacaatccataccaaagcattcagagcgagtggtatggagtcccatggtttgtcggccgccagcggcgactccgggcgactgtgggcaacgtggtagtattcagggttcaactccgtaggggcctcgtggcactgcaggggtgggtcgggcggttctccaatagataagctggaactcgacgcgaattcttgatgggtaactggtaaggcccaagcctggaactccggggaggcttccctgtagtctgtcgcaggcgtccgcgttccagcggggagtgggggcttctttgcctcatggtttgggttgtacaagataggacgtaccctctgatgaaactgccatggatcgatgcaataggtacggagtacgggtccttgtctcttgcaaatatggtactcgcaatcaccctagtctatctatcttgcgctaccactatcgcactgtgcagatctcggctaattgtcggttacactgcttgttaatggtgtgggatttcaaaagacagtagtctgtaagagccccgctcatgtagacagtggttggccgtccttgggtaaagtacgtaccttcataaaaatggacggcctattattgatgtcgggtgttgt

SEQ ID NO: 8541 - DNA, 745 bp, Emericella nidulans
tttgttatatctgcgggagcatgggttagacaaacaagattttacagggtatcatagatttttcgctcacacacggatataatattaccccagaacaaggtcttccaaaaccccgtccatctcattgcgggacagcgggacgctcagtatttccatcccactcgcatccatccgcgaggtaatcatctggtggtcatgaaactccttcaacagcgtgcggaacatcatctcggaagatgcgatgaattcttcggaggccttctggtataatgctcggaactcaatcccaggctcatccttcggcccgtcagctgccccatcaccgttgtccatatcatcctccccattcaaatattcgtccatcatcgacagcagctccgtaagcagcactcggtacaggttctgcgcgttctcagggagactcttcaacacaaactccacaccctctttaccgcccacacgccgtcccttccggccaagaaggctatgcacttcttcgaccacatcaaactcagcatcgaatggtgtgaatgtcgtgcagtcatggaacacaaaattgaattgatcccggagactgatatcccacattagcaggaagtttggggtgtctgcggttacaagcaaatgtatctttggtgtagctgcaaggcgggcaagcagacttgatttgtagcacgacggagggagggagcatcaatagagttgataaagacggtaatgggatcttgatcacgccgggacctaa

SEQ ID NO: 8542 - DNA, 967 bp, Emericella nidulans
ataacaggccgggaccttagagcggactgttgtaattccaagacctccactggttgagctcccattttagagggaatgtcggcgccgaggacagctgcaacgatagtagcaaaaatggatcggatagataggttgggagtatgtccgttaacgatcacgacagatggaggagccttgctgtgtctgcgatagagccagtccgcgaaaccctgagtgagccgacgttttgagccgtacccatacagacaaatgtttaacccctgagagaattcaaaattccattgtgggaacgacctgcgatggacatcattaagaaaggctgtctcccgcttgcaagggtcctggtagttcgcgtgcttatcaaagtactcctcgtgggtcagcaaattcaccttgttcaggttgttgttggacgtccgagggggcccagcacggttctggaagaagtaccgctcgtgcggtggcagatccccttcaggagtgggagaacgcttgttttttgcccctttgggtcttccggcacgacgtttcggtgccggctgtgtcttttcggtcttgtcttgcttcggctcagtagaatccgcctccactgtttcaacaatatcatttctttgcctatcgattgtatccggtgcgtcttcaccggccaatatctcctccgctagctgatcgcctccttcccaggaatcctcaacctggtcgagaagtaactgagcacttttcttcttcgctgaacgatcagcgcgtactttcgttggagtcgatgcccccttctcacttgtggatgttgagaatagagcctttgcttttgaccgattagatggcgttctgagtccggacgctttcaatgttgctgctggcttaccggctggcttttggggggtggcctttcattcctttcaccggaggtggttaaggcattccttttcctttgccggggccgttggttttaaaaatccctgcccct

SEQ ID NO: 8543 - DNA, 221 bp, Emericella nidulans
gccccgtcgcagccgcgcatccctgcactcctcttctctgacaggacgagtttgaaagctctgcagtgaccgcgaagtccctagttgactcagatactctgtcattccacgtaccgcgtcctaggactggctgtgccttgctgccgtgtcactttaggtatgcaggggatactccgaactggactcgattggcgaagcgcacagcgtaaatgtttaaatgc

SEQ ID NO: 8544 - DNA, 619 bp, Emericella nidulans
caaatatcaatattgctggccctgtagtaggattctcgcgttctacagcaatcgctaggataactcagatcaccaaaaagactgatatggatagtcaacaaagcttaggtatggtgggtctgtttgagctacacatgcagatactaaaattctaaacagttttgcgaactagcactgaatgatatttttcatgtcaaccacttccaatatacaagtgattatcggaagcaggatactcaccctattactttctctataagaaagccttatataatacctcaagtttacaaccatcgctggcttgagtcaaatagtccttaaaatgacactgtcattgtcatcaacaacacttccaagaaagatcatctacgcaattatcaaagagcttgacagacctgacaaactggcacttggcctaacgggtccttactttctgggtatccttgccgactattacgaccttgatcgctaccgcagcaatcctgacgcatggaaaaggctcggtcttcctgccggcgtcacttcctggcacgattcagcagcacatgcgactgttatacggtaccttacgcgggcatgggtcagtgatattgaggctgtatcagtatattgatgatga

SEQ ID NO: 8545 - DNA, 685 bp, Emericella nidulans
cctacccccaactcaacatcctggcagcggcgcggcgaccatatgggggccctctaaactattcatgggccccttccatagttcgctttcttcgaattaccagctaaattcttgacgggccaccgtgtttctgatgacttgcatcggcagggcgtaatcgttcttcaccatttgtgtttactcccttttcatgcatcttttctttcttaatccggtctcttctcctttcctcctttcttttctattttttaacattggctgtacaccttgggagtcggctcatggttgaacacttcatcgtcatctcattgtatctcgaggctggaactcttgcatctgtcttattctggatctgcatccctgaaccacgttggctagtttatgcaatcaaatccagcgaagaatgcacgtcactgcaaatgctcaccacatacaagcatcgaggccagcacacatctacatagtctctcacgtaccatgttcaactgaactcaggccttgtaatttcagtgaaatggccagattagttgtgtactgtagagacaaaactagaggctagaatgaaccccatgctcgcggatgactgcgaatactcgttcatcggctagtgggcgtgcggcgaagaataccacagtctgtattgacttcgagtactctacccactacaacagaggctcaaatttcc

SEQ ID NO: 8546 - DNA, 597 bp, Emericella nidulans
ttctgtgaagggttggtttactaatgagccctgcaggctgcagcacgcttgtccgatttacgcaaggaaatatcggatgtgctggttgagattccctcgcggcttacgtgcattcatcaagccctgaacattttcaaggggtcgaaggacttgcataggtgcagcgtttccctctatgtggccactcttgcgctgctgcacaatatagtatcctggtacagaaaaacggcgattagtatgtcgaactctcagcccaacaggatggtcaagcagctgacagctgaccttggagaaaaacttggcctcagtctcctcttacagggctcgtatgagcaaaacatggattcactccttcagaatctacgcgcagagtcggagcggtttgacaaagcagcccgactctgctcctatggggcaattgaggagacgagactgatctctatcaagaacgagcaaattctcagcggttacgtggatcagtcaatgactcgctgggacaacttcgagactgagcttcgatccaatcaagcaagcactctggatggatatcacacgctccaacaccaagtgtcggatttgcatgcgattatggagcgg

SEQ ID NO: 8547 - DNA, 1656 bp, Emericella nidulans
tgaggagagttcggaatgccaatcgcagcagcagctttggggtgcacaattggtgcgagcggctccagtatgtgttctctgggaggagcgtccgaagctggtggatctgccggggattagcttgctgagtaggtcagggcagagactaaacgagctaggaccaaccatttcttccagtttctgcagtttggcaagcgaggagaccagttgcagctccgtttccaggagctcagggtcgatgaccgggtccacatcgtcctccggggcggcactcggcgcggccgtgggattgggctcggccatagtagtatctttgtcaatttcaagctcgttgactttgacagagggcgaatgttccattttgggtacgacgataggtagtcttgagctggcagccatttcccacgcgttgctggtggatgaagtgaaaggtgaactggaggactgcaaagttgtgttgcgcaggcgtaataaacaaattcaagttgatattcagtgcgcaatggcgcctgcagtcattccgcccagcagtccgtcgtggagagagatggatgcgatcaaaatggaggattcagcctggaggatgaagtcggtcctgatcattcgtcatttctctgagcggtggagttgcgccacattccagccccatcgtggctggtgcactggcgtggacggttccgcttggttggcttcatcgaaagacatacagtacattcccaagcgtagagagatttgtcattccatacacacataaggacataatacgagctcacagtcatcccttcttagaaacggctggcatcttaccaacccatttatccgcgcctccttctgcagcatcaacaagccatctggccagagcacctcttttctgcgacggcgtccagcccttctcgcccacccacccaacaaacacatccgcatcctccctatctgtgcgccagctttcctcgtcgtgattccccgggatcgccgcgattcggaaaacggtccagtcaagcccgtcagcatgctgctcaaatgcgtccccgatggctcgcacattggcgtacgcagaatgtgcgaatatgcggataatagggatcacaacagcggtaaacagtgtccaagagtcttggggtcgagagatagaaggtgtgcccatcgcgaagatgcgacggaccccatgctcgcgcatcaggggaaagacgaacgtcttatagatatcagcgaataatgtaggattggacattcgtataatattggggccaagaagggagatgacgacttttgtcctcgccatggccgcggaaagggtagggaggtcgtcctcgacgaattcacccttgatgatctgtagcgaacacgcggttagcgccaattctgcagtagcaagggccgcagacctcgagaaactcgtttgattgtatatcgccatcgatctttgacggatttcgggcatagactatagtctcgtgctgccggtatacaagttctcgtagcaggcagatgccagctggacccgtgccgcccaggacaagaaatttggaaccggccattaccgatcagtaactccaaggaatagatatcgctgaagaaggcctctgagggcagtatggctgctttggcgatagctgcatttacctactcaagaatacttggtgaggttctgcagtg

SEQ ID NO: 8548 - DNA, 911 bp, Emericella nidulans
agacggtctcgactctctcgttggtttaaaagagatgacatcatatatatcaatcttggcatttcgtcatagctgcatagtttccttggaaccgatcgatggttgttaaattcaatagatgattgacctgcgaatgccgaatgaagtggggacatggtaattttgattgttaagttgcgtaatttatgtaatgacattaccgtcccttgtaccaacataccttactcctgttcctgagatataccctaagtagtgctacggttcgaagacggttgaggccatgcctgcaaagcaagttcatgcctgtctgtctcacagtgcccttatatagcgtatattcaggtccgtagttgcgtacaacaccaacgtcatgatggtgatgtctgtcagcacgttgtacttacagaagctggcctggaacagcaacggttcaacccctcggctaagcttttttgagtataagcacaacatcaacggcgcgcaagctattgagatgggtctgggctctggactctggcttgtttccagcgctcgatcgacgacggtctggaaccaattctaagccctggtgggcaccagcaccgcgaagaaattaaggcggtcgttggcgtttgtgtggctgtcatactcttccgttttatgccaatcaggatgctgacggataaccttatctggtggctgaagaggagtcctcagatgggtcccgggcctgatggggcctgattgctatatatggagtgtattatggtgctggcagccgaattggttggtggatgttggaagcacaggcggctttccggtttgctgggggtactttatgcgggcatcctatgcttgtgtccgggtaaggtttcctatgcaggtgagctggagagtgttaggacgggaactggaccctgttgcaatgtacg

SEQ ID NO: 8549 - DNA, 1063 bp, Emericella nidulans
agcagcttgggctagcgtagtagtgctggttttcggtcttgtttcaccgtactcttccattcaatatatcctgttgcaacgtaacatttcctagggtggatctattagtagatatatcgcactttttgacctaaatatcctaaatgggtcggccttccatccaagcttgcctcatgtctattcggccataaacttcaatacactttggccaacattaatctcagtgatacgttacatcaattccccagcaacaaattgacctgcgtatacactcatgggcaattgtgacgataacgcctagctcactgacgtcaagagttagcattatggacaagagtacgtttcgattctcctctaatatggaattctctgttgacaaaacagtagttccatctgttacaaaatgtattccataatacatcagcctgaacctgctgcaaacagcaagttactataaccaaacttgatttccaatcaaatgactacatcactacatgaaagctcatgtctggagcatctgacagagaacctcacacaatctatagaacagcatttttttgtcacaatatactagcattttaccgtaatgtttacttgaatatgcgatctttacagctgccaataatgcatttttagtactacctctccctgctgaggaggataattatggttggttgcagctaagaaatttaatgaatctctaatagttttatgggcacgtatttatccacaggagcagcctggagtaagcagtatgcatgctggacaacagattgattcatctaccatgttccaggtggttccgttgtaaatcccagatctgagaatggacatctggatttttcaaaatgaatatttaactaacgctttccctttatagtctgttcccgacccactaacaatgctacatttacccaatctaggagatccctgttacatattcctgtttcaatgcaagagaattatctatgattacagctatactaactgtggcctgaacagtagcgaaatgaattaagaatgcaagatagcatcaagcttgtcttcgtgtggcatacatcta

SEQ ID NO: 8550 - DNA, 481 bp, Emericella nidulans
ggggcagactgtacagaactttggggattgaagaaagcgtcatcagggtctagccgccactctctactggccctattggccgactggccttttttcccccgcttcctgggcttgatacccagcaaccttcgtaaccccctgtggcgccaagatcccatggcatgcagggtgggggggttcattcaagataggcaattttaaacccacaatcttcaattccagcggtatgcaggaaccatcctaacctggggaattgtatggggcgcttattcccattccccggaattggttaatgcctattcccttggcccccaaagcccgtttaaaaccaaacgggtccacccctggttttaaagttctggccagggctctttggtacacccctccaaaggggaatggggggcaatttaaaaaccggcccaaccacccccggaacctttttatttcccccttaaccgaaactctggttttgttggcccaa

SEQ ID NO: 8551 - DNA, 883 bp, Emericella nidulans
gatacttcagacatactgatcggcagggcgctgattaccacattcgagggctttgaggcagcgaacgactgggccgtgatcaagaaggagatcgctcagacggttgggaacgagacctgctgcgtgctcataccagattggacgtctgccggccctgagaaggccgctaaagtccccgcgattgacggtctgatgagttgggaggcgtggccgtacggcaacgaaaagatgaacacaacgcgggacgagcagtacatgtcgctcctaggcgaaaggccctacattatgccggtgagcccctggttctacacgaatctgcggcaattccacaagaactgggtatggcagggcgatgacttgtggtatacacggtggcagcaggtcctggagctgcagccggcgtacgtcgagatcctgacatggaatgattacggcgaaagcattatatcggccctgtgaggcgtgacgcgacgagggtcatcgccgaaggtgccccgtttgattatgtgagtgggatggaacatgatgggtggaggagtctgcttccctatctgatagcacaatataagaacgggaagaaccgggaggatgttgagattgctgaagagaccctaagtgtctggtatcggctctctcctgctgacgcgtgcgattccggcaaaacaagcgggaatagcaagagctctcatcaagctgttatggagccgggggatatactgcaggatagggtcttctactcggccgtgctggaggaggatgcagatgtggctgtcgcagtagggagcgtgaaccagagcgcccagtggaccaacacgccagatagagcgagaggagtgtatcatgggtctgtcccctttggtgggagggtcggagaggttgtggt

SEQ ID NO: 8552 - DNA, 705 bp, Emericella nidulans
tttgcatcggtagtcagattacccttaccgctactgtatagtctatacgtattctagaagggtcatcacccgtccaaaggatgcaccaaggaacactaaggaacggccccgagagctggcgggaccgagccatatcagccaccccgtcagcatggactatacaataccagacatctatatctggagaggaaggctctcgtctgcaggacagtaactcagcactccgtccttgtcaagatgatcttcacccctccagtatggggccctgagatgatggccattccggcctcccgccccatccacgagtttctcgtcgaacgagacagccgtcacctctacgactggtccgaggaaaaaccagcattggtatgtgccgtctctgggcagtcatacaccatcaagaccattgcggaccgggtcgacgccctggcgcgcagccttggccgtgagctcgggtggtcccccaacacgggctcgccatggagcaaggttgttggaatcttcagcttcaacacggtaagagaagcacaatagtgcaggagagcatgcgcacaagctgctaattcatctggagcttgatttcctcgttgcctcgtgggcgatccaccggatcggcggcatttgtatgctgatgcacccgactagctcagccgcggagattaaacggcatattgagctcaccgagtgtcgagttctcttcacctg

SEQ ID NO: 8553 - DNA, 2026 bp, Emericella nidulans
  unsure (1)..(2026): unsure at all n locations
ggcagacaggctgatgataaagttcgccgagtacgggcaaccctgacggtggagcatttgcgtgtttcatggaataaaggaacaacaccgtatctatgggcacttgcaagtctggtacgtccacgactcacgcggtacccgccccgtgctatacgcattcctcggccacggcagtcgatttatactgagccgacaaacgcgtggctgtatttcgacggtcctatgagcgcgttgctngaacaaacctgcattgtccttgacattcccgggggcgggtttgtttctatgacacctcggcactctgaagatcgactactggcgtgggccggaaagaccaagctcccgatattgagtcttaactataaaaaggcgccagagtacccgtacccgtacgcattgaacgaatgctatgatgtctatcactcaatttttaccactcgtggtcgttgcttagggttggccggggatgtgccgcctcgcataatcctcacgggtgacagcgccggcgccaatcttgccgtaggcacagctctgatggttcttcaatctagtgatcgtagaccatctcttgcgcaaggccaaagctcgcttccagcgccagatggtttagtcctctcgtacccagcgctgaacatgaagattgaaagttggatgagtgaagaacatgtggcattaatccaagacaaaagcacgaatcggagtgtcgtgcaaagaaaagacatggactataagcgactgacgccattcgctaccccaggtgcttcttctgacgacttgcaaaagaattcgtatctttcagaaccggatctagaaacaggggctctagtggaggaagccaagggctcgaaaatagacgaagatgaggaagctctggatatgcagactgcctatcttgcaaataatcagccaaagaagatccaaaccagactggcggtgtcgtcgatgatttcatatgtcaacgacaggattctgtcgccggagatgatgagggcaatggtgatcctctacattgggcctcacaaccgccccgactttaatacagattatctactatctccagttcttgcgcccgaagccctcctcgcccaattccccaagacatatatcatcaccggagagcgggatccattggtggacgacacagtggtgttcgcgggacggctaaggcaggcaaagctgcgtcgattccaggagcggcaggaactaggtctcgagaaatcgcagcgcagattcaacgagaaagactatgtggaggtttccttactccctggaatctctcacggcttcatgcaaatggccggcttctttcccgacagctggaagcatatctaccgctgtgctgcctggattcagacgctagtggacatggcaaatatcaagaagtcatctcccagcaccagcagtcgcaacctttctaacagtcatacctcaaaatccgacttcaatcaggctactcgccctagccacaaacgcacattgactggtgaatcctccgcggacgaagataagccacttgaaatgagcatagggaaaatgggccctctaactcccatggtttgcaacagtccggagggcgacagcgatggtcatgtacccaccccaatggttgaggccgagactgaaccgaggtggaaaccgagcagtcaccccggactagcgacataactacctccagcagtaaggcgggacgatcaaaagagtacccggtggggcgcaggccttcgaggcaggcatgcctcggtccacaggccttggcagccggcggacatttgcaccatcaaacattaacatcgcccctgattgggtcgtctgaccctcgggagtcccatgcggccgagagagtccatttttgtgcagcttgtcgagttaggaggaatcttctgcgcgcccgatgccctgctcggtgccgtcttattgaccttntctagcgcttccctttcactacttttccttttttctctctctatccatctatactctaatattctttcattncannacttccttctctttctctctatctctt

SEQ ID NO: 8554 - DNA, 781 bp, Emericella nidulans
gctggttgatacctgctgctacaccttgatccaggctggatttcctgggtgggaaatggctctgagccccaaggaattgctcagccagttccatgcgaggggacaaaacttgctcctgagccccgtcatgagtggcctccgcaaattgtcccatgatgctctgaatctccggttgagaatcatcatcgtttgcacgctccttgccattgtatgctttcttgtcatcgccgtccgggacgtctggcagctctttctccgcccgatcgttaataccggctcggttgacgtacggctcatccttttccggtggaggaggcggactcgcacttgtgcccggtatagattcctgttccgttctatcggctgctattgagacatcacccatctgctccgatagagcggcatctctctcagacgcagtgcctggagtatccatgacagtgggtatgtccgttgaccctcgcgttcgggggtctgacgcgctctgagttctctcttttgtctgatctagcaaagcacttcctgtgctatctgttgcggtgatcgcattctgaatgtgctccggtgattcaaggccaaccgacgtcacttgccgcccagcctcgtccccctcattgggcgtctccgatcgagtttgccctggtatactgggggtacggggcgtctgggatacctgaagcggacataagataatcacatatattgaggggaggaaggagaggaaagattctacgaggagcttctagtagttcagacggagcgatggatcaggtggcagtta

SEQ ID NO: 8555 - DNA, 690 bp, Emericella nidulans
tacttaccgcccatcccttcacctttgaacctctccctcggtaccgtttcggactttttcctgctctggccgtgtgccacccccgtctcctctcctttcctaatcctcccctgtactgttacatacttacatacgggccttcccaatccccccatatcaaatctccaccgaccccatcgaccaaggtctatcttccttttttcctccttcgctggatccaccacaccttgctattactactcatcttctccccatattttcacttgtcttttcttcctcccgacgaattcgcgtcctcaccaccaacaccctcaccccgtcaccgtatacacctcccaaaccggccatatcacaccgatactccgcgaacagcaccccagcccattccggtggacccattttaacaatcggccgttttccgtccgttctcagacgtgtgcggaatactcgaattgtcacggccctctgacctaagactttttacgaacttcgtctctcgttccgctgtttttgtgctgcttctcgcggcacgtaaggtgccacttgcagcttgattggaacagctgcaacccattggctgtgtcgacataccacgattttcaatctgtgtatcggacaaagcattaaaaaaaaaacctagagaacatttcgtctgcaccactgtcgcgccgtacgaccacgctcggggga

SEQ ID NO: 8556 - DNA, 551 bp, Emericella nidulans
gaattctctccagaagcgtgtcggatatagatcgggtagggccgcaagaggacagagtacgtgttggtgcactatggagactggagtctccacatcgatcatgatgcgcgaactccagttccccgaccaagcaatcgattattgaatatgatcagccaaaagccagttttcagataagtgctctgatagccgagtcagtctgtaatcagcagatgttgaagagcgatcgccgagattcggcagcgcttgcatgtctgggaagctgcgctgcctcctaatttcggatcttaaaagtgcaatatttggagcaggaataccaagagcctgaaacagagaagcctgctatggtttccaatgatcacagtaccgacttcataggaaatttggctacgaatgcagcaccgttatagtcttgaaccatgagcgataaccttgctcatcgctcacgaacctcttgagtctcgcatgaatatttacaaactagactcgaactggagtatctcatgagcttgagttatcctgtctaataagatagatgcctgaagaataga

SEQ ID NO: 8557 - DNA, 794 bp, Emericella nidulans
aaggaagagaatgagcgtaatgaagatggcagctacaatgagcgcctttcgaaaagtgagcattgctgcagatttgcgacggtgatttggtggcgaagatgcagttccaatccgaaatgctgaagttcacccaaccttctcgcggcccccgatcagcagccgtcaatctccgcgatcaagccagccagcttttgaatccgttcagtgttgccttcactgagagaccccctgacagccgttcatgtctgctcgttcaagagttcagaaattggtgggagcaacaggcgcaatggcaatagtcgtggttgaccaggacaaaggctccgctatactagcgcgtcggaagtcggcgagctcaaactgctcggctctgattagataaaggaccaattgaccagcaatgggagatcacactgatttaaagacagaacaaaaggaaagcccgcgccaattcgcagcaggaagcacaagaagatattgaaagggtgagaaattggttaggcctgacgtgggccgctgctgtcgtaatgccgggcaagaagcggcggacttggaactaaagtggcgcccacgccgcgtggaagctgcagttgcaataatgcttagcactcgctctgaaaccgcgaacactaatcctgataaatcctggcggtaatcggaacgccaacttagtaccgtcttgtgaatctgccagcgagattcaggggctggaagtgttttatacctccaactgtgacatccatgtcacttgtgagtccgcaacgagccaacctgcccaccgaaagacttagcag

SEQ ID NO: 8558 - DNA, 742 bp, Emericella nidulans
ctatctcgagtgcccgctctccaccgcataggaaaggggattcctcccggttatatcggcagcatcggggtctgctctagctctaagcaggagtcgagtcatctctggattttccttttcggcagcgcgtgagagtggcattcttccattcctatcaacaacacttggattggcacccgctctcagtaacatctttactatctctggctcctcccgttcgacagcacatgacaatggcgtttgctcattcgcatccggaatgtctggattaatgttactatgcgctagaataatctgaaccattacgtgatgggccatttctacagcgctgaacaggggcgtttgtccggtggagtccgcagtatttggatcaaggtcggggcgtcctataagcaacttcactatctcctcatgttctttatccactgctcgcgacagaggtgtctcctcttcgggacttaggacgttggggtcgacatcgtcgcgcttgagaagcgattgcaccatcgctagagagttcttttcaaccgctcgactcaacggtgcgtaaccgtcggtatccggcttattagggtcaacgtcgctgcggtccagaagtagttgcacaatttcttcctgaccttcattcacggcccaacatagaggagtaagtccattgggatgaggggtgttgcattccagatcgctgctagacaataacaacttgactatctcctgattcccttttgacacagcgccagac

SEQ ID NO: 8559 - DNA, 1126 bp, Emericella nidulans
cttcaaagttggtgggtatgccttgagattttttgcgtccaggttgagacttgtgacgcccaactgacgcatcgtgttcagcatgttgatatattcccgttcctctgccatctctcccatacgacgagtttcgtcttcagtagccccatccgcccatagacggtacttggtggtaaagttgtaaaggaaatttttgaacgcggacatggaatcctggatggagatattggtgccccagatcacacgggtcgaactaccgcccatggcctctgcttctgaagtatctgggtggatattagagaaggttgcatcggattgaatctcgccatcagcggcagggaccccattagcatccacaaagaccctgcgtctgcgacttggtgttgaaccaaagcctccagaatataggtcactgcggcgggaggcgatccgctggccgtccaatccctgtcgagatgatacgaacaaaccactgctgctgctaggaatattggagtgacctgtctgccggccgaaagcgcgcgtaggactggaactggatacgtatcgaattggtgaggaatctggttgcaaacattagcttctcctagctatcgtttagcaaagccatatcttacctcgaagcgcaggcccggtagcacgcggggttgtctcgccgtcatccattgttgaggaagccctgatgggtgaactaggctcttccattctagcatctggcgtttcagcgctgctgctgttgccccttacgggtgatgactgaaagaacataggggacgaggatgggacagcagcttcgccctgtaaacgccgagaagcacgaggtgtcgcctgcgaattgctggtttgcgactgctgctgtgagcgcgttgagcgtgttgagcgagctggtgatgcggtagctgagtccctcgccggacggccacttcggcgggaagaagcgggagaagacatggtattggtgatatagacagatcagattaatgtaacaacattaaaagtattaaatgtaagaaaaaagaatcaaaattgaagacgtcgaatatgtggtggtgtgggggttctgcagcaggaagagagatttaatgaatggaaataaacctgagctccttccaagtcgcagaaattg

SEQ ID NO: 8560 - DNA, 904 bp, Emericella nidulans
caaaggacgggttcaccgataactcgcagccaggaaacttcgtcctcacaagaaacacagcatgggataatacggcagtaggctttaaattcggtacggccgtcgcgactctgacagggaatattgcggcgtcaaatggggaggctcccacctcattgagcgatgagcagatctcggatgggaactcgtgggatggggatgaggattgggatgatgggagttttgtgagtgttgatgtgtctctggtgcaaggagagcgtaacgcagatggcacgatcgagccgagtggatttttgttgccggctgatggggaggagattggcgcgacaacggattggagtgcttaggactgtaggacatctcctgggctgcgttagattgctatttttttttttctctccaagtcccaaacgcgttgttattacttgtctatatagagttcagtccccgctgcgggttcggttactcaggagaaatcctgcagtcattatagctaccacatgcgagccgtgggaaaggaaggctcaaagcgacatcgttatgccttataaacttcacctagcggcgatttgagaacagtgtcaccgcatgcacatcttcatcggactctgttggtactcgagcttatacctatggagtaagttagtcctccgcgaccaccacatctgactctgacacgttcctcacaagtacgcggtagtgtgagtgccaaatttattggtcttagcctctttcagattaaccgtggccgggacccatggttcgcttcttgttgggttcaggtcggtgtatacgagccagcgctgatccctcgtatacagtcctaccctatgttcgtcatcaattccgaatgcgttcaggtcagtgcagacccatgccttgaacgtgatgtcagaaacacctt

SEQ ID NO: 8561 - DNA, 161 bp, Emericella nidulans
  unsure (1)..(161): unsure at all n locations
caatgaagcactcgacctcacagctgcaattgtaaaaaaccatgtccgaggagtaatacccgaggaacacgactnatgcccactcgtcccagacttcagaggccgtgcaagtgtttcagacagaaacgtacgaaatccggggcggctggatgatgccgagc

SEQ ID NO: 8562 - DNA, 112 bp, Emericella nidulans
ctcgacgatgttacttcttcgtacaagtaggtgtctgactagactagccagccgcgtgcttctgtacactgcaaatggccgcagtaacgtgcgattttgcgcaccagattgg

SEQ ID NO: 8563 - DNA, 426 bp, Emericella nidulans
ggctatctcgtgtttcaacgcttgcaccatgctgttcttgcgcttgtcaaattcggtgcccttggttgctgatgggatctcgacttgtttgacagccataagctcaccagtaatcgagtgaagtgccaaaaacacactgccaaaggaaccctcgccgatcagtgagcctttcatccagttgacgaagttgttaccagctaaaaattctgccaatccatcgtcttcttcctccccgtcttcagccacgagaacgctcagacgctcattgaaagagccgccatctgttgcagcaacacttgcattctcatcgagaaggctgtgacgtgaattgttagggtcatcggatccactatcgaacgacacgtaggactttcgattcggctcaacaggtgattcctcctgaaggggatggagggaactggatgc

SEQ ID NO: 8564 - DNA, 1034 bp, Emericella nidulans
cagacgaacaacgcgcgatggtttccagtcacccacacgtccaccgcgctgatcgccgtggctatcctcgcaggtgtactcatagtcgtcgtccgccgtctcgtcaagaccgatcgccaggccgtctttttccagccgacgtctctcccctgcggggttggctcgaaccactggggattctacacactatacggcatcccctttgtccggggcattgccattggcggactgcagctgtcaggactagcggagttggtcattcttctgggatgcgaggtctggatcctgacctggggttcctggaacaggcagacggggttcaccgggaggcacgcgctcctgtcggctgctagactggccgcgctggggatgagcttcgtatttctcgtcgaggtcggggcctctgagcggacaaagtcgatagtggcgtactgtatactgtccctacatttgaccgtccttatcattggaataggtctggactgtatctacaaacctctcgggtacctctcgtacagagtcggcctgcttgattcggctccaaatgagcatagtaggtcaaaggctccagtatgtttgatatgctccacaaaacgcaaaaaagaaataagtagacgcgacagctggctaatgtatcctttccaggtctttggtatagcgcaactctcgcataggtcaacgagacgtttttcctttgcccatctaccggctctcgaccctgctcccggtgaacatccctccccgccctatagacgacactctcctcgtccgggttcttcagggtctcagttcacatatgagagcaagtccttcttccggccacctcggtgtaatgcacctctatcttcccataacggggctgtcgggcctacccgttcaccggaaggaagcgacaggtccagcgaatcgaccatcgagtcaatcgagttagcgcctctagacaatatttatgaggtgatcaacagcaccgagtactattctcagcgcgaatccgatcagttctaccgcccgcgcgagcgagatatcaccgggcc

SEQ ID NO: 8565 - DNA, 533 bp, Emericella nidulans
ttccagagtttagagatacacccgaggcgatgcaggtgcttatccgggaagcgacctcgggtgcaatggagtgggctgggctgttgaggtgtgtccgggttgtcggggataggatttatggttcacaaagcaagatggatggcgatgagcgcgaggaagcgtatgctacagcgagggctctgagagcttggtggaatgccaggataagcagtacagaggagtatcttgttgagcgggcaactggaggcgaagagtgtgatgctacaagtgctagaaggagtcgaccgcggctgcgaacagtactgcgggctttacaagagttggaaaaaggaggaggatctgatgtgtctagactctgtacttcccaatcgacccaacaaccgcactctgtctcgagacgagattcgatgatttgttctggtctttgcattactatctctaggtctctgttgagtcatatgagagcaattgcagtatttgcatatcctccaaggttttatcccatcgaaagtgagaagaatagattgaggctt

SEQ ID NO: 8566 - DNA, 903 bp, Emericella nidulans
acgttttgtactatacctactctggtttcgagcggagagcgatgttactagctactggaaatgtacatacatagcatgcgctatatcgtcgcgaactagttttctgcatattgaccacctagataagatcgtgcaggagatggtgaacgcggagtaaccccgacttgcaaagatccttattgaagtgaccaaactaaagcataagagctctaagacttctcttatttattattgtttatgcttattactaatgatttttctatcctcgtgtcaccactaaaggcatcgctcgctcgagccatgccatgcgcctcaaattgccaccatcggcgcccagctccgctccccgcttctcctgtccttttccactttccagtttcagagcccaccgccgagcctccgcacatcgtcaaattcgcggagaccccgacttcaaaccagagccgtttctcactctagctttcagaccagttagcggtcatatctctataatattccttctttttactattcctcaggctttacacatacgcagtcgcccaggacaaaccgatctcgaatgctgtcgctccgccgcagacgttaccgtacggtatgcgatcccgcacaggctggtacgtgtaccccggtcaatttgcttgtggttataccctggcttttagccgcatagccatgcgatgccttgtgttatagcttgagatgggcagatttagaaaattagcggctgacatgtgatgggatgcgcttttgcatcctgcgtcttaacagtttgacgtgccgcacccgcaaactgaaatgtgagtgtccttctttaccagtttgcgctcctttgatcactcaagaggaatgaagaaaatataacctcgcggtggactaggcgacgagcaaaaacctgtgtggtct

SEQ ID NO: 8567 - DNA, 193 bp, Emericella nidulans
  unsure (1)..(193): unsure at all n locations
ggcctcagtgctaaaccgtgcatccctaatttcttatcagacgttggcatcagctactttgctgctgaatctagnggcgtacggcgctcctgtcgatggattggtgctgtctccgtagacgggatgttctgctgagcagcgtcggacgtcatacgtatgtgttccgtggtaaactttcgcctccattcgtcgc

SEQ ID NO: 8568 - DNA, 893 bp, Emericella nidulans
tgtaccctgccggcacccgcccgatactcgctgagagagccaagggatgttcctcttgtctggtccgccaagttacactaagaggactgtctctgtttggtagtagttatttcgtatgtataggtattaaaacatctttacgtgctggaaaggcttcaaattacgcggtacctgggacctgatagaatcattgagctgaagacagaaatatattatgtctgatgcaagtacgaatatcaagggcaatactctgaatatgttttgaggtttccttgctttggcttacgtgtactttcatattttatgctctttgttcttttgtttgtcacctcacttgttgctagatgtggctgtgctgaagacgattctccagactaagaggtattctgtaccttgataaactttgatgctcatgccgatcatgacatatccgagaagcggacctcctgggcaatcagtgtgtcaggttacggatcagatcgacaatcagtatggagtagtggcaagggtctgcagcaaaagtactagataggcgcgtgcaagatgacgagttgttgaactcaaggctctatatgaggcttgatattgcctgggaaactgctgtgagttagctgtcgtctatacaagggtccaaaagttgatcgatcaagtatagcaagagtatccttgtctcgtcaaggccagcaaaacatcaaacctacaccagtacactttgctctacagagtatgcaccgaaattttagagagcagcgccatggcgcgcctgctatgacgttaccgccaagagcactgccttctgttttcattttgtagttcataagcctacgccgtactacatcaaatgtcaaacaggccgttgtcagaaaaaatgatgttccgatgggatagccgta

SEQ ID NO: 8569 - DNA, 797 bp, Emericella nidulans
cacgaccttattcggataacgcccttagcacttggcgtacaagtagatctcgatcggtacggtccgtttttatatcattgcgtactcccaagccacaaagaatttcgaccgtagcaacaagtggccggcagctgcgccctgcgttagcgacttgagccctatatgcagaagcattgagactgggctaaactcacttgagaggtactttggtaatgggaattacagcaacagatattataatgcaaatagataataactgtggatattcgttcatcgtcaacacgtttgctgtaacttcatcccgaatcgtgtccccgaacatcatccaacccagaacggccatcgcacaatccagggaatactgccataagatgctcgtcagcataatgtcgatgaaggtgctctaattttgcttacagtaaagatataggttacccagaggcttcgcccatatttatgcgggtgcctcatatctcggtatatgttgggaaatacaccgtgcccgccccaaggcgctggcaaggtttagccacaattatccgcaagattaaacaaaccacttacacatgataagcccgaaactcaagggcactgtaccccaattctcgggtaggagatgggtttgggctggttcacgaagtgaaccaggcgcatgaggcttgatgaaaccatcaatgcatgttatagccacaactaaagcaattagttgggtgttcgcacaattcaggagaaaaggaatcgacatactgtatgtacaggagagtataccgaggatactcgtaaaactcaaaaggcgt

SEQ ID NO: 8570 - DNA, 1017 bp, Emericella nidulans
gtttgtacacgtttggtgattcagcaactttagtattctcggggcctgcagtttggaagccctgcaagagctcgcagctgatctcatctgccattccctggagctgagcgtagctaagctcgacatctgatttctctccccggcttgcctgttcgagacgcagagcgtgggccttacggacagagtcccggttgtgcgtggcgacgatcacactgacggggggaagctcggtggtgtgttcagccgaagcgggctttagcatgtggttgtatcgccgggtaagaagggcttctacaatcccgtcgtagcactcatctgtctgttccttcttggcccagatcagatggcggggttcggtcttcaagtatgctccgcggaccagcttgactccaagcgtgtatccttccttgcgagagatctcgagatggcgcgcgagtgtggccggagtagagcacaggtatgcttggtaggtgttgtagaagatggcgcggccaggggtgcgagagttgcagtatttctggtacattgtcgcccactcttcgatccctggctggaccgcctgttcctccgcgtctaccagtagtcgcacgttccgggagatcgcaagatcgcagacctgtttgattgcttcgtccataaacggtgaaggcggcgcctggttctggaggtattcgagcgcttggatacccatgcccgtgaatctgactggttagctaacgtcgcaactcaagcaatagaggactcacttcaaggctacaaagtcaccctcctgggccatgtccacggtctggagggtcccgtccagccacgtctggatctcctgccggctagcctgctcatcgcgcgggtctgtcttggactcccccactaggactttcacgggcatagcccaagagcacgccgcggtatcctagctccttgatcgcattgatggagcgttggacctcaagcttgttctcgcccgcattgaactgtttgtagatggtgttttcacaagcaggttcaatagcgggttct

SEQ ID NO: 8571 - DNA, 1703 bp, Emericella nidulans
  unsure (1)..(1703): unsure at all n locations
ggctatcagataggtagatcgacagatattgtaatacaagtatagaggtaaaagagaactataggtcaataaaattgagttaggtagcagtatctgtcttctaaggatggcagggagaagatttgtttattaatgatttcaacaagcggtgcgcagccccttgaatcggggtcaaggctgcgacagaagagtctgagtgctaaccatgtgccgtggaggctcatcagagagggattgagatcctcgcggcaatatggctgataatgaatcatgaatgatataggcttgactataaggttctgggcttgatgtgcaggattagagcagtagctgaatccctaaaagcgccctcaggtcattttgtaaattcaatgctataggtgttatgttggtacttgtcttattaattattaggtggctactctctctgctttgttctcgaggtcagctaatacattcaatttgttggcagccctgcaactctcattcatggctcatcccaggccaggaaccaatgataatttctagcaaacagtgcagaattatactcaaactggcaaacaagaaaagaagaaaagggatagctggaatatgtggttgctctggcaaggcttcgcagtttgaagattgaaagagtatttcgacaaaggacccccaccancaatcatcgaagctagatgatatatgccctaaatatggaaaggctgcggtcaagtgcagacgtgtcaagccagctactagtgcttcagtcgttgcatggagatgcactgtgctgtggttggacggctgccagcctcatgcccagtcttgctcagcatccaggcagtgggacttgagagaagggaagagtaggaatgctaaatctggcttcggacctgagtatgtctgttgaattagagtgataactaattatgtagctgctaatagatattaattactgctgtcagtccggctggtcttttactattgtgggcagaggcttggcagggcagtccggtaagactagccagtagtaagagcttggttactgagagctaccaggtaatgaccagcttggaaataaaatcacgtcatatagaacccagaatggactttagggaggggatagacttctaacttggccggtatagcaactagataggtgccaggatagccttaaatagaactagactgactttatcgaagaaccaagttcacagcaaaggcgatgaactgagctgtgggtgtactatctactattgcatgccaaccccgtgacttagactaattttcagcatggcaaaaattgctacctgattatgcctggccatgaaggctaaagagaccggaaaaaaatctggcacaactttacttgaagctgtgccaagttagccctggactagaacgggggcccatgggcaaaacttgtgtagttgttggagagtaggtccctgattatttatggttgggtttaataagtgagcaattttcattaccgattaagactaactgcccccctgcttgtggtaaaggttatatttcaggacctaaacctcgtatctttttgggacttactaggataataaggtgaggaggcatcccctccataacggtaaaaaaaatttcccttaacagaagggttttttcttccctagttttttcccagatatccacgcgtttcaattagaatggcacacacctcttgtaaatttattcccctttat

SEQ ID NO: 8572 - DNA, 591 bp, Emericella nidulans
tcctgctcgatctgcgacgttgtgtctgcgaggtcccgcgagccgacccgagtggtgaactgctgttgactcacaccaaggtagccagtccggacgtaaccgagaatcttcttgccctgactcgcagcctgatcgatgaccgacttccagctatcatcgaccacgtagtccgggctgttgagaacgttcgcaaccaagacgctgaccttgttagtgtcgtacgccaggaggcgctcccacgaggccgggtcacccagggggttgatgtacgacgcaatggcaatctgctggccccaatcaccgccaggctgagtttcagggtgctctacccaaagtaggaccacgagtagtcgttgcattcggcgcctgtccctaagaaggtcacatattccaggacaaagacctggaagctttcgcgcaggctggcgccgccggcctcgcgtcctgcatgtgcgacctggaacagcctgtagttgaccttgtcctggaagctgctgctgtcgagttcctgttggaggttgttgagcgtttcctggaagttgcccgggagagctactctgtacacgcagtcgtttaatatactatttgcca

SEQ ID NO: 8573 - DNA, 786 bp, Emericella nidulans
agacctacaaggccagagatccgacagaaatgacgagcagtggagtggcccagtcatggagtgacgaatgcctctgcctaactaagaataaccacaagtccataagaataaatctatccactcaagcgaagcaggctgtggcctggggcatagcatcatcttgagtctcagaataatgcttagtctgcgttagtagttcaatgctaataataattcagtcaagaaggccggtatggctgatagccagttgttgttgggcttgactttaactctccgctcgtcctccactctggcccttctctctccctctcgtcctccctctcactccctctttttgtccgtcccctcttcgagacttcaacaactcatcccgcttcgtcatttcgctcgcttggttctgcttctctctctctctattctgtattcctgtatcagctttgcagtgcagtccttcgcaccgtcctcgctcctcgaccctcgacttcttcgactcccgcctggccctggatcatgcattctccgccccgtctccgaccgcggccatagtcaacttggcctaacttgtccgtcccatcgattttgggacgtacataatttcctcaatacttctacctgtttgctcgttcagctgcgaacccgctgttttgagtcgtcgtgctgcccgagcttccaactacgcaagatagctcttccgttccacccacgttcctatccgccttcctccccacatagccgctccctttcggctcgatcattgacccctgagtcgcccgtcagaattacagt

SEQ ID NO: 8574 - DNA, 531 bp, Emericella nidulans
aacattattgatgcaggagcagggggtacggtaaacagccacttattacggagtacggaaggagcgattgctcgctacattgactcctatcagccccttcatcgtcagctgctggccatcagtcagctaccgctcatcagtcagcccttgcccttgcccagtgttccatagacagctggctcagtagagccgccaaagatatggcacctcgtttgtttcattgcgtctggaccagtccggggattacggcatctgccaatctactcagagtacaggagaacggtcacgaaagtattacagcaaccgtgattggtcgaattcatgaactgccttgatcttcactcccaaagcgtgatcagttcccatgtttccgaaaacccggatgatagccttcggcctccgcttagcgtccgcgcgccaagcagcaggaggattaggatatccgaactttcgggaaggctctttgttttttccgatagtattgtcttcgcgcgatagtttcgaatcccaggttccagccaaaattgagtt

SEQ ID NO: 8575 - DNA, 962 bp, Emericella nidulans
ctcttgacggtcgtagatctttttctcccttctcttcttctcggcccccagattcttattctccaacattcgttcctttgttcattatctattggtccatgaattgacccgaatcctgtcgtttttgttcgaaatccattgtcttcgtttatattctcctcagacactctctggttagactgtcttactacattctttaaccccatcctaacatttcattgcccaatttaccaacatggacggaggcaccgcgcactctgcacctcccgctgacgcaggccatgctgctgctcatacggatggtcctgctccagtacaggcagagactcgccatgccaacaacgctcaaggacaacacagcggccctccaagtgagaagagctccagccctggacgaatgacaccacggcccaccttcttggagaaccttgcagactctcgtgattcccagttcatgctcaaccggcgcgactctgatgatctggatcggtactttgtgagtctgaataatacttggaaacgggagacaattgtactgacagatccgccttgctagcacggcccgcgagacctggacaaacactcgaaatggcccatcatgatgcggatgcacggcagcatcatgccgaagatgatcctccccatcaccttcgtcgccggctggtctacttgtataaccctgatttcgcgctttgtttatagacgtcagtacccgatctaggatggcttggtttcttagctgaccgaaaccagtttctgttgataatatcctcctcaccgttctcggtttcgtcgttggtttgtcactttcatttcgaagctctactgcctacgaaaggtgcgcattactcctatttgacatcattgagcacgcgactgactactgtcaagatgggcggatggcggaagtactggtcgttgcttgtgcagacgtctcgtaacttgtcccgtaccatttggac

SEQ ID NO: 8576 - DNA, 112 bp, Emericella nidulans
  unsure (1)..(112): unsure at all n locations
gccagattcttccaagcgcataaccggtcctccgcgacatgggtctccttccgactggatgaggacagtcacgccgaagcgatgctggagangacccatgaggacctgcggg

SEQ ID NO: 8577 - DNA, 1866 bp, Emericella nidulans
gagtagaatgaataaaaaagagcgggtgaagaggaagtagagtataggagaggtaaaaagtcagaagaggtggggaagagtaatgggaagaaggggaagaaagagaaaggtataataaagttttttggagaatccaaaaccaaaagcaggccgagacaattttagaacggtgaagaaagcgaaatgtggataattagtccaagtaaggtggggcggtgtttagggggaaaagcaaggggacaaggaaattccaacaaattttttcggaaagggtcagagattaggaacctagaagtggcacatcgaatggggtgggagcaggacgttattgagaggagggccttttcagataccaaaatccattgatcagagtactataaaaggttgagacatggggccccgcacgaacaagagccatgatggttagagatggcacatccacattggttaatgcaaattaagatcggcacgcttttcgcaggtagggaatataggcgagggacaagctccggtttgccttgcagtaggccagcgcacatgcggtaccccatcccgtaagtgaacatgggcgcatcgggttgctcaagccagcgctctggtctgaattcatccggatcactccatacttcggggtctattatccaaagtgtgagtacagatatgacgtctacggcttgcgtgatgaatgggatcaaattatggaacagatagtgacgtacccatgttgcaggcccaagcattcaggaagaatacagttcctttaggaattaccttaccatcgtaagtaatatccctaattgacgtgcgcggcagggccagacgaagcacagtgtaatatctgtagtggcgtctcagttaaggataccgacacaaatacgaaggcaaagtgagagagaatactaacctgagacactcacggaccagagcggcgacataagcgcatttttgatcgtctgcagggtcacacagcggttggccttcgctgtacatttcctgaatagctttcgctgctttgtcttggatgtcgggacgctgagcaagaagagagatactccaagccacgagagttgtgacggtatcaagaccgccagaaagcatggttaaactaatagaggtgagctcctcagagtttaacttggcctccttgtcaaggattacgttggcctggatgcaaggtttgtgggtgcccttctccattcgatcgtcaaggtcccggttgagtgaactgaggtacttgtcacgcctgtctctcatctccttcgccttgtgagagttgctgctaaacgggttgagacgcaggatcggaatataatcctgtagattacccgtagtacttctgaatttgctgattttatcctcgacttcggtgatctcgtcaaaaagttcttcttcctgggatgctacacgtactccccagttcagagtaagggcaagactcaggctgagacgctgaatcatagccatgggatccactggtgtcttcccaccattcccatacttgaaaagctccgctacaaacgctttggactcgacgtccagatgatgcacgtaagactcgacggagggccgattgagagccgatgctgcgccctttctgcgcctcttcagcgattcactgtagggagaagtaccaattgttgtaccagctgtgttcgagacaatctgtagtaatatgtcagcagccagtcaagcattgaatcgagaagaaactagcaggattattctgaacacactttatggaaagtatagaactcaggcctggagcttagagcctgtgcgttttgcccgaaaaggacaaaaaagctgggcagagatgaccactaagacagggatatttcctagctggagttatagccaggaccatat

SEQ ID NO: 8578 - DNA, 1098 bp, Emericella nidulans
catgctgttccgcgccagagcatgatgggaatcatcatggcgttgattgggatgagcatgtaagcattggcacccatctcgaatacatgtgctgaccctatcacaggtatatgaacattgttcttaaaaatagatgagctatataacctgaaaatcatacaataatatttttccaagctggcagtcttaacgaaataagaaaaacgcgatacaagagcaaaccccacagcttattcccccttgcccgtaccgtggtaacttgaaggcttggctaaactttgaggcacgcggccaaaatggagccacggaaacgttgcctcaggacgagagactgccgcaccagccagattggaaccttcatgggaaactaaaagctcagcctcatcgagtagcagataaattgactttgctgaaccctcctgactccaaattggataaatgtcattccaggtcactagactcagtacgaaatggtcatgagcggaggcaatcacaaagagccgcaggcactcaccatacggagaagggctcaggcatacccccgcagcccgatacgagggctttagtgttccgttataactgctggatcccagccaaccagcgcaccacgagcgatggcattgactcgcttccttccgtgaatacgaggtgccaaggcagtgttagttgctagcactttgggtaggtggtggcggtgtcttagcagttcagcctcgcgtccagaaagtgcttataaacatccacatccacatccgtgatgaagtggtcgtgcctggcggtcaagcgcggtagtcagctcgagcacaaattccagcatcttggacaatgacctcacttcggggccgctggcctctcctcttcctcttttgcatcagcctttttactctgtgcgatgcctccagtccaaaacgccgcagtttgttccagccaattcagtgcaaaccgcgccaaaagacgtccgaattgcgcggaaactccagtattgccgacatcgcagccagagacatcttcgatcccgtcaaaacctctcttgagaaacgccagtacacatgcccatccggctattcgctctgtacaagtacgtctcctgtcgtattc

SEQ ID NO: 8579 - DNA, 1040 bp, Emericella nidulans
tttgtagggagttgaaggttgtccgcattaagggggaaaggaaggtcaagaaaatcgagtatcgggatgtagagactttgagagatgctgaggaggatgaagatgaccggagaaacggatagaattgcaaaatggaagaactcgcgaaggctggcctcggggcgctattatcaggatgtttgtctgaataagaccggatctatgtattaatcgaagttgaaggatacggagattgccatcgtgtgcattgctagactgcgctatcaagaaaagaaggttactaataatcccagctgaaggaagccatgatgccaatctatgttgagaagcttgtttggaactgttcccctgtatattttcaaagcgtacttgtatcgctcgcattgtccgcaatcagcggccgatgcacttcccggtctccgtcaacaaagccattgacagcgcccggatcattgctcgtgaccagctcacgaactggaagccgagatgtagtcgtccttagttcgctgcagctattaggacttagcaaatgatactcgtcatcgtgctccccgacctgatagttcccaccgtggtctcgttgacagatgtctcatcccaggacatcaaagcgtcgtctacctcgttctttggacaaataatatgcgctgggtcgtgagaaagaccgtcggtagtagtggcgcgtgctctgtcagcaactgtggcttttgagattgaaatagcgtgaaggccggcagttatcccacttgtatttgcattttcgtacgctgcgctgccaatctggccgacggtcatcgactccgcgtttgtgctaggaaatgtagcatagtggtcgtgattggtggtgatcgtatcttcataaggcgtacgatacttgttggtggtgtttgcattggtgattgcgagacacttgcgtgaccgttcggaagcgtaatcctatcctccaacccgggtgcatttgtgcttaactctcctcgctgctgtccgtcatgtctgccagttctgttgtatcgctccctgcgtccacgtccgcgccctcg

SEQ ID NO: 8580 - DNA, 191 bp, Emericella nidulans
  unsure (1)..(191): unsure at all n locations
ccgtccttgagctcccgtactgttcggtgggctgaccatattggcacagtgtcgtgaacggagacgtgcattgcagcagatggaaagctgatgtccccgcagattgaagaactgacccatcccgacgcttnacnaggaccggtgtggtacggatgaacaccggctctgcatcatgcactctcctgttattc

SEQ ID NO: 8581 - DNA, 208 bp, Emericella nidulans
  unsure (1)..(208): unsure at all n locations
agccgactgctcgagcacatttagtagcgcgaaaagcgtacagcgaggcatacattgtctcacagtccaatcgatccgcgtattcgagactcgtacgtcgccaactgacgctcactttcgtgccgaatacttgtcggcctacattgagatgtgatgcgnacaacgtcgaacgcttgggtctatgaaataattcaccatgttctgttgg

SEQ ID NO: 8582 - DNA, 1441 bp, Emericella nidulans
cgtatcgtaggcatccgttgcgtacttcgccaaaggtccactatcgcgctgtcgggccgcattccaagctgcagattctactgcgggcagtatattcgaactcgttgatttctaccgaggggctattttaacagccaagaagatggacttgaaatttcgcgaaagcttaccggcaactatacatgatatcgtgctcaaaatatcagacgatgaagcggagccgagaaagcgaaagagcaagaagaaatcactgggaagaaatggtctttatccagaggaaccagactttatccacaaatggtggaagaatcgggcaatgacagaaacaggtggtttaggtgaaacctccagggatgcagaaataaaaaagcacgtttccgacttgcgcttacgggaaacgcagctccaaatcctgctgatcctggaaacaattgcgcttgagacggccgctgtggacgaagcaaagaaagctggccaggaagcggctgctgatgcgtctcagaagccgaagagtaagaaggctcaggatctgaatgtaatgcttgaactccatcttgatcgtctttgcatctggcatgccgtgagctttgacgatgcgcctgtttccgagtctcaggcatctggaagtgcccaacaatctagtaaaggcggaagcgacgcgatgagagatttctgcacagaagtcatcataccgttctatgcttcgcggctaccagatcgctgcaaatccattacccggaaactgggggtttccgccagcacaattccggcgctgcccaagtcggcgaagaaaccttggaaagaacaagggactgttgaacgcaatacgtctcacaagtcccgccgtacgctacagcgcgttctaacagacgagcaagccacgtcgcatagccgctcacaaccctcgctgaatcggtcgatcaccgccccgtcgcagatagagagtaagcgagaaactacccccttgctaccgacagtcaacactagcgttcgaggtggtatccagaaagcgaagagagcggagaacagagaggtggacctgtttgccgtagcacggcagcacgagacgaaactgaagcgcgtgcaaatgctagctgatcagaagcgagagttggatgctgctattttggcccttcggaagccaaaccgcgagctagtggcgaaggatattgcccaagatgcagaaaagcgggcctccagctcaagaaagcccaaaaacccggttgaaatccactaggacaaggtgttcaggtcatggccacgccgagcaaagtacgaaagagagatgctgtcgtcggccttccgcccttgcctaagagtgtctcgcgctctaaatcaaaagcgacagcgcctcctcatcgcctttcacgggtgaccgcaagttatcctggatctccaataagccagctctttgcctttaaactgatgcgcggtcaagaga

SEQ ID NO: 8583 - DNA, 751 bp, Emericella nidulans
gtttgctgctctactctgctgttctgtttctgtattgtttcgctggcggggtattggcggggtagatatcctgatccctgtcagtgctgtcactgctgtcagtgcccggactatgtgtccaaatcttgcacgaatgaaaagagcatatcagatcagaccggatctcaaactcccgaaaaatatatggtactaatactgtgtttacgtagctcacggttgctcctgcggtgcttcttgccagtgccctgccggccagtgcaactgcccggtatatactcccctcctgcgcgctgactgtccaatccgctgatgggtttatgtccctctccagaagaactaaatctcgaccctctttgaggtcacgatggtcacgatgagaggggtcgatgcggctgcggaataagagacgatgacgaagtatgaatggggtggatgatagtgccttgcgatgattttgttcatagcgcagaagacgatagaatgctatcggatcattattccagcaactgttctttggctgctatgacttcaattctcaacagtagacccgttagttccttctcggtgtatactcggcgcacgactcggtggtctgatcccacttgtttatcaatcagcgccaaacaaagcagtagccaccgctctaatccgcattaatcctccaagacttctcccacgcagtaggctagtctatcagttagtcagatccatcatcgtatctccgatcatcgcttgcggctgtcgcgggttg

SEQ ID NO: 8584 - DNA, 1351 bp, Emericella nidulans
cgtctactgtggttgggttcttccagacctctggggtttccgtttcgcagtacgctagagagtcagagctctttctcgtctttatcaatgcctttggcaaagaaggctcatatcgactgactcttgctgacgagacgggggacatgctgagaaacgatgtcgaactaatactgcagtagcacgatggccatcataaacaatgacggggtccgaatcgcctagccatggattgaacatgagaatgcaagtgtattctccacactaatccctggctcaattgaggtgcacactaacatgttttgcttcccaggctgtcctgaacgcaggcgctctcggcaggaaagtgggcacgccatcgtcgatgtcctcttcggcgacgtcaatccttcagccaaactcgtctacacaatcgcaaagagcaaagatgactataacgggcaaatatgcgagtgctgtgaatgcgactatacggagggactctacatcgactaccggcatttcgaccaggcagggatcgagccgcggtttgagttcgggttcggattgtgtacgtccccttttcacctaatcttttgttccctttatatccctttctttcagttgcggtatacatatgttcaaaggtttcaagtctgacgggagagcgaatattgcagcttacacgactttcacccactccgacttgacaatcaaccccagcacagatataacaacactccaaccctatgctacaggccccattacagaaggcggtccctccgatctcttcgagcagatcctcaccatcagcgcctcaattagcaataccggaggagttgctggagcagaagtagcacagctgtacctttccttcccagatgccgctaaggcaccggttcgacaattgcgcgggttcgagaaagtctaccttgagcccggcgagacgaagtttgtcagctttcccattcaaagaagggatctaagtatctgggatgagcagacatcgaagtggaaaatcgtcggtggaaagtacggtgtggtgctggggaggagtagccgggatttcacggtcgaggaaacgctggaacttttgaccatttaatttctccaagagtactgccaggtggtttggaatgcttcaaggcctggttcttagcaagttggctttgggtggtctggtaagccatgaatgaaccaataagtgatagggtatggaagatatatacttagccctacagtgtaccaaacgacgattacacccacctttttgccgtcacttgcgacagagtagtccctaaagctgcccggcaaattggacagattgaacttccggtggaaatcaagacgagaaaagaatggcgaaatagtagag

SEQ ID NO: 8585 - DNA, 113 bp, Emericella nidulans
gagtgcgcatatgtattgcgtatgtgtgcgcgggtgcgcgcagccgcggtatatagcgccttgtctatcacgccgctcgtcaggatgttgtcattccgagagacctgcccaga

SEQ ID NO: 8586 - DNA, 1049 bp, Emericella nidulans
catcacctcaccgttggtttccttgttgatcatgaagtcaagacagaacagagtcgtctcgccaaagacctcgcttagaacatgggcgctgggcgtgccacggcgacgcagacggggatcagcgttgggctcatcagcaaacttcaagggagcagtcaggaatcgctcaaagaaggcaagccacttctttgagaccccaaagaagctaagaatggcaagtattgacgcatgtggcagactagagtacagggactcgtactgggtccgaaagcacgtaatctcgccgtacaaccgcttattgatagtgatatccgcgctgagcagaagtaaaaggttctgcttcgcctgcatctggttccggggcttcatgacgctctgcgcatactgggactctacgtaggcctggtcagagtcatagccatcatcgctatcaaaaagtccaaaacccatgtcgtcatccgattcctcgacctcctcgagatcattcgtttttgccaccctgaatgccatggctgccggcaccggcgctctattccgatgtacgctgcgttccgcctcttcttctccctcttcccgctctttcttttcctgttcgttatccaggagctgagaaacgaaatacgcgctccgatgaatggcctccctcacaagctgcaggttgggtttatctcggcgctgatctaggaagaaggcgcgtcgtttcttgtcgatagctggcacagttgacgtcggagatttccacactttcttcgtcttccggaagtctctgaacgcccatttgaagaagaccgaccatttaacgcctatatactggaggaagattgcctggatgagatcctcgtgcatatagatctgataggagccgttcacgtgccgccgctgctcgacagtaacctcagcgccccatgaccatgaatgcagtgccgtaaggcgcatgttcaggacatcggctagctctgtcaagaccgtgcggtctttgagaaaatcacgcaggacggcccgctgcttctcagtcgggagatcggaactgataagaccagatataaccc

SEQ ID NO: 8587 - DNA, 758 bp, Emericella nidulans
cgagcctgaagtcactcattcgtgatggacgacggctgggtgtgtggatgtccatgcctgcaaccgagaataaactctcgtgcgaagtggctcgacgcacccttcggtacggcgtggaagtggaaaagatatcatcaccggctgctggggactccggtcgagagatggatgttgtgtcttctgtttcctcagggatcaccgattgcaattgaaactcgttaaattcacaatcactcattggtctgtcatcggttccatccagcgtgcggtatgcgtctgagggtccgccacccttgaaccggccattcctcaatggcgatgtaaaggtcgcactgtcagggctggtaggctgtgacgtatcgaatccacggtccacacgatcaaagatagacatagatgagcgataagctgactgaggagaactggccatggaatcaggcggcacaggagactgtaaggaccaccgatgcgacgcaggtggagggattgaaacagatgtctgtgatagaatcgttgaagcagaggatgcagaaggctgggatcgatgcttggctttgcgagagggctgcgtatccgaactagaatgcataggcgggttgcccaaggaacggcgcttcttggagcgacgaaaaagcgtgcctttctcctttttgtgaactggtggagtgtggtaatggtggtggatgtgaaactcttgcgacactctacgcgactctctggcctccagttcctggctcaacgatgttgtcggtcggtcg

SEQ ID NO: 8588 - DNA, 105 bp, Emericella nidulans
gctcctcagctgcccggggaggtcgccactgtagtcgcctgacgcagttgcgttccgactccgcgccttctccttcgatctcagtgctggtctccgtgtacctcc

SEQ ID NO: 8589 - DNA, 1762 bp, Emericella nidulans
tgatttaagatgggtgaagagtgagtaatcatgggcaatatatgaagggtaaaggattgttgagtcggctggtactaattatggatcaagtctcatagtcccagctctcccttgctcaggctaatgtactaaaactttcagacgaacttcttgcagtcacaccagtcattttcttaggcagttcaagttctcttcgcttacagcatgctttacagtcttggggcaatatctaccagagtagtgattgtattctcttcatgttagttaaggttccttaggttgatggaggggctcgttgctgagattggagaaaaggagggttttgaagagggagattagggacccgaaagcagagctgaagcagatggaaggaaaattcaggacttttaaaacgggtaagaggaagattcttagcttccgcagtattcctagaagctagtttaggctcgtaaagcattagaatccatggacatgaagctaactactcctctcccagggacaggtcttaaaactcttaccaatgatcgccctgagcatatacaagatctttcattaagttagtgggactctgtaacacgccagctatctttccaaggggtcttcattattaacgaaactaccagtaaccatgccgtatgtatactgtttcttatgtctcaactaacagtctcacacagtctccgcgatactggtgttatctagctatactgacttctccagtgccctctgtctccctaacaggctcaccaccagtgaaacaccttgctgcccgttatatctacccataacgaatgcctgccgatttctctaatgtaatgactatctgaaaatatttgcatttggattagtctgcgcacagctggtgccagcgcagaccgtgtttcttgtcaaagttcatgctctcctgattgtacatggtcaccggggagactaccttctttgttccctagatatcagtaagaaataaatatagaaaaagaaaagaaagtactattggcttggattaactaaggtgctcatgtaaaagagagaataaagagtcttaatccacactgaggaatattgggaaagtgaactgctcctgctgctctattggctctgctagccaactctgtcatcattgttaacttagtggctactcaaaaggttcgacgttgcacagatgtacattataattaaccttctgttgttggtgttggttacttagctgtaagctggttggaggcatttcctttgttgtctttgagagaccagcagccccgtgcggcttggcctagaggcttatcatcctttcaatcggttgcttaagataacagcgtgcagcaggtgggggatatttcaaggcgccagttcaggtcactctcaaggaaatcaggctgccctgcactcagacaggagtgcaacctatcgtttccatggttaatcatcattggctgcatgcatcccatctgccagatcagctacatttcacagcaaaacatgatactttaccggtgtcttataccttgcatagccaccaccagcacaagcctgtgaatatgagccagggccgtatcaaaaaagggggaatgactaaggccgattgcagagaaaagcggatgcgactggcagtaggtgattattgtctgaacggatgtcagaaacccgctcccgtgacctgggatgtgctgagatgccgcagcaatgagaaatgaccgcgctgtggaaatgccatgatggttaactggcggcagtgacagccagcgctcccactggattccga

SEQ ID NO: 8590 - DNA, 1308 bp, Emericella nidulans
atcatttgcaagaaaagcaaagtgtacttacagccagagccccaatcgtttgtggcttccagactgctgatttggggtctccgctggatttgcgccatcacatccaattttctctggcgtgagacctgatgcggagagataaaggcaggatggtataccaagcccttaggaatctgttcgtttggatccacgccgttatttctgaggtaggattctggtcgagtagttttgtagtctacatctggatatgggaaccaccagcttcctaccctagatataggtctgggaagatgtcggtaaggagtctctgaaaacaattgtcattctattatcgagtaccgcgggtttgtctgagattgagaagtcgtatgggcagcaataaataagcacgcaaaggtagagttaaggaatattcagccctgcaaaatcgagtattgccaatatagttcacctgaagagccccagaaaccatttcaaggtattcccaatgccataagaccaagaggcaatgatgatcgagattagccctaaaacaacaccggcaacaacaaaaactcctagaaacaagagtataaatgtagttattgcagcgagccaaacgttgataggcaggaaccaccgcagccaggacgtgcaggtgggtatgtttgttttgcgttccgctgcggacagctgctcaaggtcagcggccgagtcagacagatgttgctgctcggatggttgtttggtcgtggtaggtttgtcctcggatgtagatacggatatggactcaaggtcttgcaatgttcttgcctggtgtagtccttgttctgttaatatgtgacaggagcatatatatacatctagttaatcggcggtagggatagttacctaagtcgttctcgagctttttctggaccaagtgctcaaactctgtcctgaggtgttggatgccatgctggctcaagtagctgcgtatatagctagctgacttggggtgcctctgaggatagagaaagacgaagttgttagctattggataagacagtggtactcaaaagacaaaagagctaagagaaggcttagggaaggaaaatagaagagctaaaaacaagaagagactggctcaaccgggtctctcattcaaactcaatctacctacttcaaaagctagattgcacgcaaaaagtagagataaaccatgaaccgagcccaactctgtcgctaggaacctcgatcaactacgaaataaaaccaaaacggccgtagattccacccagtaagccactccaccacatcgaaaaaggcatcaagtgcaagcttgataaa

SEQ ID NO: 8591 - DNA, 557 bp, Emericella nidulans
gagtggactgtggatggatgcatatatgtatctctagcttcggccaagtcttagcctgctgtgggcgaattatgccatatggttatgctgagaggaccgacattattccagtaaggttgcaactagagtagacgggcaaactcagagtctgaacactgactaactacgcttgctgattgatttggaattaatgtcccagttttgaagatgatgatcacagcactagggtactactgatgtcggccatccctgttctcgtcgagatgtggctaaggcgaacctgactggcgcaggtgagatggtcaaacgagtcatatcattctccttcgtggtcttgtcgccccctgaccttgaagcagggcagatcgcgaccgattgtgccaaggtctcatgatccagcgttgaagtctgtctcatgcttgccgtgccaatggcacgtacaatattctaagttcgccgtggtcatccattcatctgacaaggtaggtctgcttccgagcaccatctaatcgaagaatgtaaaagccaagcaagatgcaaggtgcaagggtacaaag

SEQ ID NO: 8592 - DNA, 132 bp, Emericella nidulans
  unsure (1)..(132): unsure at all n locations
tgcttatgacgagaggagatgtaggacgtgttctagaggantcagtcggacgcgactcgatccgagcanacagtcgccttgcggaagcccagtggcttctggacgntgtgctcacggtctatcccctggttg

SEQ ID NO: 8593 - DNA, 113 bp, Emericella nidulans
taaagagggggatgcggaggagagcgattttgcaggcaattcgacggtcggcgcgaaagatttggttaaggtagaggcggcccaggactaatagactatgtgagtggcacgag

SEQ ID NO: 8594 - DNA, 544 bp, Emericella nidulans
tcatataccccgtcggcacataagtttgactgatcaaaaaatagccatagtgttcgggggactcgagaccccattcgcacagttcaaagggctactcgagacgaaaaacgtccagcgaccatgttgtatacacatctccgccaacccatccaaatcaaacatctcgccgataggtactccccaccccgcaagtagatgatgatgcagatcaaagtccgggttaagtggtgggtacacctcgaaactgaccgcgtctgacgcaaccgccgcaaagtggttgtcccaaaagaaccgtagcacacgctcactttgctcgatcccggcatgttttggggtcgcctgcttgctgtacgcttgtttctgctcatcgttcatggccgcccatgtttgcggcagaccgactctgaggaagaagatgtcgccgtgttggaattcaaccttgcactctcgcgcaatctcgtgcacagtgtctagtgaaactcctgctgtgttaaggcattgacggggattccttcttttcagcccacgagacgaaatcgataag

SEQ ID NO: 8595 - DNA, 507 bp, Emericella nidulans
aggatttccagtagtacctgacacaagatgacctagacttgagcatcagattagtacgaatgaacgtgaacgaagaaaccagccgtttcttaagctgacaaggacatcgctactggtgacaggtcaagttcttcacggatcctgcaaatcaacgagaagtgactcgggagcgcacattgccgtacgcgaacaagggtaggcaagagagatcagctcgcaggcgagtgaccttgcagttgaagagttcgatatagatcggggtacttcgaacagtctccttgtcatgagtgaacacacggttaaggcaaaaacacgaacagttgtggaggtatcgtggatgagaaagtctaattctatattctcatgaggccatgctatgcaatacgcttatatgccacctctctatacccatcaaccgtcagattttcatctcaatatccagctctttcctcctcaactcccactctccaaagtaatttggactgtcgccgattttactaaaccaag

SEQ ID NO: 8596 - DNA, 183 bp, Emericella nidulans
gcgtagagagtgagatggaggagtgggtgttaatcgagacgggagaatgaagaattcgcaccacgcccactcccgcgcagggccatggatccggatctggacagcataacattaacgtgttgatccgatctaggtgagttcacattgggcacgcactcgagattgccatcatggcgggctcaa

SEQ ID NO: 8597 - DNA, 1370 bp, Emericella nidulans
aaaataaatatacatgaaagagaaaaggaagaaaatgatatggaatagaaaggaaagagtagagtagataaataaaagatagagaagggaaaggaggacggaaaaagtaaagagaaaggaaaagaatagccaaaaaagaattatttcataagtaaaatcacaaaatctttaaggttagtacagcgttaatgcaagtatttacaagggagcctcgggaatttatccgttgatggtaagcaaacgggggagcaacaggcaggtacacggttttaaaaattgggatgacagctctaagtcttgagcccgctaaagaggggagaaaacgaacccccaccagagtaagcaagcgacggtaatagtataccaggggccctgactagaacctactaaggtaatttgttctccagctggttctacttgattgtaggaatacctgcttcaagtcgggatcgcagtatatagtctgtcggtcaacttctattggaccgttacggtgtgacagacggctgtcaatgattgtcaatgaatgccttcgtagatgccagttgaaccatcctctaggtaaagacgccaatcattctaggcccatctaatctcctaattactaccccgtagccctctttgctctacaaagactcgattgacattagcctggaaattatggtacattctttcgcgatattactgcaagccaagacaggggagtcttggcttggggaccttgatgccctaccttaagagacatatatagcctaaagtgaccaacgatttttttgctgacacttggccctcagaatgatttttctttggctgctgctcctggcctatagagtaacggcgaaactattcgaagcgccgaatccgtgggaggaagccagccaagtcatcgtctcaaacgtcacactcgattccaaccccgtctccaactcatcagttccctccattgaccataacacgcgccagaatacagaatacgtgcgcctgcaaagccgcctcgaccggacaagcggaacatggggcgcatctcacccgcgacaccggctcctcatggccctctacggcttcagcaggtacaaagaacgcagttcggctgaagtaaagaggtggcgcgatctgtacaaacacgtcccgaaaagccagaagcagcttgttgaacgagtgatcgggtatacgcgcaaactgaatacggtcgagcatctttatgaccataatgacgtgctcgcgggggatattgtacgatttgggatggagttttatggcattgagcagaccgaactggatgtgttcattcaggatatggagaaagagaagaagggtgctgatcggacgagcgtcgtccaagccatgaaacactttgtgcgagactggtc

SEQ ID NO: 8598 - DNA, 577 bp, Emericella nidulans
cactcagaccagcaatcgacctccacttataccaccgccgggattgcactatgtgcatccacctttgagatcgatgccgttgcctgggtccagtgacgaggagcgaatgaggactatgcctaatcaaataagcccagcattacgagagctaccacgcccgcaagaaactagacagacacttccttctccgcatgctttgcaacttggccatcgagaaagtataccacgtatcgagccaggagaccgaccttatgagcctctaccacccgaaagactcacttttacggacagcagccgaaggagcctcgttaacccccctccccgacccccagacgaaccgcatacgccagacaagcaaattccgctaaccacaacggccgagaaacgaacataatgaagtccttcctttgaaaacactgcacccatgttttccctgtttcgatgtgatatgatgaatgaacttcaacatcgatgaccagcgatagatagcattgattcgcccccctatgcatccgattacagaatcgaaacgaattatgctctccgaaggctgaaaaaagccacgatttatgcttac

SEQ ID NO: 8599 - DNA, 99 bp, Emericella nidulans
tgaaggagagccagcgtcgacggctccgtgggcgtacgcacgcaccgacggcgggccgcgtaccagtcatccgtagcgcggacagtcgtgctgtgtagg

SEQ ID NO: 8600 - DNA, 905 bp, Emericella nidulans
ctactctgtccgagatcaaagatgtcgcagccgatcataatgaagaaccgccatccaaacgacgaaaagttgcgggctcgacgccctcgcgccgttcacactctagggcagcttcccccccttggaaaaaagcgggcgctgacggtccgacgtcgaaaattgtggatggtaaacgtcgatctacgagagttagtaacgtcggccctgtcgagcaacctccatccgatgcaaaaccaacgcggtccagccagaagcagtatgtaagcaaagcggtctctagtcaaaggaatgcagctgtgtcgtctccgctaccaatgtctccatcccgttcaggaataaataggaggtctcttgctggcgtcgctgtaaatggctcacccagtaccacggcgaagggctctataggccggagacgacgtgaatcgccttcacccgtgtccaagcgtgcgtctacgcgtacaaggcctgataatatggacgcataccacccttctaacggagtcacccctcgctcgaactcgactaagactaggtcaactaggtccttccaacttgcatcatcagacttcagagaggaaacagcggatgacataggaaatgatgggcaagacgaacatggacagcgaatacaacgtttacggatcaaggtcaagaaaccggcgctcagcatccaacatccgtcccatgtcttgcctacacggaaatacggctcattcaaagaatggctcgagaatgaaggtactgggccagggcgcatgcttactatgacagatgcgttggaggaggcgcagaaaagacggcaagtaacggaagctatggagcctggcggtcttttgagctctgaagtttgctctgcctttctgccagaaccacaagaagaacttccacagcaattctcgcaccag

SEQ ID NO: 8601 - DNA, 662 bp, Emericella nidulans
tctggaacgacgcccaaatgtatcaaatttcggcatatcccgagggatcgacgcacgggcagatatgaccgcagatttgactcaataaggaagtggctgcgagtcttaaaaaaactatatggaacaatgcgagtttgaacttggaacatttggttgttttacccagtgtgtgagttcttcgctttcacatagtctggatacaaattcggacgacaggaacgcggcctcgcgagctaccaactaccgctcaccctcttctcttcttttgggaaccttcaaggccaggtcatcatggccagtgacgaaagcaaagaaacgcatgtccagtatggaagtgaggaaggaagtatcgaccgaacccaaacagcagacgatggggagagaagccagatctttgacagtgatagccagcacccaaaggtaccccgactcttatacgatttcagagtatgctatagcgtgcactaacggaatcaataacttccagctcgagaatactcgcctaataatggtcctcgtcggcttcggcatgtccttcgtcggctcccagatccagccgctcctgttcgcccccatcttccctctcgtctcatcttccttcaacgcctcaaaccttctcttctggttcacatgcacacagcagattgcgacctggtgtggtg

SEQ ID NO: 8602 - DNA, 1708 bp, Emericella nidulans
  unsure (1)..(1708): unsure at all n locations
tagatgcacggctgtagcgatgcagcgccttctttgttgccagggatgaacttgacgtcttggatgccgccgccctaaggcataacattagaattgtcatcacacaattcacccgatcccggcagaacataccccaggaatggtaatggtgttgatgatcttcttcgaatccaaatcccacagacgcagcgtatcagccttccgaattccaagactgggcttaaggatactgatcggctccacaaagtccgatgtcaggatgagctttctctcccagtcgatggccagaccgtgaggggagaattgatcgccaaggatgttgagcacgccttctacatcctccggccactcgtggatgatgttgaaatcggcatcggtttcaacaagacggccaggactagtgcctagcgcagagcccatgtaagtaatataaaagccaccgtcagcttcgcgcggatctcgtcagcgatggacgagaggatggcgcggttgctcttcaggaatgtagggcgatagggattcgaagtgtcaaagtaaaaggcagtgtccttgtttcatatcagcggctgtggcttttatactgtaaaatggaaggtacctgtgtcttcagtaaagatagaagaccaccgccaactagagtctttccgtcgagagaagggcccaggtggtgcgggtcattgccgctggagggaacatccgtgacatagatcaaagttccaaaggtgtcatcgtccagactgtaggtagcaaggaaatctttgtggtgtttgtcaccggcaccagtccagaagtagccaattttcttgggcttaatgttactgggcgtaaagggcggactgtccacggcggccgtaggaacctgcagaatcggcagaggagggacaatgttgttcaaggcctcagtcacaccggggatgtgtggaatcagaggaggcaaggaaatcgagagaccatgacccagagtggccagggggatcaagtgagcaagcgaagtagacttcatcgtgacggatgaccaatgaacgactaatatgcacagtcaagaagccactgtaaagaaagagtggaattgctgatgtctgtgagaataattgagcagatttaccgtgcgatggtggtctttataacctttgtgcccgctctttaaccacacaaactctgcttctcgctgtatctcaagctgctgttgaacgaaatctctgctgcaaagcacgcaaagctcagtagctcttgcccatggtgtatgccaatttcctcgacatgcccatgttaaataccgatcgacttgcacgttggcctgatcaggaaatatgcagttatacttngccgctgttaatgggaaccaggacattgaagacgaccttacatggattccatactttatggctgtcccccaccggccgtggagtatagtcccaagctgcatgggacaagtccaaaactgatgtggacgtatggggaaattccggcggccctgaagttggaggcttttgaacttgtccaggacaagctaccgtaccggggggtttacgccgaaatctttttcccaagtgttggacaaaaaggggattggactctcgactgaaataaattaacctggggtttttaaagtggggagaaaccctcctgggggtgggccccgcctacccaaagagggatgggtctgctttttccccccccaaaattttataaacataatcccccgggg

SEQ ID NO: 8603 - DNA, 978 bp, Emericella nidulans
cgatatccatgcttttacccctgctccctgtgatcgcggccggaacccatctgcccaagctctctcagccagctttcatttcttcgtcaatgcggtaattcctactgtgcgccatgtcatcggacatacaggtctttgttaaatggaaagaccagtctatctttgccggagaagatgtggaatgcaccattaccttcaagaacgttgcggagaggagcgaagacctcaataatgcgcaatcgccccatctcaggaagcagtcccgggctgcagtcacccctcgctcggagtctttctccctacgacttccgtctagtcccttcagaaatcccaatcgccggtcataccccgttagtcctgggaagagtccgtcccatcgcatttcctcctccgtgagttcgccgttgatcggctctcacagcttcccgcccccgtccacgccgcgaactgggccatcggctggccacaaacacaaaagatccgtatccatactgtctattgatagcgaaggagggaattccagcattgtgggcgataaagcaccgaggactccatcccaattgactcattcaagaccagtgaggggccatggacgctccgcgagtctccaagtcgtaccaaaaagatatgaaggttacgaggacaatgcgaaaggtattaccggcgcgatgcttaattaggcctacaacagctaatgcaacttggttcaactagggttacggagcccaattcgcggctttctatcgtctgaataccctatgcagccatcccctgggggaacgagggtagacatggatgtaatgaaaccgagcggttcttctggggctccaagccctgtaaggccaacaccacaaatacgcacgccaggacggagaccacagttaccaccgatagatttcaagtttccccctgccccggagaacgacacgagtacgggcctagccccggaacacccttgacgacaacccgagactcttc

SEQ ID NO: 8604 - DNA, 103 bp, Emericella nidulans
ctccagcagacgttgatcggcaggtcgcctttcggtcggctgcttcgtcgccatttgctccatctcgggcctatctgcagcaccccggcgatgacccccatct

SEQ ID NO: 8605 - DNA, 125 bp, Emericella nidulans
gtaaagttatactgagatgatctttttcgtgattgttggacgatatgaagtactgttgttatcaatttgtcttcaaagtggcggatgtgagtttgaatgcaacatcgaaaagtgcttgtagggct

SEQ ID NO: 8606 - DNA, 494 bp, Emericella nidulans
caatcctcagcacgacgctgcggcgcgagtcagccaaacggtatgcgatgcgcaagggctacctccaggcgtccactggcggcactcaccgcgggggaagcaccgggtgcgcttccgcgaccgagtcagcgtgtacactagtgcgaccgacccgccgtctccgcagtcggacgatgtgctgcatgaggcgacgatggattcagaaaggaggttctgggctgggacggccgtggaggacggggtgcgcatcatcaaggcgcaggccaggcggaagggggagaaggagatgtaactattgctatgatactcaaaataaatctatacaaaagtgcaccgagcatgagttggtacactttttcttgatatctttatttcttaattttatctttagttttcctaatgttttctctgtcttattttctttttttccttttctctttacttcattttcatttaatcttattacctttcccttcctttttattttccttttt

SEQ ID NO: 8607 - DNA, 1271 bp, Emericella nidulans
ttatcggtactccggcctctgcacctagcgagagtccttccaaattgtcgcacacaaacacttgcaaggttatccttagcgattgtcctccgtccacgtccgtccacgtccatctttgtcctccgtaattttctcgaaagttggcagttttcgttcgagtccgagtccacagccacgggactcagcccaggcctcgaagttcgggcctgaagacagcctctcgttctcggccatggcctcattggacagaatccgaatctcactgctcctcaactgcacctcttcctcagccttccaatcatggtaggtcaatgatcggcgaccaagcgctgtcaccaacaattatgttacgggcgaatgatctctctttcctggacgagccaggtcatctcgtgcccttcatcctgttcggggcactgcctgcgtactcacataatcctgcgtccaccggcatcgcctcgcctcatctcacaatgtctgcattcaaacggtcgggatttgggatactctcatctccttggtctgcacttttgattctgagttgatcactcgtgggcatcgcattctttgactctcaactctatattgcggaatgaacgtactgccctatttccgaaactagtgggccctccaactactttccacgtggctgacatcttctgtccgtgcctgagaaactgtcagtggtcagtgcctgacatagcaggccccgcgactgtagattgtcgctttcaatgagctcgatcttgcgttattcgagctccgatacgggaacctatcgattgccaatgttaccgtgccattcgttagtggaggtgtcgttagtttgatataacagtcgccttgagcttcgatctacaccaaaaaaataactacgttgcgtacgccccatgcaagctaaagcctcaaccagccctctgggcgattccatcgagccgcgaacagagaacctagagtatgcgactgaacagaaagagagctttgtgcctcggcgcgcatttggaactgctgcggacgcgctcgtcggaacctgaatgccaaactggcgaacccgctttctggatactcgcacgaagagctgcgcaggcaagggatcaacttcgcgattactcaccagataggcgatgagggcgacatccgggcttttggcctcggggcaatgctggcccaagcgcccgagaaatttgagaatgttcccggcctgactgtgcaagaactcgaggttctgcggcacgagtttgagcaacgttggtcacagccctgacaatgta

SEQ ID NO: 8608 - DNA, 1460 bp, Emericella nidulans
ggcggatcatcgaaggggagacagatgccggtggtgaaataacccccgccggcgtcgaggtacagatgcggcggtacttggtcaagattaaagatgtgcagcttgttgaagagtacggctcgtggctcgcccagcggaatccccagcttggtatccaagtgttcgcggacaactcaagtcgcgttaaacttgatccatctgacgctgtggctcttctcaaggaacgcgcaccgaacgctgtccaggattacttggagcaccttgttttctcaaaaaatgtatgtattctcgactctattcacagtttgatactgacgattatagtatgtacaatatgccgacgacctccttcagtactatctcgacaccgtgataactgtgctcgaaacctcccctgaagcccgagcttctctgtctgagtcctactcaacctaccgtgccctccaaccacccaaacctacctacatgaatttcatcaaagagaacttaccctcaaatccctggtggcagtcacgaatgcgtcttctccagttgctcggaggaggcaacaccacccaattcacatctgctcccacacctagcctcaactattcgatccccgccgtcctcgctcgtatcgagccctttcagaacgagctagtttccgaatccattattctagacggattacaaggtcgacaccgggaggctcttcgtttgctcacccacgggttaggtgattatgatgccgccacgcggtactgtctatttggtggccctcggagcaccagctcaactggtgcccctttggagttcgccgaaatgtcccgccaatccgaactattccggtatctactggacgagtttctgcaaatacgcgatctgtctgagcgaattgaacgcaccagttaccttctgggacgattcgccgcgtggttcgacgttcgtgaagtcctcgacatcatcccagacgattggagcgtagaaatcctcaatggattcctggcgcatgtgttccgtgtgctggtgtcggagtcacgggaagtgaggattgagcgggcgctctcagcaggccagaacctgcgcgtagccgcagagtatatctcaggggtggagaagatcgggggctgggttgaggacgaggagggactgaagcagttgcgtggagggcacgtgcaaaccaacgccgggcgggaaacgacggatagcgatttcggggagatggttgaggctgggaactgaacaataggcagccgcagagccccaattttacaatattttagccacatcttctcctgttcacatttgccgtgtacagcagcgtggctcctgtgcaacactgaatcaatccagataacccggattatgctttcgttctgcttgccagcctttaagctctttcctgatgtatcattacctatacaatttggcaggtattatagagaacagacaacgatcttatagaatctctggttatattt

SEQ ID NO: 8609 - DNA, 839 bp, Emericella nidulans
cctacaatcggacagagtactctgaaggggttcttcaaaccaaaatgtactctcgaacctaaagataacatgctttcgaaagatgaaggacagggacctgccgaatttccatttatcagcagtcaacaagatgtaacagaacaaacttcgaaagcggcactagaacctgagaaagcaccaacacccatgactccggtactgtccaaggaggacgctggcttcattgacccagttgcgagcaagcaggattggtcgaagctattcaccaaaaagccgcctcccaagtgcggagaacatggcgaggagtgcataagcctgaagactaaaaagcctggtccaaattttggtcgaacattctggatctgtcccagaccgctgggcccaagtgggaacaaagagaaaggaactgaatggcgatgttctaccttcatatgggctaatgactgggattcctcgacgatgtagcgaattcgagatgcccattcctcaaatggggcgttgctacattatcataatgcaccatgatgatgtcgatacttcgtagtcctcaccgcaatttcccgctccttccatcctcaagctttgcttcgtgctttctggtgaatactcgctgcacataccaacgtttcgtcaagctgcttcaagtttcgcggaagggttgatcttcattgcgtcggataaactcgagcgatcctggaaaagtggcaaaacgatacaagccagaaaggttttaatataggcaagagtcggctttattagcatgaggacataatcggcagcaaatgcaaggcattcgtacagagcgtcggctgcacgttggtgtttacacaccagagcgg

SEQ ID NO: 8610 - DNA, 973 bp, Emericella nidulans
atcttcgtcagggatccctcaatgacctcgccattcagtccgtgcttcccgttcgcatagacttgacaaaaatctggactaacccatccacaaccaggcagaaccctttctcttcctcgagttggagagtttctccagctatcaacttcctagtttgcatagtgcgtgtcaactcgtgaaagacaggtctctcaaggtatccaaaaactttgatcgcgctgagaaattcatccaagtaattggccaaccccggcttggaatcaccctcctgcacatcgggaaacaggtcaagctgcggttccttgcgctgcggctccgggggtagccggctgtacatgttcagaaaccgatagcggatgaaccagctgacggtcgagacgaggcccagcacgatcaacagactagacataattcactatatgtcagcgaactatgctttcgaaagcgattacgccgaagcgttatatagcagggtttgtggctcttacagcgtagtgaaattcattgtgaacgtcaagctcatggaaaagagcgtgaagagccatgttggcagtgtaatcgtcgagaaggtaattacccagtataaaacacttggaattgtctggaaaaccagagaaaagacccaaccgatccaccccaccatggttgtaggagtcggaggggacaacaacggaggcgggggaagatggctagagaagcttggaaaaccggagacttttgcgcttatggcgggaagcgaagtcgacaaagaagttgcagcgaccgagggaatgtcgggaagggagagtgacgcatgtagagagtctaggtctgggaggtcgggcgagggaacagatgctccactgtcggccattctcacatcgaagcttggaaggagaccacgctaaacttggcagttcgcagttgagcaaaggccacagaactcctcatccggcggcgctacaatgtattgaaagccagacaaattgcaaca

SEQ ID NO: 8611 - DNA, 993 bp, Emericella nidulans
atgtcggcggatactccggcgccgcagtttggggttcaggattcttagcgtcagcgttcttgctatcgtgacgcttcgcccagccgctcgcaccagtgtcagcactgacaagagtctcatttacgacaccgctgacttgagacatcatatccagaccctcctgagcgagtaccagaatccggcgtgcactgctggagggctcggatgacgcgccggactcgtctggcgcagggaccgcggtcgatgcaattcggaagcgctgcgggagcgaagtaaggtggcggcggaccagattgcgcgcattctcgggaagtgccccgccggcgtacttggagacaatatctaccacctgctttaatgtagccagcacgtcttgcttgagggcttgaatgcgctgtgacagcagattctggttggaggcttggctatcggcagaagcatctccgttcttccgagaaagagactcccactcttgaagagattcctgcagagccacgatggactttcctagcctgccattggcccacctcagccatgttaagcagtattgcaggcttttcagtgattcttcgctcatggcaacacctagtccagaagtcgaaatcataagtcgactctgccatgtagactgacgggacgagcccgctgtatcaacatcctcatatttgggtgacctgtggtcatcgtagggaggcagagattcatttaggtagagatctggggtttccggcggattgttggcatccatcgtgctcaagcctatttctagatcgcgatcggcaggagcaggatcgtcgccgttgaccttgcggcgctttgatcgggtcgactctgacgagttggaggcgtgcctctgtaacgcccagcgcaggctgccttccacgcccgttttgcgaccaacagtatgaacggtgctggctacgggcgagccaatgtttcgttcaatgaactcggccccagatctgaaacgaggagagtacgatttggaggatg

SEQ ID NO: 8612 - DNA, 114 bp, Emericella nidulans
ttgagtgtggccatcaatgtcatcttatggtagatgcgttacctgagttctttcagtactgggataatccacttggtggaaagtactcacgtgtcaccagcacgagtagtacgt

SEQ ID NO: 8613 - DNA, 1338 bp, Emericella nidulans
tagctttctgcccttcaactctgtcgggctgtcaaactctcacctttcttcgttcgggctatggggcactgaactgaacattgattattgtgcaaggtggtctgctgccattcgacatggcaaagatttacaaagatacccaggtcgacctccggccgtactcgccgagcaccatcgtcaacatcccgattccaacacaaacaggctcgcagaaccgggcgcgattcgcaatctcctccctcacagatctcgccgagcccatcgcgaaagatgaggatgagttcgcaagacgatacatcgcgacgcaggggtctgtctatttccgcaaacgcaatgtatacccgcgagcgtttctctggagggtcgtcaatgaaagcacggttttagaaatacaatgtgtggatttgacaaagggtggcatcgagaaccatgaatataacatcacgctgcgattggacttccaggacaagattctgccatcgggcgtagctctggccgacttggaagaccacgatgtgttgaatctgtttgtgatcacggcctccaaggagttgcacaccttggctttgcgaccagaattcttccggaaaccagcgtcaatagaccaaaatatttcggactggtgcaaatcttatatcccagcaccgttgctttttcgcatccgcatagattacatgcgagcagcccgctggagctgttcatctccctcgacagcggtgcgctcttacgattgaccaggagggccgctgacgatggtatgttttgagttggtgccagatgtgcggcagcaggcagctaacgctttgaatttcaggttcaaattggtctccgcttaccctggacgagagaacttggggttcatctcttcgagggctggtcaggtggaatgcccaaagttctatcaaatacggcgggcgcactctcgacacaaatgtagcaaatgcggtcgccacgacatccgatcagacgtacgttttcgcagtctgcctgaatcacacactgaagatctggaatctcgctacgaataaattggtggcaactaaggatctactcggccgcgagatgcagcagaattccctaacatactcgttgaaccccgccgagtcgtcgtttatccgcgtattcaatgttgagagggccctggacggcgggtaccgctactacgctgtgacttattcgccctttgaagatggatgtttcaagttctgggccatcaaagggggtcttaccacgcctttagaaattgaagacctttttcccgccgcgacgttgaggcctttggatcctgattagacagaaaatatgttttggagcattgccgacattccaggtcaagcc

SEQ ID NO: 8614 - DNA, 1068 bp, Emericella nidulans
caccttacacaagccaacaggccaccaaaagtacaggccgcatagtacttcgcggaccaaggctcgatctttccagtcttggactgcgctttttgactggcaatctcaaattcccgcgcagcttccttgcttatcgcattggccttttttttggtgtcttcgaccacgctccaggcagggaatggctctcgtctagtcggcccagtacccagagtctgttggttttggctccactgacgctgggcggaaaaggcaccagacatgacatcctgcggtggaaacatcgtgacggctctatcagtctagagatcagtcagccgtatttgattcagatattttgcactgagaaagcagccggttctcagcgttgtctattggtattgaaactgtagtcgccaatagtggacctcaacgccaatcgtctccactgctgtagggctgattgacaagataaaatgccacttgctgaccttatcaaccaatctatacagtgtacaaggtttgacttgctcagctctctgcaaggctcgatgattctgagaagaaataccaggagaaaatgaggacacagcgcgaagataagcactaacctacagcacggagtgttggttcccggatgacgtagagaggaacatgtgacccggactcttgctcccgtcccgatcgggtagtgggtcggtgtcactgtagcttcgagctcggccctgaatttcctttcaccctcaacgccggtactcaataactatttgtgtacggctcgaacccatcattcacagccagaacatatatctgcgacttctcatcaggactcgatattctagcatttgggaatcatccatcatttagccactaaacctgcatcctcagcccctcttacccctcctcagtaccaacaaaaatggcctcctacatgaacgccagcgaagccttcgtccgcgaaaagctcgacgcaagcacaggaaatccaattccacaatcattatgggctgacaaatatcgcggagtgagtcactttctgctataggcctcacttcaaacgacccagctaacgcaaactctatcgccaaa

SEQ ID NO: 8615 - DNA, 730 bp, Emericella nidulans
tgaatgctgctcctagtgccagtgctaccagtgctagtagcgctagccctagtccaagcaagatccaaaagtccagcaagaaacacgtgaaaacagccccagaacaggtatcaagagctcttcattctataccagaatatcatcaacacgcccttcagtatgggacttcgccagtggtgaatccatatggatcacaggcccaggcaccctgttacccatacaatgctactgggaacttctcgcaaccagacaccttcccgatatcggataatctctcaagcggcttaggactctctagtgatggattcactaccgccgcgtcacagtcgaacatgttccagcaatccgtgcagcccaaggaatctatgtcgactcatacgccaggctcctgctgttcgagttctcgaactgaaagttcaaacggtatcaaggcagagccaaacatcgctgtgccgaatgcgtatgctgtcacttctatggctccctcgcctgtggctgaggcctcgtcgacctggcataatttctcaaatctcgatagacatttttcccctgtggaaactacaaccaacggtgttcaacctgccttgatccgatacgctcctaatgtttcacccataaattcaaccagcatcggtatcaagccaagtttataccgcaacaaactggatattaaggcttcccaactttggataacccccagttttcccaacgcaacacttttaaccaaacc

SEQ ID NO: 8616 - DNA, 1597 bp, Emericella nidulans
gggggggtattaaaaaaaatagttaaacatttaataaataatatattaatatacaaagaaaaccagttaaacatagaacatgctaactaatgactatataggaaaaattaagaacttatacagacaatagaaccgtaaccaatataacatcttaccaaatatgatagaaaaaattgattcaagcagctcaagggaaaaatcgaaataaaatgcgtagatatggacatctaggaaaaaaaaaaccatatgaaaatagtaacacgccagaaacacagacggaatagtccagaagttttcaatttacatacaacaagaaagggtaacttacagtaatttaggtatagccctgcgcaaagggatagaacacggatgagatccaaattcaaacaatgtccctatgccactctccatctccaaacccaaaaatgccctggtctcgcaaccgctggctcattacggtagccggttgccctagcactctttccaaagcgacagctgttgacatcatcactgtctgcgcatacttgtggaaacagtgggaagttgcctagcgagggatttccgcctgtgcctgagtcatgaagggccgagaagcctgtcacccggctgttgtctgacgcaaacccggcggtgttttggccatcgacgtcagcatcggcctttgcgatgctatatggaagcgaggcgccagaaaagacattaccgccgttcgtagatccgatgagaggattcacgtaggcgagggggtcagtgttggggtcatgtgttgtgcttgtgcttgctagagcataagctatggtggatgcgaagaggagcagtgtgataaacatcgttctaggagggacgcatggtagtctcacctacggataacattgagcggactgggagagtagtcctggaatgttgtgagacgcgagaggggggaagagatgcacgtgcagggatcgtcgaggcgagatcagcatgtttggagatgcggagtaaacaggggtatgtagtccacgggtggtttgatacggagtacaactgcaggcactatttgatcctgcgcggtgttttctgccagatgttgctgtgtgcatgcctggcccgtccaggaagctcttttttcggattttccaaagaacaaggccagagagaacatcatctggcattggaattttgatatcccaaccacatctccaacatgcgtcagtaagtgcatgtctacgatcatcatcatcctcattcgcctttctagactaaaaatcttcttttggtcagcatgcatatgttggccagggagttgcgtggagcaagggagtgcacttacaattgtacagacacctggagtcagtgataagcccaagtcttggaatcctttcatttgtttgaaagtcagatgtcgcaagttcgacgtccagaaatctatctgcgtagaagtgtcaaataaatatgtaagcctcatcctgataattgcgggtgatcatggccatggtatcctgctatggagagaagactatctatctcactagtcattcaataacatccgttcaggagcgtcgagcgaggcatgaatacgatatatcctaggtcatgtgatattgccccatcccca

SEQ ID NO: 8617 - DNA, 1722 bp, Emericella nidulans
tcctcaacaattaaactcatcaaacgcaacgccatagtcgcatctcgtgtccaaacaacgcatcttttcaacgtcacaccacttttagaaccaggcgattcttcacgcgcagccagcgccctgcgaatctcaccttcgagcgtcgctaccaatcctaggtaagaacgaagttcattcgaaagagctgcccgcagactctgactgacgagacccccgtcactgctttcaacaaaagcagaaagaccgcgatatagcagacacggctcagctagcgtatttaggagagacaccataggaagaggtagtgtcggaggtaacttgagtgtagaagttgacatgaactgcatatcagatgaggacagaccctgtaggttgaaaggcaagtcacgcaaaagtcctgattcaccacattgtgtcatcctttcctgctcttcattcttttcctctccatgtccgtcaaagggttcgttttgacgactcatgcgcagccgctccggcgcagatccatgctccgcatctcgattcctttccctttccttgtcctctgttcgccgcagtgaagccttccgttcgacccgcgcagccatctgagatgctgatgagctaacggctgggccatcatcctccgaactcgccgccaccctgccccccattctttgctcctttacaagcattctttgtaatttggactggtccatcagcggactgcgtggcctttcatcgtcgtatgtgaagctctcagcgttctccgtcctcgatagtcgatagagtaagtatagtattccccatttctgcgacagcacaggctgcgtcaacagacgcgaatagagattcgagaaccggacagccttatcgggactttcattttcgcgtagcagcttccgcttaatcatatccgccgcgttattgatactctctgcccctgttgcacccgttaggcttcctcggcggccaatacccaaactcccagacggtgcagctgggttgtcggctaagtttgcatggctgtctatagtacgccacgcatggtcgaggaggcgttggtgatattgctcctccgctgcagctagggcttcttcggcgtcgtccgaatattcgtcggtgacggcggacggaggcagtgggggagcgagagagtcgacaagctgcgaaagggcgtcatcgatgcgacgtggacgtacatggtgccgacttgacattgttatttctcctcccccggtctcaaccacttcgacaactgggcagatatccctggtgcttttcagctattacccgtcaaagcagtcagatggcgcttccggtaggacgcgacttgggcgtggggcgtcagagcaacgggagacggaggggatttgattcacaggcgtgaccgagcatttgctggactccacaaaatcatgccaatacaaaatgtataactctctaaaggcccgttcaatccgtcgcgatggtactcgagctgagagggaaaatggagttgtttgtcgcgtttggattgttttggtggtttgacaattcgtctgccaagcctcacatgggtataacaactgcgcacagtattagatatactagtaagggttgtacttctgggacaaggaactctgttaaagcttttttttttttttttcttttaattaagagttgtattgtcaaagttagtcactaaataagactactgcagttgatgggtataactcgcaatgaacacatcaaagaaacata

SEQ ID NO: 8618 - DNA, 1129 bp, Emericella nidulans
ctggttgttgttgcagccacgtaacttcagaagcggttgcattagagctattagaaatcaccatgaaaccaacacgggatgcaaacaaatgacaacaccatcctctgcatgagaatctcgtatatctgtctgctgtcagacatataggtctgttagctgcggcgtgaaatgaattggcggtcttgccctgaagttatcagtcactcctttcgaccgcgactaactgaactgaagaactcatttattacaacactggttagccatataatacttaagcagcctcgcagcatgaattgccggtctataatccattctgtctaacaagatgacgaccaacacgctctctaagcacagcggggtattgtaagtaaacatggggtaaataaagaacatcagatttcgtttccccttagatggccgggggggcgcctatagcgaaggcggagtcgctgacacggtcttcgggtttcatcgttccgttcagaaggggacagagcctgttgtagaacgcgagatccgagatgttagcttgggaaccaaatatctagaatgtctgtcgtatgggctcaaagtgaagaggttgggaccatgtgggaaggtgcgcggttacagcaacaaacgccaagcaaaaccagatgacctctggcctctttggttgtcacgttgctgcgaataaggggaaaactagccaggatgatgcggggatgaggaaagttaagggaaggtagtggaggggttgacaaagaacgactgtgtgatatcaaaggaatcggggtatccatcggccgctccggcagagcgggagcggttgtatacgcactttttgttcgtcttgatgtggccaacctggccgcagttggcacatttgcgctgtgtgccgcctgccttggaggatcctggggcgccgtcggcgggggagtctgctgagttgcggaggacgcccttttgcttttcgcgggcgaagcggcgttctttgttgcggtttaggcgacttaattcttgttcgaggctatacaattggttagtaatggtgtcgatattagtagtggtggttcatgggagacggaagggaaaggaaaaggggttaatagttcgccatacagcttcttgttccgggcatctacttcag

SEQ ID NO: 8619 - DNA, 117 bp, Emericella nidulans
cgtgtatggtacagcagcctagataataatcagctccttcgccgacctcggcacggcgcaatctcacacaccgtttacagactgctcagagagagctttgtctgccgaggtgaccaa

SEQ ID NO: 8620 - DNA, 787 bp, Emericella nidulans
ggtggccgaggacgggttatacttgcttggaaatgaggctggtcaatcaacctatggctgactctatcgtaaatccgtcgctctccgacatatcagaggacctagaaaagtcccacaatagtccttttacgatgccatgcttaggtccatggtctagcaggatggctttcctatcccttcctatcctaacagcgctcggcgcagtcgtttacgtgctcttccaactcgtgtacaacctctacttccacccactacgcgactatcccggtcctctgctatggcgagccagctctcttccttggaaactgaccctccttcgcggcacaatgcatcacgacctgatgcgccaccaccagacgtacggcgatactgtgcgcataaagcctgacgagattagctacgcaaatggccaggcctggcgcgacatccacgcccacgtacctgggcgcccagaattcctcaaagaccctgtccgcctgccactggctccaaacggggttatgagcattctcgtctctgacactcgcaaccacgcccggttccggagtctgttcggccacgcttttagtgacaaggggcttcgcgcgcaggagcccacgattgcccgctatgctgatttactggtcgaagtcctccgcgaggttgccgatactggcaagtcagtcgagatggtccgttatttcaacatggcgatctttgactccattggcgcgctctcatttggggaatccttcgacagcctcaggaaccgcgagctccacccgtgggtagacacgatccacaagaa

SEQ ID NO: 8621 - DNA, 346 bp, Emericella nidulans
cgccgagctggtcggcaccgaggggcagggcgtggcagaggtcggagaaagtccataggctctggggcaatgctcccccgagatcagcgacggggaaacatgggaaggatactggcaatacaggcagccggctaatgtttggggctcgcagccgactgtgagatcttatctgccgtctcccccattgtttgcggcatctgaattttccactttccgtatcgagtcttcatagtcacgagggccatccttcttcatatagtagcagagaaaaccgtggagatggcacatgtcaagcccagtattttgcggggtatgtgtgttatgttgcctagtcaggtatgcaggt

SEQ ID NO: 8622 - DNA, 750 bp, Emericella nidulans
gaaaattgatggcacaggattgtttccccctcctcattcctacaagaagttaagctgtcacgttacgagcgtcaattacggccggcacgctaagtgaacgggtgcacccgactggaactggaagtggagaaaaggagcgagagcgaaagcaagagtgcaaaaagcaataacgcagacaaaaccagactccgcacagcgaataattggcttttgggtgactgggagaggtgacggactaccaattggattgggagtaggacctccctgcgatcgatccggtcatgtcgaaagtgcactgaagggatctcagtcagagacagcgatagacgtcgcccagtcttccacgctgatcactcatcatacacgaatgtcttgtaacgtcaaggcagaaagcccgttccaacaaggggcccgaaggtagtctaagttgggtggatgactagggactgcgcactgtgcacttgcggacgcacaatgatctatcctgtgcgtcgaccttggagtacgagtcgtcaattctccaaagagctgatggagatgagaacagtgaatcaaccgctacgctttagtgcattgagagaggagacatcccgcagcgatgcaggtcagagccggctttcgcgcggtattcttcttcgggtgcccgatctagcggcttcgcttttagctgagctatgacatgcttcacgtgcactggctcctttgcgcttactatacctccgtactgcagaatggcattattgctgcaaa

SEQ ID NO: 8623 - DNA, 1297 bp, Emericella nidulans
cgaatctgatgcagagagccagatttgggtatcccagatgggcgatttgcggtagtgttgttcgctttaggcaaactaggtctggtagtagtagcagagggcgtggagcgaccgttgctaaatgcgtaagaggtggaccgggagtgtgcttgaaatcgttgcggtctattgccataaagcgatcgtgtaccaaaagattcggaagccgatgctttctggaggggaatccccgatgctgcagtcaatgacttgcgcatactactcgacgtttcagacatgggaggtgacggtggcgttgcagttgcagaagccagcgtcagcgatagtttggttggaggagtgctgaaaagcggcgaagacactgtcgattctccgggagaacggtcgaagatctcaggagtatgcggcgtcgagggactgcgcccaagaggtgctgggcggcggcggcggttattgttcctgagcctctcttgaacgatctcagtttcgatcttcagatcgttcagttcatcacggagccgctgattctcaatgcgcagactctcccgttcctgttcgccttgtttatactccatatccaatagaacctctctctcaagagcctgattgtacttggactccatatcctccagggatgaggtggtatgccgggcctgacgttcgtaatcatcattggcaacttctgtgtcccgcaacttcagttgtagtgtcaggttcgcatcacgcagcgaagttatttctttctgcagtgcattctgggcagtactagcttctgacttggattgcttgtatttcgactaggggaaaagaaatgagtttgatgacgcggaagaaaaggggaagggtgaccaaacaaaccttccactcctccacttcatacctcaggttgtccaccttctccttcaactgtcgctcacgcttctcagacgcctcaatttccttctctagctctgcctctaattcgcgactggaagcctggaaatcggcaagctcagactcaagctgttcatactgtttcttgtagtacgcaagctgatccgatcgggaactggtcccgttggtgcgggttgaagaaggctcatcggcggaaggcattatgcccacaccaggcgaggctggtgtaggggtgcacgtcccaggggtgcacgtcaggagactttatcgtcggcggtgcagtcagacgagcccgttgaagaattagggtcgacgaaacaatataacgatgccggaaacacactcaatcgggatcatatacgggcgcagtatccggtgtttagttggaagagctgctatgtat

SEQ ID NO: 8624 - DNA, 1412 bp, Emericella nidulans
ggggggatggaccctttgtgctctacgattatcgtccgcccatatatgtgacctacgagatccttgaggcgccagggaacactcgcttgcgcattgttcctgccgcagagctgcatgcggagtcgttgattacggacggagaaggtgacgatgacctcgaagtgaacgaggagggactgcctgtccgcacaaatcaaaacacagtcgacgatgcgtcgacccaaaaattgacactagaggagatcgaagcgctgaagaaggagtctacagatgcgggtagggatataatcgcgaagatactggaatcgcattcgaccatagaccagaagacggcattctcgttggccaaatacacattgcgcaagcagaagaagtatatgaagcgattcacggtattcccgatggacgtcagcggtctcacgaactatatgctggaaaacagggactccgcctcgaagagtatggaattgcgcgacgaactgattggcctgatagggagctgggggaacgtgcatcatggtggcgatgcctcattacaagccacactatcaagaccaaatggtcgctacctcgttgtagatgatactggagggcttctcgtcgcagctatggcggaacgaatgggactgctataccccgacgaagatcgagaaaatgttgagaatgtgtccgctgcggacggtagcacagaagaacccgcgtcaatgtcattacaacgaaaagatcgcccggctcaaatgtccgctaccgagaacaccattaccattctccacgcgaacaaacaaccaaacgcatcgctcctaaaatactttggctacgaccacaacgctcccgaagaatccccatccccttacagacacttgaaatccgtttcctggctccaactcctcgacccagaagctgatcccatttacgctgaggagcccgccataattcccgacgcggagctcgcaactctcaaaaccaacaagcgcggcgcataccaccgaaaacgaaaccgctgggcccgcgtgcagagcgtcgtcaatgaagttcgcgcaggtggctacgatggccttgtcgtcgctacactcatggatcttgatagtgtcctcaaacacacagtcccacttctagctggctccgcaccagtcgtcgtatactcgccaaccattgaaccgctaacggagattgcggatctttactctacggcacggaaaacggcttatatcaatcggaagcgggagttagaagaaaagcaaggccagtctgccaatggcgagttcccagaactagctgctgaatttaatttgaaccctacacttttattggcacctacactggaaacagttagggtgcgtcagtggcaggtccttccgggtcgtacgcatcccatgatgtctggacgtggaggagcggagggttacgtcttt

SEQ ID NO: 8625 - DNA, 978 bp, Emericella nidulans
aggcaacatgggagaaggtcaaccttttttctcttcgcgatcttctcaagggcccgcgagacatctttgtcacgttgcgaggtcgcaattaaattccgcccctcgttgtgtttttcacgctccggaaaccctcttctgtctggaagcggccttggttaaggactccataagggcagagacccattccttcctctcggcacatggggatgatatcgcgctcaaagtcgcgcatcgtcgcattccacatcccctggtacaccacgaattgccgcggtcctttctgcctcgcgtactcgttcgccttggagacaacccaggctggggtatccgatatgccctacaaagccttgcccgagctgacaatatcattcaaggcgtgcatgagctccggtatactcgtcgaataatcccaccagtgaacgtaatagaggtccacatagttcgtcctcaaccgcttcaatgacgcctctaacgccaacttcatcgacttgacattgttacccccatatttcactgcaatttgagtgctgcgtctgccatggtgacgagtatttcgccgccagcacgatctcgtcccggttctgacgggcttttatccactcgccaagccattcctccgactggccttgtcagtagacgatggccgtatcgatgaagttcccgcctttgctgtagaaggcgtcgagcataccgaatgcgtcgtcttttttgcagtgcccgtacgtcccactattcgcggtgccgaagtcatggcgcccaggcaaatgggggaaacgcgaatggcggcaggaggcgcagctagcggtgccgcgcgaaggaggagttggggggtgggtgaagagtgaaagacttcttttcattcaaacagccttatttctatgagggttatcggtgaatataggataatgattgctgagaccacaatctagatttatatagccggtctggtaccgtatgatcacgaatacgagtatctct

SEQ ID NO: 8626 - DNA, 233 bp, Emericella nidulans
ataacgtctatcgatcacaaacgtcaaatcagaaaccactacagatcatccaaccatacgcaaaccacacctggcaacatgagagacaatgcgacgcaccactccgagcagcctcctaaggtttgtgcagctaccccaatcagcagccatcagtcggcctatacccgcaccagcaacatcgcaccttacgattacgccggctgcgacatgggccagctacataatgcagatgc

SEQ ID NO: 8627 - DNA, 633 bp, Emericella nidulans
ataaacctgcagaatctccacagtcgaagcaccaggatgcaacagccgccgattcagcgctgccacaaacgcctgggtaagatggtggcgcgctgcagggtgcctggcgaactgccgcagatcctcgattgctccactacttgcaggccattcaacgatcacatcaaatagctcccctactcgaagcgctccaagccgagcaatgccaatttcttgccatttgtccagatcactttctcggatagcgggctctggtacattgataatagggaggacttgaatggcaagttgtgcatacacgtctgttatccattgccgcaaatggaacgacacaacggatggaccttcccagtgaccagtataggcaacccggatgaattccgtcatcattgtgtccatgacaccagcaaaggcttcctgagccttctcaccccctatcccaacaagctgtaggtttttgagcagcgacaacaggcgctctcgggccgtagtaacctgaacatcctcgaactccgtcatcatctgtgatcggaactcaaccgacggtgcggcccgccaatcctgatatgacatggaatactgcctatcaacttccatatcgtccacactagcatcttcgttgatatctgctct

SEQ ID NO: 8628 - DNA, 1602 bp, Emericella nidulans
cgcctcttgtttgcttctcatatctgaaacgggatcatcgggcggggagttcgaaaggcgtcgacgtttgtgcgtaatgctttgaagggagttcactcgccgttcacgtgcgcttatatttgtagcgacaatgtctctgtacacctgaccagcgcggcggtaaaattccgagtccccattttcgtccgttcgacttgcccacgagggtttattgaagtatgaacgcatgagtagaattgaggcctgtggccacggacagctataatttcctcctatcttggttgatgcgaaattcgtatgaacttttcgttttaccaggcgctgggaaaagtgcttctcgagtcaaagcgaagtttgtggcttctgtcggcagccacatacatgtatcatagttatctggttataggataaccattgcagtcgtactgtttatagttgtggtcaagaatcgcgcggagagtaccgccgtgttgcgttccgtctgaaaagagtcggtgggcttccgaggttattagtgatgcgcccacacgtgcccttgatcaagcgacccctctactccgtagtagcaacacgcttacatctcaagaacacagcgccattcacctgcatttctttttcattccacaggcgaacgaaaaggacactggttaaaagatggagaatggtgcaacatccgaaggaaaggacccgtccgcctttttgggcgagataattggagctccagtaactgtcaaattgaattctggtgtcgtatacaaaggtcactctcgaggttatcattagcaaacacgcagtcgctaacaaatatgctcaggcgaactccaatcggtagatggttatatgaacattgcgctggaaaagtcccaggaatttgttagcgggcagttgacacgcagttatggagacgcctttatccgcggaaacaatggtatatgctcctttctcggtgtaattagatataatttggtctgactgctctatgaaattcatagttttgtacattgccgcgaattgaaactcgaagaagagagcaatggtcagaacaaaggcaacgctaccgtccattgtactctaggaccctcacacctgtgtataagccactactttggtatgcgaagaggatcccaggaatgcgaatcagggttcaggtgaaaggacgaagaggggaggcccgggaaggagcagtggtataaatcctgtcactgtgttctagtgaagtttggacttttccgcataaccaggcatatagaaggggaaaagcttccagactcgagctacccaggaataaatcccaccggggttatttgatcgcgaaggaatcgttattggcaagtgtacctagacacaccagcggatgcaaagatatcttaagccatatatgcgtcagatataagcttaatcatataatgtacactttagaccatggagttagacctcctcggggcatggatgatgctaaaatcatccttgaaatataagttccctttctaaacgaacctgtacagagtgcctactacagcacttggcggctcactattaccatatagattactttccaatactttgtgttacaaagaagacttatattttacataagtgcct

SEQ ID NO: 8629 - DNA, 860 bp, Emericella nidulans
atgcatggctcctgggccctttcgagtctagttcgtgggctgttcaccgccactgggcgactaaaatccagggctggaggggggaaaggttcttaagagataactgcgggtatctcgctgtttcagattgcgttccgtttctttctcagccttccagtcgttctgtcgtttgtcgctcctttagaaacagttccccagcggtgcttccagctctccggttagacgctcttttactgccgttttgcatcatttgcttccattcgttcggaaattgcctgtatcagggttcagtgctactgctactgctagtattcctttcctccatcagccggatctacgctcttttcttcccataaccgttgggttccgcccgctcttctcttcgcattgaactgtgccgttatcgtcgaggcattccttactacagcgtcaagaattttcagtgaccacaacaaaacaacgcagcaacaggttgatcgtctagaagatttagccatattcgctgtcctttgccgttttttttaacgcttcagattccacatcaaagaagtgcttcgattctcgcccatcgctttaattacatcacctccaggataacaattctgcagaggcattcggtaccttcttaccattatcccttgtttatacatttcccgctttgaggtcgcattcctgggccggttttatacttccatcacagccatatcctgataatgaattaatcgtgaatgcaacaatatgcgttcaggcaatccctctccccaaaggagagcgcttcatgaacgcacgccatcccaaacgggagggtgctctccgccagtatccgtgcgagctgtcagtgatagacaccgcgagcagga

SEQ ID NO: 8630 - DNA, 161 bp, Emericella nidulans
tcgctatcaaggagagaagtcggaatacaaccactatcagaagtaatacggcccatcgagttaccgggatgagcaagattccgaccacaagctaaccgctcgtcggacagcgtgacaccttccgaacgtcatgtagcgccccgtacacagcagctcgccca

SEQ ID NO: 8631 - DNA, 929 bp, Emericella nidulans
gaacggaggtgttctgatccatggatacttcaatggagcctggagtgatcgggcgaaggcgagtgtcttgtgctgaatatgcaagttgagcttaaaacgacaccgctgtttccatcggaagatgaaaaggtggaggaccgccagtctggaggggtatccggggtgtgcacgaatcgccgttgaggctcgcgcaaaagctggcggtaaagactcacactcccgatctgcggtgtgcgtctgcagcctgcgccgtggctgcgagcataagccacaatcttacggctcgaccaatggtcaaacgcatgccaagtcgggagacagggttattttggtgactgggagttgcttcttaccccaagtcccatcgtatcggccgtcaagcactcttgctcgcctttcggacacccatgaccgggttggctggacaagtcctgctgaagcaagcttttcttgcagctttggtaccctggccctactccgacgaagcggtaaccctcggtgatgccgtgattaattccagattcttccggcggaggggtagggatgtcagccctaccaggcctcgagcaaaccaccacgcggccactgcacgactcagcgaatgagccgcgttcatcgggggcccccctttcctgactagtatgattatgaagaatgatcgagtcttcgctcatactacgtaaacgtattatttcagctaaaggtacggtcatagatcggcattccagctgagacagagtgacattcgcactgtaaccaacccatctggtgtcataaacaagcaagttgggatatgtatccggggtctcgttcagcttccttggttggttgtcagccagaaacattgatcgtgcatagccacgtctgacttgggttccgtctcgctctatgcccgctgctaatattaaaacgccggcttggggattaag

SEQ ID NO: 8632 - DNA, 794 bp, Emericella nidulans
cgtcgaagtcgtacggtgctgagcaagtatgtttttacgttttcttttatatactctgtcatcttttgtctggttttaaaccttacgcaatttcctgtttggcacccaatgcgttgacttgtgtttcagagtcaatgctgcgccgcattttgcccgattccttctacccacctacgtctcgctgcctcgtctcgtaccggttttgacccattggctgagaggttcctgaggaaatgagggtggatttgggaaagtagtgctgaaacaatgtgttatgaaacaggcactcgaaaaagcaggcagcccgtgcaaccgggccaccaagcgcctctcccgatccagatacgacggcgatgttaggactctccgagctcccacaaaatgccaatggcgaaaattttgatattctcgaatggtatccgcactatcaaaactgccagcgttacttcttagaccatgcccagcacagcagccctgttcaagcggtttctgcctacgtgaacatactacttccatttcaacgacaaccctatccagtgttcagtgccactgcgaggactccttcaagtacggacgccgagttgacttcgggatcttcgtcgacgtcgaatacaccacccccagtttctctattaccgtatgtccgtcgcctcgtggcaacaggaatggattacccggggatgctccatggtttctttggtgatgactggcaatccgggataggcccgttacacgaaaaggagcgctgtaactatcttctcgcggcaaggagtggaggatgggctgtggtgaaa

SEQ ID NO: 8633 - DNA, 1567 bp, Emericella nidulans
ttccctctatcctctggccgcttctttcttctccctcgctcacctcacccctcaagagttttcctcccctcctattgcattgcactgccttgctctccagggttctcaccttcaacctgcctctatcccttcctacctgctgtgggcagtcgttctaagactggctattatcctgcaattcccttgaggttgactggaaggaccccatctcgcactttgatcggttcctttcttcattcccagggaacgactgcccacacaagtatcgggcgggaattcttcacatagatctttgaggaccaacatctgttcatcgtctttttcacgttactttggctctcttcgttttggcaccactcttttgactttgaatcatccttgcgccttgcaggaacctccacgttccttcatactgtttcctcgctgacagttctccatagcgagctcgctcttttggtagcgttctttggtatgtggccttggtaaacatccattatcggttgtgctggtttcgtcgcctttatactccctgtgtctttttggcagcgtggaacagcttgccctcgccattctttttcgatctaatacctctgtggtgatcggtctactgaaccggaccggtcgtccctttggtttcactctccttgcagctctgcttcctttcttttcgagcggcttatttcggcaacaacgataaggctgaaacatggaaactgattattctctgtctaaaaggtcgtttgcgctggtagcaagcaccagtccccaaccatccaggtctgctcacaggcactcgccaacggcaaaaacaccaccactatccgtcgttataccaacctacaatcgcagcgcatctgggagcccgtctcctttcaaacgcaggcgcacttcacaacctgatctcaccatgcccgttcaaaccagcccaccgtcgctgccggactcgttcccatcttttatgtccgtgtttggcggggacccatcgatatctctagagaaagaagaacaacctacaaaggtacaacctctcaattttccggccagtatcaacggaaatacgagacgccctctacctttccagcaccgtgaaagcgtttcatctgtaacatcggggtctgccgattcctccccgactactacagtatcaacctttgattcgcctatcactacagatacctctcccaactcatcaccagaatccccaacatcgatgcctctttcttactctaaattcatgaccgcatcgcgcaacttggagaatcaggggttgtccacagctcaaagcaatttgtccaagatgacgtctgaatcttcaacaacccaaaaacgacccgattccccggggagacgagacagaaacctgaaaaacctgtcgctgaggatgcccccaccattgaattcctcacgcccgtcgatctcgactgcttcgattgtagaaacaaactctcaacatcgtctatccgccccgccgtcccctataagtatacccccaaaaggcatccgacggaaacccgccggtctcacaattcgcacgccctggcttcgacggtcattctccaacaatatt

SEQ ID NO: 8634 - DNA, 633 bp, Emericella nidulans
gaggtcaaactggatgtccgggtgctcgcttacgagctcgtgcgtgttctcattgtagtagtagccggattcggtgatagtcagggagacgatgtgtgtgtccgggtgggccatcttggcgacgacggcctcgcggtcgtcaggagcaaagaggaacgagttgatcgagccgaccacgttggcgaagctgcccttggccgatcgctcgatgacggtgtagaggtggtcttgagacctgaggatatcgcgcatcttcttgtcaaagggggtcagaccaacaccggcgatcgcatagtcagtgacgccgtggttctgcatcagccggtcgatatagacggccaaatgggctcggtggaagccgccgacgccgatatggacaataccttccttgacggcgccattgcgagggtaggtagggaccttaatctggcccttgccggcgttcaggatcgcggcgaggttcttgctgttgagcttgagggggggcattttgcacaacaccacaacagaacaatgggaagactagattttcaagagcagagcaagtccggtccggtcaggggagggcaggagaagaaaataaaggtctgccaggtcgtccctggagcgctgagggggtgctcacgccggttt

SEQ ID NO: 8635 - DNA, 103 bp, Emericella nidulans
tagaaacaacttttgcgccgtagagtatagcatcactactcgcaaatgaaagatcatgtgcatggccttggtcgtgtcacgaacttagctggtgaggacagtt

SEQ ID NO: 8636 - DNA, 963 bp, Emericella nidulans
ggagaagtcgatgaacaatcccacggcgatgagaacgatggcgaggattatcacgaagatgatgaagatgacgaggaggcgcaccctgaagaggggttttgggcccaagccactgcgtccgctggtgatccggaggagcccgaggttgatgacaccggggaccttgaggaacatccggcagaatataatgacttggaatcatatcaccagcagccgcccttagaggaggatgtcaagactgatgttgctgatgctgctgatgctgctagtgaggatgacctcgctctgaaacctctacccgaggatagttccaacacgacagaaccgcccttggatggcaactcgccggagaagtccgaccatcagcacgaggtagatgactcaccaggtgtggcagaccatgcaaacagtcctgacagcggttcgaagcccgtggacctcgtcggagtcggcgaggtagatgagccgggtcacctcgaccaaacccctgaaaatactgtttctttgcccgccaatgacgacgagggagccgacctgccattcgaagacgaagaggattacttggacctaggaagtgcaacgatgcgaattctctctatgaagaccaggaagacgcatccatcatcacgtttctggcaagcgcttgcgtgagcctgatgacgaaatcgactttcctcaaagcagcactccagaagtgaagcgctctcggtcctcctaaattggtactgactggcaactcacggcattcttggtcacgtacttcggtttgcgtggactgtatcaacaattaacagcttcagcactcttcccagggactgagttggcctttccgaccttgagggaattagcgacaatcctagcgtactattggcgattatgaaccttattagcgagcgctttgttcctccactgcgctgagcgttgtgactcgtgcacggtctcaagacttgtcatcttgtctta

SEQ ID NO: 8637 - DNA, 431 bp, Emericella nidulans
ggagtggtactccatcttctgcagctgctactggaatcaaatattgtttgtcgtgaaaaagaaataatgaaggtaaatctccaggttcggcggcctttaagaaaaaacggcgggtcaatgaagatgtgggttacagagaatgcaggtggaagcgagctccccaaaacttttgtcgcaataaacagtgttggcctggatattgtcacatgaccttacgggcggtatatgtatatggccctgcaagagtcccacattcttgtaacaatctactacaggatctacgaagtagtttcgcacatgcgccgagaccgaatcacctaataggatttctgttgcttcaaaaatgttattcgcccaacatccccatcaagaccgcagacctcgccaaaattgccaacctccaggttccggcgtcctacatgcccattgaa

SEQ ID NO: 8638 - DNA, 498 bp, Emericella nidulans
agattatttagagaatcttataatttaaatttcttaaaatagtaagctataatttttggagtcttttagagaaaatgaaaggactattattgggcttataaaatatattataaggtttcttagaagccttagtaagattacaaaaattagtactataaggaacctagtatatagtagaataataaatattattttaatactcctccttaatatactttataattttagtattaagatatatttctaagactctaagctagtaataggttataaggataaagaaataatattctaggagcttatctaaatctagttttttattttatagttactatttttatatagtaggtaaagactatttactactagattagtattttcttaataataataattttagagattaaattataatagatacttagaagcttagaaaaagtaaaaattaagatttttttagctataagtagacttattaaactacaggttatggcaggt

SEQ ID NO: 8639 - DNA, 514 bp, Emericella nidulans
cggcgatcgcggttccgataacttggacaggaacgtgccatcgtgaccgaatgatctatgttgagaaaggacaaagagtcagactgagctcggagggagacggtacgattcgagagacataccccaagtaccatgcccaagggaaagattatgccaaaggacactcccatgagaatcatatgaatccatagtgtcgagtcctagaacattggcgcattgtcagtccgcgcaaagttaagcatagctaggcagggcatcatacaatagggtcgtctgagatagcagcaccttcgggaacatgcgaatggtcgccgtgagccagggcaggggaagcgaggagcaaagctccaagtaccccgcgtaaacgaagagcgcccaacatcttgccttctttgctggtttgcggaaagaaggaggaggatgaggggagagaagagaggcaggcttacgaatcttctgattgaaacgatcggaagcgggccgggtaatggagacggagactgagaaatggaga

SEQ ID NO: 8640 - DNA, 183 bp, Emericella nidulans
ttcgtcgtcctacaggtgacccacataagtgataccgtccacaatctctcgaggctccttcagccgtgccccgaggttcaaaccatcctggagatccaaggtatcatctgggccagttgcgcacttcggaaacacgagatctatgaattgatggtcggtcggagaccgcacctcgtccatggt

SEQ ID NO: 8641 - DNA, 138 bp, Emericella nidulans
  unsure (1)..(138): unsure at all n locations
cgattaattaacgatttcgggtgggatactcaagngtatgcagagcgcacgcgctcggtaccaaagcgngaccgaatcgttacgcatgatttggatcggtctcacggcccagcttcacgtttctcagacccgcggatt

SEQ ID NO: 8642 - DNA, 499 bp, Emericella nidulans
aatcgtcaaccctccgtagaagggcaatttcgcaatttgtgccgctggaagctcgccgtatgagtttctaaattctactactcccttgtaatcctcagcagaaaacccatatgtgctcacgcaatagtaccctgtcttcttgatggggtaattgacggcttctgggttctttaggtgtactgcttgcgagattatgcgggactgcgcggcctcggtggcgttcgcagcgaggaggaaagagccaagttgggctgcagtacataactcggcttgcacgctagcttcgtcgcaaatgagcgatgggggttcctggacggtctaaatgagcactcttctggtccaccaagtagaatcacggtatacctcgggatcgtcggatgcacgtcttccaatcaaatgtccatcggcccattcgaatatcgccagactgacaagagggtctctatcgtcggagggagaagacttcgcgaacttagtcaagatgaaggggtcgacactt

SEQ ID NO: 8643 - DNA, 795 bp, Emericella nidulans
caatacacgtatatgtatatgtatatgggtatgttgtatatttacctatgtgcgcaagagtatatctccgctgagcatcgagaacacttcgtttccttacatgcgcccgtcgagctcccttcaatggcaaccggccggggaatgaggtcctgtccggcagcatcgacaatagcctcgtaccagatgcgcgccatcttttcgtatccccggtcattgggatgcgtgctatcgaccctgccgtcgatcatatagtcttccggatactttatgtcggagtcctctgaattcatctccgcgaggataatcgaaacgccttccttgcgcatcgcctgaactagatcgcggtactggttgttcacaagcgggacgttctttgcggtcctgcgttgtcctgatggtagtaaggtagacaggacgatcagcggtccagtgtcggtgtctcctgcgtgcaggaacccctcgatcaaagacctcatccggtctccagcagtggagatgtggttgttgaggcggcagtcgttggtcccggcattgatcagaacgacgttgggcttgtagcggtaagagtgtacagatgcggctttcaccttgttgatcgtatctcctgggtgcgcctcaaggtcctagtgagatgcaacaggtcagcgggcagatccagatggaataactgcagtagcagtagaaccgggaggaagctacgttgtcttccatctcaccgtggtgtttgcatcccgccatgtcgacctcccacccagcctgtctcagctgatcccggaagaagcctctgtacccatt

SEQ ID NO: 8644 - DNA, 232 bp, Emericella nidulans
cattgtagagttcctgccgctgttccagctatgaacaaccagcggcctaagaacattctggaatgcaaccaacgcgacctttatttagccactacagcagcctggtctatacacatatatgcggtgtctgatatctgcgatagcagggctaccggatggtgacattaccacatccattcccaacggtatcctgacgtcaagttctccgatgtcaagccgagtccaggccttt

SEQ ID NO: 8645 - DNA, 1426 bp, Emericella nidulans
gctacatcgttctatggaaacccctcgcccaccgcgtaaacttcgtccggcacctgaaaggtctctcttttcttattgacctaagcgtcgtaatgccgtaccccaagggcgactccaagggctggcccggttggcgcttcccagcgtctaacgacgagtaccctggcgccacagtcgatcggctcttcggcgaagactacctgcacaagatctacttcaaagcggattcaggatataaggggcggtactcagttccagtactgtgggatcggaagacggggacgatcgtctgtaatgtacggctcattcctcgaggccctctcaccaacacaagtggggtttagcgatagatgccgtcactgatgacattttatacggtacaggaaagtctcgagctgctccgctggctccccaatgcattcaacgactttatcccgtcctctttggcatcgatagacctgtatcctgaacacctgcgtaccgtaatcgacggtctgcactcctggatcctcccacatctctgcacgggcgtctacaaagccggattcgcatctgaccaagatcaatataacaagaacgtgatccccgtgtttggagccctcaacaaactcgagaagattgtctttgccaacggcgggccgttcattctcggctaccagatgaccgaagtagatgtcacagtttacgctaccttggtcagattcgacactgtctatgtccagcacttcaagtgcaatctcggcacagttcggcatgattatcccgtgctgaataactggttgaaggcgatgtattgggatgtccctgcggcgagggagagcacggatttcaggcatatcaaggagaacgtatgccccccgtctgacattgtccgtctgttgcgacagtggtgaggcttatgaggctgatggaagcagtatacaaagagccattatgatatcaaccccaaggccattacgccgcttgggccgtggccggacgtcgaggaaggcgttgagcgggattggacgaagctgacggttggcggtgtcagtcatccagcggttttggagtttgagaaggagttgaatgaggagtaaagatgaatatcccggagtagttgggaggcggtggcgtaggcagcatggggtagggatacttcactactgttgaggccttgaaaacaaggccacgatctaagtaggcatttgctcgcgtcaacaactcagctcagtctcagtctcatcccagttacaacaacaaacaagcactatcagatacagcgtgaaccagggaaaatatgcctctcaggcaagccgcaacgaaccgggaatgcttacattcgtccctcacatacgacccctcgcctattgccgcccaagtgcactacacccaaccctctgtccaggaccgtcaggatgcagtcacaccatcttccccaaaagaa

SEQ ID NO: 8646 - DNA, 546 bp, Emericella nidulans
aggattatcatcacttgaagctagtcttacaggtggcactcagatggaaaactttaagatgttttcatggcaagctttcaggacaagccgctgtgaatggccctgttttacaggtggcgttgtggacaagaaagattccgattccgtacggcatttcctttaaaggatttgcggacctccgggtgcatctcgaagtccagagttcagtctctcagcaggcactggagacaatgtcgtatccaagtggttcccatggcaattggcgcaggtgtgcaagcatcaagcagcacctgaaggtgtccagtctcgcaggtggcgctgtggacgagtggaaatccattggttgatcagctatagtatccaggaagtggggaaaatgtgctgatgtagtaggtgaatcctggcgctgggatatgacggcttgattggtacgaagaggaaagcaagtcgcagaaagcatcatgagaaaaattgttacaatgaaggaaagagaaagtaacacacatacctttaacagctggctgaacaggaaaccaggggcaacaa

SEQ ID NO: 8647 - DNA, 433 bp, Emericella nidulans
acctgtccactcactggccggaactgtatgaatagggactgaaagaactagccatcatgggaggtgaacctgtcaccgtgggtgaaacgatcccagacatgaactgtgaagctcgcgtaatcaagcttaggaactaaggccatgccttcctccgaaatgtccaaaccggcgaccacgaggctcccaccatcctgaccagagctggatatatgagccgagcgcagtctcaaagcctacgggtctaatacagggtaactgacaggggctgacctgccggaccctgagagagtactgcctggtcagacccgctatagactagcatgatcgctgtggccgtgctaaccgatgttaccagggcactacactgtcgtttatctgactggagaggcctccgtcactatagacagtttgggtgtacaacaagggccagcca

SEQ ID NO: 8648 - DNA, 1181 bp, Emericella nidulans
taaaagcctgaccctccaaaacatcccctcacgactgactcttcacatggatgttacgacagacaagagaggggccatcccgttctcatctcaactacggattgaaccgcccgcttctcgcgaggtgctggtcccaacaacctacttaaacgcagacgcatccagatcacgcgcaggctgtgaccaatgccctgtcagctgggcaaaccacctcccgccgcaaaagaccgcctccggcatcatagacatgtacgggggcgttacaaaaatgctcttccaagcccacatcaccatccattacgcctccatgctgttgcacctcccacgcagcaaccttagtcccagtctagacgcccccgacagccccggtcacgggcacgcaggcagtaagactatctaccccgcaatacctagtatccgcctgcctccctcatcagcccgccaggtacacgatgtcatggccaccgaggcctcgaagagtctcaccaaccttctttccatgcggccttgcgcaagcgcccgcacatacagtccatttgctgtgtccggcctgctcctaggcggactgatgcagctcttcaccagcgagcaccatccacccgcctgtgcggaccatcaccacaaccgcgtgattctcgttcttggggctctgaagctcctgcgacaaaattgggctcttgcgagagaggcgcaccgccagctgcggcttgccgccgcggagaccgtctcaattatctcgtcttgcaggagatcggtagctttagcgagcgctggtcttacttctacagctggaggaaacaaaagtcccagcaactgtagttggaccccgcggcttgtacctgcaggtgggaatcccggtcttcgaaatgaggcttcgcctccgcttgccacctcgccggtctttctctccgagtacgtggatccaacatgcagcgatccgttcctgtttgacaggctgtcggggttggcaggagttgactatgtataatagcggtgccagtgtgctagcaatcatagctaaaaaaatcccaaaaacggcaacatgcatcgccagtccctgtatcactttagagaacattcaattgttcaataatgtaactatatgtacttgccgttcagctccagctgctggtctactaactcagcgacaataaacctaagaacggagaactctgatagaa

SEQ ID NO: 8649 - DNA, 145 bp, Emericella nidulans
agtggtccgtgagtaaagaatgaagtgccaaatagtctgccagtgcagcttactcactcggagacgagatgcttgaagcgatagtaagcctaaagagtcgtatctgatagatcggtgatctttggaatgcggccggtgtcgttgg

SEQ ID NO: 8650 - DNA, 449 bp, Emericella nidulans
  unsure (1)..(449): unsure at all n locations
gtgaggtgtctctccaatctctgggggggcctacctaaactccacatattctaacgcagagccttcagccttaactctctgatcggacacccacccgctaatgctgtacggcccactctgacaaatacccatacacagctcactgcaaatggactcaacgagctctatccctaatctattggcagtcgatgccatacgacccatctagccagatccattataggacactacggatcaatctaaagcacctatcggaaagccagcgtgctacaagaccagagtcggtcaaggggtcactgccccttggtagcactacgtactgccttcagactagctggaatcactcgcaagcaccaactcggggcagacatgctcgaacttccgaaatgaaacacccctgctactccngcgaagactaatatagccgaaccaagccaaaactccactag

SEQ ID NO: 8651 - DNA, 529 bp, Emericella nidulans
ggttcgtggaatcaaattagatgcctgcctcgctgatcttagccaactttctcacaacccatccgcgccatcgttgatctcgcttcgatgccctcctcccaactccgcttgtgaccactcccgaacaggggttagatggtccttgtcagagcctaagcctggatgcagactcagtcttctgatcgcctcagcttacaatgttcgagacacttcttcctccgcgcgtcgctcattcggcagtcgaaccttgaatggttgatgataccgtccacggaaggggtgtgtgcttttccagctgcttgcaggtaaccgatcgacacgacattcttgaataatcaattcatcatcgtcgtttgaacggaactcccctgcaatctaggtccgccatcatcgtcacgacgactatttttgatacctcttcgttgagaccaagcttagcgcggacttgctgttgccgtggttatcacaatgcatctcttgctccgccttgcgacatcttattaacgaacgttaaggttgaattcaatat

SEQ ID NO: 8652 - DNA, 371 bp, Emericella nidulans
ggggggggcgggacccaactattgtcacctgatgggaggcatattggctcgctctgtgtcaacatcaccatagatgtctgctgccttgaatacgagctagcttcacaattgcactgaggaccatatccgcaaggataatgcgttaagcctgtgacgccttgtgagggagctgacttacatctatctcgacaggatcactgacctgtgtgactccggcacacccgagctgccaggtgctctagtgagtcatccaacacgcgttgagaggcggacctgcgtacgggacgtcttccactagcatccaactgacatgctgcgccatgaagctctggagccgcatgaccgacgagctgactcaaaggtctgacatg

SEQ ID NO: 8653 - DNA, 1628 bp, Emericella nidulans
acaaaccatccaggaacaggcttaaccgggatagttatataacatcacattaagtactgcaagaaagtcaggtccatagccccacggatcgcaacggtccaaacacggagtcaagctccaaacccagtgcaaagctctgtaacagggctttcaaagacgagaatgcactgagtgaccacgagcgctcgcagacgcataaagacaagtacaaagcaagccatgcagttttgatagcaggcgcaggcagtaaaaatccagagtcaacaaacgagacagtccagaagaagccgcggtcgagaggtaagaaaaagagctcgagatctaccgtcgtctctgctgcagaagcagtgaataaacgggaaaaacctgcgttcacgtctatgccgacctcttcgtctactgcgatggttagtctgtcgacaacaatggctgcgccttctgcccagcctggagacggggagcgtaaagacgagttagctcttcatactattgttctgcctcaatctaaagttccagtcccagttccagtcccactgagcaaatcagaaagcctcgttcaacataactggaaggaatcatggtcaggctcatggacatctattccgctcgccgaacgcgagagcatgctccgtttgctcgaaacaaaatgccactcaaggaaatctctcgccaaagagcactactggatgcgagttccaactcaagcggagatcgagatgacgagaaaatgcgataactgtgggggtaaatttttgctcttccaaaacaatttaggattctatctaaccattattatcccagtcacgaaagggcaaacagatgccacaggttcttcgagcgcgagttcaaaatgccggtttcacccaactaaaaagggtttcctggtaagtatcgctagtgattccattcacacactctcccctcttctccctctagccttgtttaacgtattctagagtgaggttcgcgggcgaggacacggagcccggaaagcccggtgcatcaactgccagcactacgggatgagcaacggctgtatagaacttctaacccacgacttcaaacaagcagacatcaagttcgcacagtcaaggccaagcccggcgaagaatgccaatgctcggcaaggcgtcctgctggacttggagatggtcgcgttgctgtcttacaacaggtggtcaccaggtggttgttttcttgcctgtctcttggggggaggcttgttattcttcgttttcctcttttatcaacttcaaactctattccaatacatcataaatctttttaacatatattacattcttatatatgtctttattctcaccctttgtatctctctctcattttaatcttcatactaacttttttctctttttcttgttatttaatactcattttatacacttttctttactttatattaccacctctctctatttatattttctctctatatctcttttacatttctatattttattctactcttttattttccacctttactcttccttctacttctcttcacttttcttctccttttcaaacttatttattttttcctatatatccttatttaattttcctatcacatatattttattttttcctcattcttttctttcttc

SEQ ID NO: 8654 - DNA, 1555 bp, Emericella nidulans
actccactcaggtgctgtaaagtagccgcaatctcgatgtatacagcctgtagacaatgtgattgtaaaatagaaactgatgagtagagagtgacaagtgcgaataacgagagggtggatgtgagagagaagaggaaagttgcccgtgagagaagataagagagaatacaggacaaagaaggagcaatgatgggaggaggctggcgctggtacgttgtctccttggtctggcaggcgtcaacggtggatcttcgtcgacttactttgaatagacaacatttactttaggttatttcgtagagtatatttggggaaaataacatgagttcatgcgtagtgtctgcgatcgacatatatccctgctttttgcggggaggtagccgctgactattatccgtagtcatagtacgtagcaggatagggtgccgcgtaggaaaccagatgaagtcataaaggcagtaaaggcaaataatctgcatttatatgccctagattaatgaaagaaaatcacgtccagtctcgaaacaaaagccaacctgcgcctcgaacgaagaaatggggttggccgcaatcgcactctggtttccattgcgaccaaaattatcaagagcaccaaataacctctataaccggtattacatgattccattccgccggctagcagcgctaaagcacttgaaaagtaccgcagcactgtgctgcctggtcgcacggctaggtcttccgtccgagaatgcctcgcgggagcatacactcaacaggaacaagcaggcagagactccagtcacaacagagtttaacgactgtttttaatccaatcgaagctcgccatttcgatcagctgctttgtctagggcgtctgcaatgcgcgatccggaaccctcgtagagaaatgaatcgtacaccgacgcacccacaaaacagccaataaaaggcgcaaacagtggcacgacaaagtagtagtttgccgctgtgaacacttcctgaccgtaaagaaatgccgagaagagccgtggaccaaagtcacgggccgggttaatcgcctggtgcgaggttagcctagtggacatgcaacggtcaggtagccatgaattttggcactatgacacgtacgtaacctgtctgccagcccaagcagctcaattggcccctcggagcacgaccatccctgagccgctgcgcctggcactcctcccccacggccgggttggacccaccttaagacactcatattgaggtccggtcgcccccataatttttcttacggcgacttcccctttcccaaactacatcgcgccctgaagtcattcttaatccccccccagtacttccttgttttacatacaacccctccggatttttcccacctctatccttaacccggatcgccctttctatttattagtgccaaatcctctctcatcctagctcagcttactccctcctctcgtccttcgcactctcttatcttaatccctcctcccatctcttttcacttcctttaacctaccttcccaccactcaccctcctctctcattctcctcatgtcccccc

SEQ ID NO: 8655 - DNA, 642 bp, Emericella nidulans
cgaaagtcttcgccgagcatttgaggactggcgctgaaatcggagcctcagtctgcttgtcaataaatggcgaaactgtgatcgatctctggggcggctatgcctcggccgagcgtacccagccctgggctcgcgatacaattgcacctgtgtggtcaatcagtaaaacaatcacagcccttgcaactctgctcctcatcgaccgcggccaactgcaccctgacgaccctgtcgccaagtactggcctgcctttgacactccggataaacgcggggtcctcgtccggcactttctcagccatacctcagcccttccagcgtgggacccgccaatccaggcatctgagttgttcacaaacactgctcttgcgacggagaagctcgtcgcccaagagccttggtgggagcccggcaccgcatcgggataccacctcgtctctcagggcctgttactcggcgagctagtgcaccgcatctccggaaaaccactcccgcaatttatcgccgacgagctggccggtccactcaatgcagacttccacctgggcttgcagaacgagagcgaatggggccgcatcgccataatggagcctccacctccatttccggctggattgcttgacaaaccacccaaaccagaca

SEQ ID NO: 8656 - DNA, 1110 bp, Emericella nidulans
cagcagcctctatggctttagttcccggacgcgataagagcccgccgtgtccccttggcgttgatctttcaagctcggtacgaagaacgaacgcggtcgggatctgacagcaccccgctcaacggtccatctggcctacgtcctatctccagtcctttccagcgagccgccagtcgcgcaagtggaaccggcagtggcgcaagcggagcaagtggtagtggtagtggcagtcctagctctgcccgtggaaagggaaactaaacggaactgcttgccagccagccaactcagccgtctgcagtgacgacaaaagcattggagattgatccttactcgcctgcccatatgtccatatttggtcctcggacatggttcggaatgtccgtgtagtgactggttatatagtttgccgtcgccaacggtctatagtatagatcttgtgctcgtcgtgtagagtcacatcttatattttgccgaaagaaaaaagattttggttctggcgtcgctacatacacattcttcttattcatctgtctatcctagtagttaagagtagctctgctcatcatgtagtcccaaagaatatctatatatagtacattgcgttcatagcctcgaccgacatccagatgttctagacccaaaaacatattgttacatttataccacctccttccccatctcccaaaacttcgtgttcgcatacgtcagacataaatcctccgatggaatctcagcagagtcggaggtcgagctcgtgttcaggctagtgattgcccgaacaatcttcccaacaacaatagtatgatcgtatacatcgaccacgctctctgggagaagtcgacactcaaatatgaatgggaagaagctggattccagtctagaggatccggtttcgggcgcatatgtagatagagtggcctctctacccttccttcgaagcatcggtaaaggcagtattgtaggaccttccttagtaccaagagcctcgtaccggtctcactatcagaaactgacgaaggcgccacacccacgaattcgaacatgccttcttcagcgcaagatttggttccccgcgcaagtcccgtccagactgcagtcgtaggccgt

SEQ ID NO: 8657 - DNA, 1220 bp, Emericella nidulans
ccgtattatttcgatgtcttttcacgcgaacatgagatctctaagctcggcttcaaagccttgtaatgaaactgcgcgtggtcttccgcttttcgtgaaacattatacccgatgacgggaagcacaaacatagcacggatgcagcaagcttgctcccagatatagaccagtttgattgaatgttacagtacatcgatccggatcgggcacccgtgttctgttatgctgtgacccagggccagcagtaaggggtatattagacgtcgcccatcccctgctacttccgccaaaagccaggcactgaccgttcattctctcgttactttgccgcattatcaactatgatggccatctcacttaggcttaatcttctacctacccttctgcttgccctgcagagcagtgccattcgcttggatgctcgggaaccacccgctgattgctccacgaacaggacctatactgcagtttctggagatacctgcgcaaagatcgcaagtgcgcatagcgttccacggggcttattggtcgcgattaatcacgttcggcccgactgtgctgacctgagaggtagtaccaaacctccgcgcttcaggccctgatatgctaaccaggatacagtcggccaagttttatgcttacctgagccttgtaagctgtaccctgtacagcctggggcattatgcatggacattgcggcggccaactctctcagcattcaggaacttctcgagtggaacacatacatcaatcccgaatgtacgaacctccaggctggtgacgaggtctgcgtggccctaccaaccccttcaccgactacaacatttgttgcttccccgacgacgttacaaaaaaggggttacgctacttcgatcgtagagccacctggtcctgtccctcacgggacgacgaagaactgtgggctatactatggagtaaaaccgggcgatttctgtgactcgattgccgaccgattcagcattgactatcagctcttcagggatatcaacccagccattgacgctgattgcacgaatcttgtcccgggtctctactactgcgtctctccaacccgggactgggaccagacaacgactaccatctcgacttcgacgtacgcttctgcgcctgcgcccacgacaagtggaactacttctaattgttacgaggtaggcaagttcggctaatccattgccaatctactaacattgttcttagtg

SEQ ID NO: 8658 - DNA, 1772 bp, Emericella nidulans
agaaagaaaaattcataggacatagacataccgaaccggttgtccgcgccgaccagcccactcatgacgccctgatcgaagcctagcaacaggaatgcctggcaggacgccagggcgatggcaacaaccagcaccctgcctcgaaaatcgtgccttcataaatgcattatgcccttttactctagaattcagcaagcccggcaacggcgggaagcgaaaccgacctgggggtagggggtcattaatccccatactcgcgttgcattcgcccgagtccgaccccgggcaaaccccacatgctcacaccatcaaatgaatcagagtatatattttgtcgaacgccgatcctgtggccttggagagcttgctggctggggtcggggtcctttattccgaccccgagctggacctgatgcggggatcccgcgtggggaacaattcggctcgtatcaggcgagttcgcaccgaatcactgtcaggattacttttcggcattgccaaacaagagccggtactcttccgcgtggctgaagctaagctttggcgtggctcgatgctatgcttattttaaggcctttatgttggcgggctgtaacccttcgattccttccggctttggtgctcggttacctcaaacgggaccattgttaatgacatttaataacatttaatatttatctggttccctggatggggcatagactcttgactctggagcggtcattctagtggaggtacggtctcattcccggctcgcagactctgagatggacgtctgctaactctagtgtgctaagagtgcagtagaacagaggtcgtctggaataatgcaatattgatattggaattgccaatccaagaaaaagaaagaaaaagaaaaaagttataagcactggatttcatggaaaaaaaagtcattcctcttatgttctgataaatttttctgattgatttccccgttgtctgaactatatataatatcatacttcaacagcttgtcaggctacactttctatcctgatccgcacgtcaacataatctaagacctaaggcggaaaagagagtgatataaaatatattagacctgtttggacatttgttcaagtctttcatacattgactgggttgactgctgactctatatggacggcattaatagaagcaatggcatggcttcggagatgatacgacagcatttaggctatctcaaacttctttattgatttagtccgtggtaggcgagatacggtgcttccagtacaagtcgttaggctgattataacctatgtcgcgccttcctacagtcgtggactagctaggtacactcgcccagatcaatgttgccttgcaaccagcaatttagcaagtacctcctctccagcagcatcattaatacgtattgttattattatcgtttcgcaatcctaaaatgccgttcaccatctgttcccttctaccgtccgattacgtcgaggctttcacggtagccgacctagcgttcgcctcattaaataccctgctctacaatacataccctctgtcgccagagtcaactgagaaactcacagcagcgcggctacgggacatcgaggcaatgccgagggcgaacatgttcaaagctgttgacacggagacgggaaaaatatcggggtcgcgcggtgggttgtcgcgaaggaagaggagatcgtcgaccagagtattgaagacaccgtcagcaacgacattatgcaccgtacaagtcccgaaacgacgatgcatcgactcgggggttt

SEQ ID NO: 8659 - DNA, 514 bp, Emericella nidulans
gcctatcagccgactgttgctttggccaatgccttgaagagtgttatccatacatcaggtcatcctgtgcctgcgtcagtgaggaaaacaacagtgatgagttagaatcccacatctttcaccttgcgaggcgcaaagaactcgaaccgatcagccttatgcttattattgtatgaataattgactcctaaggcttcttgattggagctttactcacagtaacctcgatattctcaccgaacattgcccggagcagctgctcgagccttgatttgtagatgtatgctgtaagatcagcgggcacgatgttctgcacgtagttgcacttgtcactcatagttagtatctctggcacacttcgcccgaagatggtaggtagtggagcaggaaaatgtggcaatgaagggcaagaactcgcggcgagcaaggctaaagaaatggcatactgggcttgagcctcagtcccagcctgacgtggaaatatccctgtttgtttgctgcgtcgacagaccga

SEQ ID NO: 8660 - DNA, 604 bp, Emericella nidulans
ctctgggcagtcgaatgccaccgatgacacctctgtcggcgttcagcggagataaaacctcagatatgaagctgacgctttaatgtggctaggggacccatctttcaacgtttcatggtggggagcttggatgggctcccgtaggccgacaggtgaaactttgcgaatgactggatgctcttgtctcagatgcactgatttggacgtccctgtgactgcagtctaggtgccttgtataggttgcatctccagatacataattctacggtaagcaatatctcaaccaggcgtgaaatttgtaagatgtatatagacactgtggaagccaatggctcaaggagtataatcaacttaaaagcacaagagagcgagaaaatcctctcagatacaagtgacatcactacttagtttatatgtagctggtaccggaagccagcacataaactggaatggatcgatagatctatacctcgacgccgagtgatgataaattggcattgctagaactcaagtcaccaataataatacttatttccagcagctacaattgatctggacattctacttgaagcctctcggcaagcagcccaacacagacatagca

SEQ ID NO: 8661 - DNA, 250 bp, Emericella nidulans
gatgaacctcacagtcgttctagcgcatggcactgttatgaagactcgatgacgtcctcggtcaccatcagcgtggatataaccttactggttctgtttgtagtgtcagaagggatacttggtatagttaccgaagctggtctcaagctggccgcgattgtcgaggagacacgatttgcagtcgtatcattcctactatccgcgatgctgcatccaccgcagatgcagctggtcaggtaaggggttcctg

SEQ ID NO: 8662 - DNA, 1155 bp, Emericella nidulans
ggatatgatcgggttgatgtagaagatccatcgccaggtcgtcccgttgataatcccccctgccagcagagggccgcagatgaaggcgattccattgaccgcgccgagaataccgttgaagacggcgactttggcccgggggaccgattgcgagaggattgttagggctccagacaggatgccgcctgcgccgatgcctgcgatagttcggccgctgcacgacagtcagcgactacatttccttttctcttatttacttctcctgtacgtttgacttacaggatcagggcgatagaattgggtgcggttgcgcagatgatagagccgatctcgaacagcaagagtgcgcccaagtagacgatcttgaccggcaacatggaatacagccggccgaagacgagctgaaaggcacagtcggtgaacaggtacgcagacccgtaccaaccaatgtcctgcagcgactggaattcatcggtaatggtcgcgaccgcggtgcctagcaccacctcatcctgatacgctcagcgggactctcccagaccggaggcgatacttaccaaggcaacttggaagactgacagacacagaccgacgaagatgaatgagaatttcagatggccgacataatgcacctcttcctcctcttcgcgctcttcaaatggggtggaggaacgcgcactgagctcgtctggcgtgagcgacggggtctgagtcttttccatggcgaggggtcaaaatctgagagacaaaaagggctgaccggtcgctacatcatgaaaaagcgagagtcgaggtaggtaaaggtaggtaaagtacaaagtgactggtgagcaggcatcctgaggtgcgcggtgggtgacggtgttggtctgttaggcagagaccagtgcgtcagcaagctcacttgtactttgttttttgtttttcttcgccaggcatgcagcttgagtaaggtatcattggctaatggcgagatctttgcaccaatgacccatcggtcttacctgcaaggggattagaggcctggcattgggggccagactgccagagcctgtcaggacgcctaagctcaaatgagccccccaccaccctcaggggacattgctaactcgccatttatgaaatttgcatcggtagtcagtttacccttccgct

SEQ ID NO: 8663 - DNA, 466 bp, Emericella nidulans
cagtttgcctttgtgacagtcttagggccatctgctggctctaactcctttagcatgatgacaaatctccataatatccacccactataagagtgaccttggatcattcccgaacagccgagtgaactctttcttgaggctgccggcccgctgcccatgccgggctgggcgctcactatgggctgacataacacaggagctagcctctataggggatacggtcgcttgacggagtgggtgtattgcgtctgcaacttgctggatatgatatatacctgtatcctgccatccgcagacatcgagaggagctaactgcatggggacatacacagactctacacgtagcagctggccccggctggactgcgtagcaaccctggcaaacacattgacggagtagaggaggcacctgcatagggtggcttgaaccacagagaccagcatggaaaggcttgaagatctaggg

SEQ ID NO: 8664 - DNA, 1658 bp, Emericella nidulans
attcgaaccggtctcctcggcgccgggatgggcgcgtccacccctgtaacttcctgcctagataatagtgattttgacggcaaagcagactgtgagaacggggtgatcggggacgtaaggctggcggaagtgctactggcaccctcgacggaagttgggaaggcagtgttcaagttggtaggctgatcgcccgctgaaggccgttcggaggtggacagcgaaataaaagtatcgacacacttggctaaagcacgattagatgagaaaccaccaaactcacatatcatcgtgtggaatatacgcaccaataatagtctcctcaaattcgccgccgttgtcaaggttgaacagtttcccagcgcccaatgcaaaaaccatgctctcatggtattcctggaggtggtagtagaccttggcggcgaccagagcggcaagttcgcgttcggggaaatcttcatcttcgtaaagcgcctctctgagaaattgaatgttagtctgatatccgttgccgcataatcgccggctgtaatggcacaatattggacgagatgataaacaaacatttgcgggatagcatcaactacttccgtccagagaaggtcgatctgagagtctagtgtctgcagagcaaacaccttcagttctgagtcaggctccgagagaaagccaacaaggccagcagccgaagcgagcccgaccatagtgaggaggttgatggactagcagctggagagatgatgacggcgctagaggaggcgacagcttcaacggagcttcggctggatggtttaaagggtcaggtcgtaagaagaaaagacctgggggagaaatgtccgacaagtaacgaaaagtacaagaaacaaggatggagaaaggtgaaacaatacaaaaacgttgaagatgcagagacgagcacacgtcaacggatggcaggctgatggaagctgtcggaaaggtacccatggtccctccagcccgccctaccgaaatgtcacgtgccaacaggcactcgatgggaagccgcgtgagctcagctctaacttgtgcacgaggacaaaaggccggtggttcaatcttcaataagcgatcgcttcctaatgctgatatccctactagataatatactctgcatctgtcgtcttacaacgtgctttgtttttgtcacaggagatgtcggctattttcccgcaaaacatggctcacagcctagtgcctgtacctcttagaacaactgcacatcaagaccctctgctacatgtggagcggcaagcgaagcatatacaacgtaatctgcagcttctcatagacgcccagagcgagggtttgcttgctgggcttagcgatcaacaacctgatgaaagcgcgcttaagagccatgcgacatcctcacggtcacagctgtccagtcttagcggggcttccacagcgtcagttctacagccgcgcaagaagaaaatcggactacacacagcaagagagaatattctcaagtccatgcaggacctcatgcaactccgggaggaagaacgcgaaatacttgcttccaggcaggaggaaataaactatggattgactgatattgaaacgttcaataccaagaaatcgaagttagagcaagccattgcagcaatcaatgagaacatggaaacccagcgtac

SEQ ID NO: 8665 - DNA, 346 bp, Emericella nidulans
gggggtatcctattcccacagatgttacccacatagtgctggatgactacgcactatggtgcaatcactgcaatagctggtgcctgccctaaaacggtatccactcacaatctcacactatattctagcccgtagcactatgtgtaactaacgcagcgcctaatgagctagcctaactacataaattgcggtgcactcactgcccgcttatcatctggaaaaccaagcctaccatctgcattaattaataaaaccacgccccaatatatgcacctggctggtagggcgctaccacccattatttgtcatttgcctcatgagaccatttcattgtactcacgagagc

SEQ ID NO: 8666 - DNA, 679 bp, Emericella nidulans
tagacttacctccctgcagagcatccgcatccagagtctgctcgagctcaggcattgtagcagctcagagcacgttctcgccggctgctcagcgacgcagtagcgttcaaggcagaagggaacggacacggatcaagaggggcggcagtgggctccaaaaaccgaagagagatggaacggtgggcctggcgagcaaacgggagtcagtgagagtggtgagagggacaaaggtacgcagagaatcaatagtctggcttggttgtttgtgaaggtcccaaggtaccccgcatttcagtgcacgcttggctggaagattctctcaccccaccaccttaccatttcgactaagatcataccaacctatctctagcaataacgacttgccagctgcggcaatgagccctggtaaaccagtcctttccggttctaggttcgttatttgaccacctttgtctcaggaagcaggttccgcgagctcgcagtgtccgggccgtacctttcgacgctaagcaaaccagtctccgaagtgaaagtcgagaacggtcggacgctattcttcgctcccacaatacggaatccaagcgatccattccgaaccgtccagacttaatacaacgcctattctccgagccgcccgctcgggcctttgctcgtatagcccaatgggtgcgtctcgtca

SEQ ID NO: 8667 - DNA, 1690 bp, Emericella nidulans
gccatatctagccaatcatgcatggcagattgcggactaactctgtgttagcgagcaccttcgcaccccacgggtccccttcagttccgcgatggttgccgccgtattcgtgcagcgcgcgagctttctgttaaaatgaggtcctagtaagcctcctgctgcagcagggttacggatgtgtgggaccattgtgccgccggagacgagcataatgaatgcgaatccactcgagccagcgccagccgagtgccagacaggtcagaatatagtgccaattgcctgggcgataatgggggccgtcgaaggcgaacattgtctagatgacaagacgcatgtgttttctgctgcggatcccagcagctggcgactgtgccgccaacgcaggtaagcggtcttgcggtgtagaagccggccaagaagcggaagataatatggctctgaatgttagaagagagtgctgcgcctatgaaaacagcagggaggtggtcatactcgccctgtagacggcgttgcgcctgcatatatcggaaatggatcagaaaatagactagccgatatcgcagccatccataaataagcctgtttttccattaacattcaagatggacagattgagtgaccgaatgagagaacccccagtcatcattaatctgaaaactgtcggaactcctcacatccgctaatttagacgacactgacgaattgatggccgaagcaactggcaagagcacaactaaggccactagcacagtcacccagcctcttcgtcatggccaatattgccgcaagcgaggtgcatgcgtaggcaacccatttcgcgttgaggactctgcgttcgggttcttcctgttcttttcctggtgtttgtctttgagtgcatgcagagagtgattcctggcatggcctttctctctagacgtcgacgcccatcctagtggcttttgacaacttggtaaattcgttcgtactgtagatataaccgcatatcctaggttgagaatagctctgctggaaagcaagctgaggctcataagggggtgaatgctagcgaatggggaagggcaaatcggtctctcattaggtactggcatgaaaccccggattatctaggtactagcaaccggatatagctgcatgaaatgattgaataaggcatcagaagacggtaaaagtgatcgcccggaaagtggcatggtgatatatcatgattatggaatcgggacaagtacaagtctatacataaccgtacacgtctacatatctatacctcgaaagcttgggactagttcttcatcgctttccctgccgacacacaccagttattccaatcagtgaaaaatgtcggctgcacatggcactttgagctcagaagctgggccttcctcgtatcgccatagatatccactacccccttgacagcctctttgtcgtgcgctgtcaagaccttgacaactagcaagcttgcctggctacaaccagaagcatgtgccggtgggccactatgcattgcctccgcatggatagctctcaacagttcccagacagcctcaacatcttcagcccgcagagtcgggagtgaagcaccaatgcagagtttcgtatattcgcgcagcactgagttcggcctgttgctgattgcttgactgacgaacgttttgggagccgagcataagcaagatgagatcaagtg

SEQ ID NO: 8668 - DNA, 1261 bp, Emericella nidulans
tccatcattttgcgaccaaacgcaatcttaactcctccatttactcccatcatgtttgacggctccatgtcggtttttttttttgccactgcgttctgatctgtttcttattttcgtttgacgagtagtcttctgcttctttgcttgtcgcaccatttgtcgattccccgatagaaggcgttcggtatacacatatgggcggttgggtgcaactttacttttttcttatgcctattatttccatcccgagttttcccacattcatccttgtccctgccctttgtttatgttgcggcatacagcattccttaacttttcctctaccttcttccactgtacaaaaagcacttttgcgaacgcatccccgccttcagcccctgttgcagctacgcttcataatctttccttcttatacataattttgatcgattgcgagtctggttacgtcggagtcaagcttggacaagagaggccacatgtgagaaagacgttaattgacgttaatgtactcttgccaattctacaagccacttgtaactgttggcgaccattttcataaaccttgtgctttcaaaatccctgcttaccctttttgtgagggctattttagagcttcttgttttaagccgcgtctgcgcgtaaagtgccttctagcgtgtctgaccgccccatcaaggtccggcagtaaattggctggtttgccaataattattttctttcttcagtcaactaccggaacttgattctcgagatttctcatctcacttcagaggtataccactccgggtctcatgatccgctagagaatctcgcttcgcctctggatcggtctcatcacgccgcggcgtactcccaacctacggagggcgcgcgtctatcgcaacaacctcgaaaagctcagtttccataagctacgatggtcatctaagctcctctcaacagtaaaaacaaccctgttcttgggttgttactataattgattttcgcgcctcgtatctcacttctacaaagaggaatgtgctgtgaatcctttttgcccgcttatggaacataatacctcagttttattagtggatagccatggagttcatgaaaattgtcgcgtaaggatcgagtatccgcctttggcttcgttattttgccgttccagctttgatgctaaatgatcttttgctgctaggaagcttcgcgcgttaccggatgaggtccacatcctatgcccccggcagaatgacgattaccatgcgcgatatgacgatga

SEQ ID NO: 8669 - DNA, 1528 bp, Emericella nidulans
gtgcaacatctggatccagcattgcttcctcaaacttccaactatgaaggtcaactgctcgctactgtctactatgacagccgcaatccaggtctgaatcaacatactgtagcccgatcattggagacactcgctatgacctttggggacatccaggccttcactcctttactctcgagccaagaaaacatctctgagtttcacattgagtacttcaatacccgtgacgccgaaaatgtcatgacaactctcaatggaacgtctgtggatgtaagtcgtggccattatactgtttatttggacaaacactaacagcttttcaaggattgcgttgttgaagtttcattcttcaagccggacgtggaaagtgaagcatatccctctccccagagtccatgctctttgaagaaatcccttcctgcttgaacgcttcttatcagaaagacgcctcgtggtcctcgcctcggcatagcgtgctccttacatggagcttagcccaacaggccgatccacaattcctcctggagaacatgctggattaatggactggatgacaagagcgggggaaagtattctaccttctccccgtcgcgagatcgcccgctgcccagatttacgcttaacgaatcaaaatgccgttgatgtcgagcgtatccgcctcgggttggatgtccgcaccaccgtatggtctccagctgcatttcactctagccttgctcattatttatacagatcatgctccgaaacattcccaacaagattgaccaggtaagaccatcgagaatacgagatgagaaattaacactgacttcgcaagaccatgctcaaagccatcgttgacgagacaagccacgggaaatatgactttatgtacctgcgtattggtcagtgtgcattgccactcgaagcttggtatcgtgtgtgatgactgatagtttctctaaagatttcgctaataactgcaagtatgttgggacaagttgacatagaaatccctggtcttactgaaccacttgttccagtgttggctatgctttcatcaacttcgaagatgtgagtatctctctacatagcctggataaggagctaacgatatcccagccgatcgatataattgatgttagtttgtgacttcctagcactgagtcatcgcagagtatacacttacgttattcaaagtttgtcaaagcacgagcagggcgcacatggtatgcccaagtttacagaatgcccgacgtagatgctaataccatgcgtaggaactgcttcaacagcgataaggtcgcagaagtgtcatacgcaagtcagtactaatctgcccttgttatgggatttgttttaaacttttgagcagccatccagggtaaggactgtctggacaaaagttcgcaatagtcagtgatgcttgacacccttcgtccgccaaggaagatgtccttcgtgcaagatgaggagtactgacactatgggggagcgatctcatactgcctggcctttgctgaaggagacgttcccgaccgtaccataa

SEQ ID NO: 8670 - DNA, 496 bp, Emericella nidulans
ccatggcatggctctcaccgtcttctcggccctcgtgacggcttcttccctcacagaccctgtgtcgtgtctcatcacatctgttgcgtcacgatggggcccgctgcactttggcgcaacagaatccgcccagcgcgctttggcagatattgggacggaggccggaatccctgccttcctagacgaagcaaacagggtcgtaaaaggttatttggctatggccaccgctcctataagaggatagacccacgagtgcgttttgtccagtcaatccttcatgacctgccttctacccgtctcttgaaattagccgaggccattgagtgcgctgcatcggcggatgactattttcgcagcagggggttataccaaatgcggatttttatgggaactttgtctttacggggatgtacgtttccttccttgattctctcgtcttcttcgcacatgctacacttgtctgggtctctggttgactaactacttcataagaggg

SEQ ID NO: 8671 - DNA, 533 bp, Emericella nidulans
acttcataagagggttcgaggtcgaaatgatcccggcagctatgcttgcgcaacgaatcatgggcatcatggcgcactggcgggagtacatgcgtgagttctgtgcccataccacccgtgcgatgcaacggtgatatcccatcggggtgaattctgttatatgctgacgttcggccacgtacttagtaacatgcggcaagttgtttcgtccagcgcacctctacacgggggacgcgcgggaggatacgtatcgaccgagaatctgagtctggacttgcgctcaagcttgaacgtgtttctagacccaatcgcttgtcctacgtgcgtccgcctggcccagtcaccgtgccatcgtgtttgccaggagggtgttatgcgccactagcgccgccagcttctgaaacgctaggtaccttgggtttttggctgtatactcacgcttcagtctgtcatcaatgaaatgaactacttgatcattttgagtactgcgtatatccatttagtcgaaaaagctacgtcctccctatgcgctt

SEQ ID NO: 8672 - DNA, 1032 bp, Emericella nidulans
gaggtcgattaacaatatcaaaccctctctgaagagaagccagacaactcccagtctacggaggacggaggaaaccgagaccaaatcatttctgcagcggcgtagtcaaaagccggaagcgcaatcatttcctcctcagccaggaagctctcgaacaaacagttttaccgatgaagcttctaacgaagccgagagggtgctggaaaagccaccggatgcgtcaaaatacgaacctttctctcaacttcatctttcaaaccgtatcctacctcattcctttatggaccggacccttaaagataagaaggtcctccgcattccagatcttcttcggataatcaagggtccgccctttgagcttccagaagacattgacacagactacgttgtcttcggtatagtagcctccaaatcggatactaaacaagtaaaagaggcgaaatctgtcactgcacaagcggccgatccattcgacgacggtttgaacaacagaaatcagtatatggcaattactctcactgacttgaagtggactattgacttgtttctatttgatacggcctttccacggtattacagactctccgaagggaccctaatcgccattttgaatcctacaatactccccccaccaaagggaaagcttgacacaaatcggttcagtttaagcatctcttcctcagatgacacaatccttgaggtcgggtccgcgcgggacattggctattgtaaagctgtcagaaaggacggtaaaatctgccaagtatgggttgacggtcggaagaccgaattctgcgactttcacgttgatctgcaactacgccgcgcacaagcagatcgcatgggggtaaacaatggaacaggcttgtttggccctgggggtcgctctgggtatcgcaccggcttttatggcggtcaaaagcgatctacacagaaagggtctggagagggacatcacaccccacatggcgcacattacgaccatgggacccagtcattatactatgtggcacccagcttgaaaccgaataa

SEQ ID NO: 8673 - DNA, 985 bp, Emericella nidulans
aaggggagagggaagagaaacgttaagatgatggagattggagcgtcgagtgtaagactggtggagagcaacgccagcgccagaaccaggagcagcagcggtaaacggcaaacctggtggctctggtcagttcacgtaaaactcaacaccgggcaggctaacaaattttatttttatcgctgaatgactcggtaacaaactgtattatttacagcaacataacttaactaacaatccagcactcgaaactgtcgagacaattcatctcctctacggcccagtccgtgataattcatcctgccgtcttagcattattatgctcattatttgtctcagacataaagacgcagaatatttttctaggataaatcttgttgggaacgcaagatccttcgtaacggccagaccagcagcaaccttggttacgaatggggagcggctagacttggaacagcacagcacaacaggctccataccgtcagtcttagtctcttggagcgatcctcctcgagccgggaggcccacggtcaatctgcctggcagcacgaggaacgcagaaatttccaaagtccccgtcccgtcgactagcatttagggactagcatttaggggtcgtcctgacttgggttagtcgagtcccgacttggtcaccgtcagacgcccctgattttcccctcaaaaaaaaaaaagaacatttaaattccatattaataaatttaatcaacctcaagcaggaacaatacggtgtacagcttccaacaaatagaacacctgttttttttttttttgaactgcctgaactgtctcaactgtgaaatattacgaatctctcttcggcaaataagaggcaacagccccttgcccccaacacgagtctcaatgtgagtcgaagatgtccatgtctaacaatgctggacagacaattataataataatgcacccaataagaggcagaagaacgggccgtcagacttcctgggacagt

SEQ ID NO: 8674 - DNA, 819 bp, Emericella nidulans
tactcgaaattcggtattcagatacgatcagtacggccagaccagacttcgcaaacgaacgttctacactacttgaatgacggaaatgtgacattccgattctcatggcggaagaacgaatacattatcccggtggtgatgatcctcaaggctttggtggagacgaatgaccgcgagattttcgaaggaattgtgggcagtgcttcctctgaaggaatcaataacacgttcgtgacagaccgagtcgaactgttgctacggacatacaaggcatacaagttgcatagtcgttcagaatgccgagcattcattggagagaaattcaagcctgttctcggtgtcccggccgatacgcccaacgaggaggccggtacggaatttcttcgcaaggttgtcctgccgcacctgggcaaccagaatgtcacggagacgcaggattatgacaagttcaagatgctcatgttcatgattaggaagctctacgccctcgttgccggtgactgtgcgccggacaaccctgatgctgtttcaaaccaggaaatcttgctaggaggatttctctacggcatgttgttgaaggaaaggctggacgagtgggtgaggtctttcgggcccatcctcagagattggtcaaaccgtaatcatggggccaggtttaccgaccctgcttttgaaagagacttcgtgagcaaggtgatcaggaggtcaacgagaacattggaggtgctatggagtatttcctttcaaccggtaacctcgtcagtccaactggccttgatttgcagcaaacgtctggttacacgtcatggcggagaagat

SEQ ID NO: 8675 - DNA, 1170 bp, Emericella nidulans
atgttgtcttggtatctagcaacccttgcttacgcaatttctcattcagttcttcgggggtgaactgatggttgatcagacggttgatgtccataacttttttagcaagctgggatttcgtgggcattttgcaatcctcaactgccattacctgtcgccatcggttgaattccgcctgttgatgtgtcagccaaggccatgtacaaagtacagctacggcatacctcggtgaacggggagtcggagcaagcaacgaaaggaaacgcgcgtgtggttttgccatgggcgagaacagcatactggtctgtcgtgaatgtccggccgttggctccctccagagcgtatttctttccttctttgatctctaatagaaccattagttcgccacccctactatattgttagttatgactcacctgttatcattgcaaggcgatactcgtttaccccgttaggatttggtccgacgttaagacggacatagcacccaaccatagtatcttcgaatccaggatagaagcacacttgtgcaaagttggtcctgcctacacgagctcgctgaatatctcgaagttcagccggcgggtcatcctttggaggagtaggtgaacgttcgcgatcatcccattcaacttcactctctccatcagcatcctcatcagatactcgagactttgacttgtggtcctttgtcgccgtatcccggcggcgcagttcgtcacgcttgcccttttgctctcgctgtctcttgtatgcttcaatagcctctgaagcctcgccaaccttgcgaccaccgagcgtagtcttttgccgagaactcttgcgactgccttcatctaaatttgcagcgctagccttgcgcttgttcttctttgctttgcgggcctcctctcgctcccgggaagctagaaggcgtcgaagggcgagatcctggttgtgtcgatctacctcttgcgcacgctcagacagaatctgctccctctgaatctcaggcaaggccataatttcctgcatgtcctgcgcggaatggtacagtttttcgtatggatagattggtccctcatcttcaacacccgcatccgaactttcggagtcagaaagaaaatcagattcggacatgctagctgagttgagagaatcggcgggacaagtgttaaaagaagagggggg

SEQ ID NO: 8676 - DNA, 1577 bp, Emericella nidulans
agacggagtattataagagtcctgcctttagtccttacgatcgtgacaagtattagggccaatcatccttttttgtattctgaaatagcacacaccgagcaggacgactgctccggactgaggaagctgaggtagtggaacagctaaaaatgatggcaggctaggccatgcagcgtgcaggaaaggtcaatgtgataagtaaaagcaaagcgctgcgaggttgatccttggggggcgaggggtacgatggttatcggaggggcaacggggcggtgaagaagaccggttcaacgaaacggttgaaagacttgggagaagctgacagtgattcaccacgagcagggatgatgttatgcttgcgatagccagaaagctaaatccactttcttcgggggctttcgaacaaagtaggaatcgaccaagagggttggggtcaagcgggtgatcgacgtagggaaagtcgaagtcgacacagtcaagaaagtcactgaaaagtggagccggaccgaggactaaaagaaattgaaatacatcatgctaaaggaaccttccgcttgcaatcaaggcaatgcacaagttagtaataatggatgacggcgtaattcgtgatgtctaggcgtggctttggggaggaagcatccagaatccaggctggactagggcgtggagaagggcgacgtcattcatccccgtttgccttggacacagcggttcacgaacttgggccaagctgctagttgtcaacattcgcttttgtctaacatgagcccccctcatggaacagaatgaacagtacattgagtagactcaaatattctcccctcatctctcagaattggaatacataccacctggccgtttagggttgtaagaatcatgtgaaaccactcgtcacatgcagaggatgcttatatttcttgatgcctcaggaagtaattgttggcacgtgatattgatccttttcttcccttctattcactcttctcatttcctgatcatcagacaatgttggcaatgtatcgctgattccacccagcttatccctgatgttgcggagcaatgcgctttcgcctaggccgttgcgtatcagccgcctttcctcttatacgccatcgaagtttccaccatgttcccaggctggccgatgttccgaccatttatgagaacagtcttcagaagactctcgaagagcatagagcgttgaatcgcagccgtctaattcgcaaggtctatgtacagtctgactcggatcagtctgatggcccttactattctgcggagaaacctgtcgactctgacttgtctcagtcgcctaaatcacaaggccagccatggaggacggaggaacaaccacctaccgttcttcatggttacgggcccgttaccaaacggaggacgacgaaagacaaaccaaggcctaagggattaatgcagaccttatctccgccagttgactggaaagccactgcagataaaccaagacagtacccatggcttaatggactaaaccctcccacgcctttttcagtgggccacgcacagcttagagcagaggttgaggcactcggaatatcttg

SEQ ID NO: 8677 - DNA, 2173 bp, Emericella nidulans
cgcaatggcgttatttgtgtcgagtatcttttccgaagcgtcttattttacgcctttgcgcttcagtaatggtttccttattagcagtggcattcgagcacgtaaccggacagcgttggtggcagaccgtacaattcccgtggtcaatatgtgaagagggttcactatatcgcagtttcgaaggaactttgtctcgatcgaatcttcgacctcgttaatgagcctctctatttcctctgcgtctttgaactctagagaagcaccaatatccttcattttgactccagtccgagtataaaaattggacaatttgatccgagacaagcaaaatatcatttccgaagcacatttcggctctttaggctgttgtgtcatgccaggaaaaatctgatcatcgttgatattcagcggttgctttgtatcccagctatttggcgctatggaaatcccggtgccagacacctggcccgcatagccatcgagtggaagcaattgccaaaatagccgccggcgcatctgaacctcgaatggaggcagtccaaggtcttcaccgtcacggtgaagccccatgcgctgagaaaggcgaacggcgatacctgtcaagatccagaacgtattagggttgatttgagtgcacatagagatgaggaaaagtgtgtaggcctgaagtactgacattgacgtagtcttcagccacgacgcattgattaaggcctgaaaaaaagaagtccgtcttgacaataaacgggctctcgatgtattgaattcttgtacacactcagcgtctgacatagagaacacagcaaaataatagatcacaaaaagcaagcattcatcactccttgaggccacggccggttgtcttgagactgtgttgaccattttcacaacagtaggaacatggagaaccttacacagaggctcaacattctgtatgtatacgtcccagagcttcgtagcctgctcataacaagggtgttgttcgatgagactctggggacgccctcttatagtccctaaaattgcaaaagctgcttcttgtccagacgaagcgttttcgtcagacccgaaatcatcctggaaatcatcgtgctccgaaaccgacagttgacagagccctccttctccagtatcgagaagaacactgtcaatataacgagattgtccattgtcgaacaggagttggccggatgtgcccgtcattgatgttgaactctcgtcgcaggagtccttactcgatctggactctgaagggagaagattgttgtcctgcaaaatacgttcgtaccgtgccagacgcgcatatacatcctcggactggcttcgcttcctctttgcccgtggtggtggagcttgatagacgcactcaagctttgctttgccgcagctcgaacatgttggggcaactcttgtcacatttgatctttttgcgcacacaggggtgacaattgaagcgcattttggccagccctgtgagaatattttcacggacaccaatatgtggtggtcgcgtgggcgcgggagcaattggtacagggcttgtcgtaccgccgcattccatctctaggttcccgtcgagacgttggttctgagatacggtaaaatatacctacatccatacaatcgcaactaaatcatcttgaataatgacagggtaagcgcagtcaaatttctttaaattacaagctttccctgaaagtgatgcccacagtgtcacagcaagtgactctttccacaagagcaataaggaagatggtaattgggtatactcacctttaggagtgtggttggcttgcattccgcccgcaaaaatgatctttccgtcctttataccaattgggacctagttcaagtacctctaccgatcgtaaggaaacttttttattaagcgttaccggtgccctaatctgcagggtgtttaataaataccggctttatttttaaggtttattttttacagggaaccaacctatagaaacccatcggttagttgtattttctcaactcaaggtctgggtaaaagattcctattttaaatatcagttctttcactattttttctgtagtttttataacactctctattatgtgcctttttcctactttttttcaccaaatcagttctccactctctcttgtcttctttatcttccccctcttttttaatctcatc

SEQ ID NO: 8678 - DNA, 902 bp, Emericella nidulans
attgccgccgctatcgatgaccgtaccaaggccgtctacgtcgagacaataggaaaccctcgctacaatgtgcccgactttgaggtcattgcaaaagtagcccatgagaagggaattccccttgtggtaagtttcccgttgtatggggagtatcgttagctcaccttaacccaggttgacaacaccttcggtgccggaggctactttgttcgacccattgaacatggcgccgacattgtcgtgcacagtgcaactaaatggattggaggtcatggcacaaccatcggaggcgttgtcgtggacagcggcaaattcgactggggcaagaacgccgcgcggtttcctcagttcacgcagccttctgaaggttaccacgggttgaacttctgggagaccttcggccccattgccttcgcgattcgtgtccgggtcgaaatcctgcgcgacctcgggtccgcgctgaacccttttgccgcgcagcagctcatcctgggtctggaaaccctaagcttgcgcgctgagcgtcatgcttccaacgctctggccctcgccaactggctaaagaagaatgatcacgtcagctgggtttcttacgtgggcctagaagagcactccagccacgaagttgcaaagaagtacctcaagcgtgggttcggcggtgtcctatcctttggtgtcaagggtgaggcagccgtcggtagccaggttgtcgacaactttaagctcatctccaatctagcaaagtaagtctggttgcagagcttctataagaggacaaaccaagagctaaccgatctacagtgttggagactccaagaccctcgcgattcaccctggagcaccactcacgagcagttgaccgaccaggagcgaatcgattctggtgttacggaagatgccat

SEQ ID NO: 8679 - DNA, 1769 bp, Emericella nidulans
gaacgtatttggcagtttccgcgcaggaacatagcgatgcgctggattgatttggttcttaggcttccttcagaaagtgagagtggcttgactggggggcatacattatattcattgtcacaggcctaaagcaggcattgttgctccgagccattcgcctttctattacattaaccgccgattccagccagaagttttcagaactctccgagttttgttggataagttatcctcaagtgggcatgaatcagtctttgcggcagttcgttgcagcctgcttcgcgccttcgccacgtcaggacccacgaagtcgaatatgattgattctggatgtttttctccagcaaaatggaagcatgagatccaataaaacggctgtgtggagggcccaatctctggcattaaaagaagtcaaacccgaacttctgtttgtaatccttagggactgtatagtttggcttcacgctctcaattgctcaccgctacagtcaccaccattgctgacacggaatcctggatacgaagcaaaatgagacacaatgacaacgagcttcacggttctggtctcctgacttctgactctttgactcctgagctgtcacggcgccgtggctgagtccctgtctgctttcttagccaaggggaaattcatgtcccggacgccctctttctctttccaatccagattctccgtgcgtgcgagttctcgaaccgtctggccagaaaagcgggtcagcactaagcacggaatgacgcggtcgattatttgattgccgtcctagcgtttttagcccaactgccgccgtctccgggccgccaaccgtggcgttagcaacttggcaacttggcgccataattacggttgctaccaatccagtcaatggcccagggtgctttggtttagtcgtaattcagtcacatggtgtgttcgtaggaagtcagggaagtggagtctcttggaggatagtgtaggcagtctttgtcagggctcgagcctggaagagtcgaggcatgaatcattgtgtggtagagatggaaaataaacatacgttccgtgggcggttgttccatggctgctctcgggactgttggtgggttgttctgcagattctgatgcgcagccgactatgataggccggtgcctgacctatttcaatgaaccaagggacaatttcaatttccgacacgatttgaacgaactgtgctctccaacgtgactcaagggttcggctctctctcgggacatttcatctctgtgcatctcaaacctctaagtggagcatatcttgacaagaatcactgcagttcttcgctggtcgaggtctttcaagctgctctaatctcgaatccccgagtccccgagtcctcaacaaattgtagggctggggccttccttggtttcgttgaaattgcgacggccacaaaggcaggatttgcaaataccgtggtcacgtgcattgtctcactttgctgggcattatcgtggactccgacaggcacgagaaggccgtttatctttaaatcatctttgttgcaaattgaactatgcgcaacctcatttaaagcttggaggctggcgtttttttgataatttcaataaaacttttgcttggcagcaaaccagcccctgggatgtattaagaagccactttggatcaatctttttacaacactgcttgaaaccgtttattgtactggataaatccttgtaaattttcgcctgccatatacttgtgctattaaccgccccgaaaacatgggggtttctt

SEQ ID NO: 8680 - DNA, 169 bp, Emericella nidulans
  unsure (1)..(169): unsure at all n locations
tagctgttgcttgccttttcatttcttgacgttcagatattctgaccgagaatagatgtagcaagacttgaatctacntatctttatgttgatgattttacgaaatgctttagaagaaattctccttggagtccgctagatactcccattctcggagagagtacataaa

SEQ ID NO: 8681 - DNA, 361 bp, Emericella nidulans
tagcagtggttagggggtcaggactcattacccgtggtgacgaacatatatgaaacctgtcttactgtatgaagacataaggaactgtttaaacacccatatacgggaagacgggccaagcttcacagaagctaaccgcctacagactaattaccagactgacctaggaactcggccctgcataagcattcgctcaatgccaaccccgggctgacatagtacgacgcttttatataccgtgttataactggaacgacgcccctacgatctaaacttgaatctacagagggaaacttcttaaattagatacctgtaaaacaccactgagtccgaacttgctttgttttgactagactcattt

SEQ ID NO: 8682 - DNA, 1324 bp, Emericella nidulans
tacaatgtacgtgacactatacaatagctaggatctggacgtacatgtcgtgcgtcactgttttcagatcttttcttggcattcttctcaacggccaacctaatccagtccgacgaatatacaacaggtaaaccggtgcacatgccattgggagaacattgggaggataagtcattagtgagattactcacgacatcaacacccatccaaaggttggtgccatttgtagtgaatgggcctctccatgcggcatttactacaatcgccgctgaaacagagagcggcaccgttccctcgccgcatggaacatccgtgccaatcatttcaaaggcgtccatgtcacaagcgtctataaatgagacaatttcatcgcgaactccgtccaatgcatcacaattttgaatcgccatactagtgagatagttcagttcacagtgccgcggatacgagtcgagttggttcatggtgaactgcgtccaaaatccactaacaaggatttctgcccagttgatagcaggtgcggaagcaacaattccatcgtatgcgttgggatatctctgcgcgacatcatcccttggcgtccgccctgggagcagccgctgaaatacgaataagaaggcttcctgccatagaagccctcagcaatactctttccggcgatggctgcatcgttcaacgagacggatgcgaaatcctcgagccgatggagatcaactttccctggccgttcaaggatccaatcatcaattccttctcgcatgctgcggccacaatctgttgatactgccgcatagccctcccctacggccgccaacatcgccagcttgtttgcagaaaacaagccacagtgatagcccccgccacccaagcccataatccgtccgttccacgtatcatgagtcggaagccacacttccgtattcaccatctctagccggtgagtgtgggtataggcgagcgagacaacgcagtacgagacatccgtaacgttgaccggtccatggttcacatacacgctttccggaatgtactcggatcttccggtgaccaggtgcgctgtgaggaactcaaccgacgcgccaggtatagctggccatgggatactcaggcccgaacatcctagctggaatgtgtccatttgggcgtgtcttggatgacaaaactggatagataggccaaacaggctggcaggaaatgaagcatccacaccagcacaaaagagatcagtatgagaccctggggaatctcggtgacttaatgatgaaatgcaggtgagcacttgagccatccattcatgatgaatgccgccaactaggaaggaacg

SEQ ID NO: 8683 - DNA, 779 bp, Emericella nidulans
cactgactttgtaagcagatgtggatctcgcttgtggtgaaagttgaaaataacaatccagcgttatttacgtgacgtcggttgcgggataggctattaaaccctctacgcgtatcatcggggagttggtaaggccttcattacttattcattattccgcccttcggtattgttgatgttttcgagtccctagcctaaggattcagcagacagctctctgtaactctttagaaaatgccattatactgggatcaactaccctcttggcaacgtgataatcaatatattctttcaggttataggactgtctctaattcttttcgcgagtcgttcgcgagtcttggttatctccataatgagaccgtcaacatctactcccatcttatccctgcgattctcctttcatttttcagcatcccgctccatacgtcactcaaggccaggtacacaaacgtatcaacagcagatactgtagttttgagctgcttcgtcttgggagctgtgttgtgcctggtcatatcagcaacatttcctactgttcagaatcattccccgcacgttgcacgcattgcaaaccaaatggattatattggcattgtattcctgatcgttggaagttttgttccgagtatcttctatgggttttactgccaacctgttttacaaacggtctatctaaccatggtatgtcctgattattctttatatattaactgctgaataagaggacttacgcgtatttgcaaaaaaactcccctccgctcacatagcgccgctgc

SEQ ID NO: 8684 - DNA, 2076 bp, Emericella nidulans
agaagagaagagaaaaggattgaagatgaaaaatgaggggaagaatatagaagaagtgtaagaagaaaaaaaaatgaaaagaaaaatggggaaatggaataaaaagtagaaaaataaagaaagaagagaagaagaaaagagagtaaaaaagaagtgaaaaagaagaatagtaggggtaggaaagaaatagagaaaagattaaagaggaagaaaagaaagtagtgaaagaagaaagtaaaagaagagaagagattaaaaaaagattgaggggagtagaagttagacattataggagaaaaaaaaagaaaggggagcgtcacccataaatagacagggaaaaaataaagaggggaacaaaaaattatagggaaaccaaccgggaataagaaatcaaaatattgtccgggtaaggaaaacgcccactccgaaagttggtaaaggaatgcactaaaaggaacccctacatcaaaaccctgtcaaagtctggcacccttccggggattttaaggcgcggtccccttaatatgcgcaatggaccataaaactcgccaatatggggcgcaaaattcgcggccaatgccccccaaaatacgagggttacgagaaagccggcgtcaattgagacgccggatatggccatggaaccaattatatcgatcacgatcataatgaccgtcgctgtcacgacggctcctgtggcaacagagccgagcagaatagaggtaatagcaaagataattgccacggcagatccaagcagagtacctgcgacctgtactatagacacatactggtcgaagaaaatgtacgtcttggagtaaggaaacacatcaatcccgtgctctgctgataagccatcagcaatgcgtctagcagagatataagatttgatgaaatcgtcctgggtcctcaggggagtatgggaagttctgaagtggcttgcgttggtcgtgatgcgttttgggtcaaaaacgagggcattgctatatggcgccttcccaccgagagggcatgacgcatccgtgggcgacttgatccatttctcaagatagtggatgaattcggcgccttctggcataccagtcaggctgatgttccaaccgggtgttctaccttcgaagcacagcttgccatcttcatagcagcaatcttgttgcgggtttagccagtagaaaaagtcatcaatccagctggcagtggccccggctatataagacacattcgaccgtttcgactcttgctccagcacaaatggcagtgagtattcctcgcacgtggtgaaccggccacaaagttgccgctggtgttctcttttggtgatgttcacgtttcgagtgacaaagtataccggaggaccactattaaagtattcgctcagatcatcgaagtagtcaatcagatacgagtcactcggcaatgcaatacgttgatccaagcccatagccacctctggggtcaaagccagcccggcggccaaaatgccgagaaaagtgatcaccaccactaccttcactctgcggttaagaaggagaggcgcataaactttgcgaatgaacttctggaggatgccttccctgtcctggtcatcaaaagccaagtcctcaggcataccagaatgagccttacgcacagtcaagcagggaatgcagtccgcgcggaggctctcgacgcgcttctgattcaaggcgagaacagaaacaaacatcgtaatctgcaggacagcattaataaaaacagcacccgctgcgtagatggcaaagtttctgactgcgggcattccgacaaagactcccagcgcaaaggcgacggtttctgtaatagcggagagaaagatactaggaccaatgcgaccaatagctcgggaaatgcgctcgtcaatctcttcatccggatgactgacatttaggcgctcaaattcatagactatgagaaatatattgtccacaccaacagctaagacaaggaaaggaatcacctcagcgatgattaatgtgacctaaacgaatgcagcggagaacagcccaactgacgcggacactgacatcagagcaatgacgatgcaaaacgacgccgagg

SEQ ID NO: 8685 - DNA, 99 bp, Emericella nidulans
cattgaaactagttgtccggatgctacttcagctggcaacagtggagtatcctgtcggagtcaatggtgaccgggtcctcgtgagctactcaagcacat

SEQ ID NO: 8686 - DNA, 459 bp, Emericella nidulans
gcgtgtgcggggagacgagcggaacaaaaatttcctcgtggtggaaagacttagtgcacacctggttcggacactctggggccggtcccatcttatgatacgagcacagtttgacatgcaccttattgtacgccaggcgcaagacccttatgaagtgttgtgatgactgggtggcttcttgacttgaacatgagtcactactggctatacatatactgctgagctggagcttggtataaatgggtggttattcttgtactttttgcagcttttggcctcgaattttattgtccctcttatggaccttgaaaccggactttttaggctttttggacctcctcttccttgaggctaattgccattttgacttttatcacaatttctccccttaggatttgtttccttttcgctttaaagggtctggcccccagtctcttggactctttattgactccctat

SEQ ID NO: 8687 - DNA, 107 bp, Emericella nidulans
aagggttctaaatgggcaatacaaagtagtaggtgtcgaggattttagggtggtctatgaggcgggagcgcatagttagcggatgagtttaaaccaagtgggttatt

SEQ ID NO: 8688 - DNA, 957 bp, Emericella nidulans
cacattagcataaaaatacatagaaaaaaaatccataaagaaagcaagagatagaaataaacatagaacaccagccacaagacgaggaacttaccacccgatcgcatcagcaatataagacccgtagatcggcccagcagccagacctagcatggtgcagcaattccacagccagaggaaccacagccttggccgactgctatactgatcctcaatgcttcccgctaacacgatggctgggaccgccgccgagaatccagcaatgaaccggccgatgaacgcaccggccggtgaggggaccacccctgtgataatgcaggcaacaacataagtccctgccgagatgaggtatgagagacgccggcccagcgcctcggagaatgggggcatgatgactgctccaaatgcctgtcccatcccgtacatgaactggtagcccgtgagggagacgactctgctgagaccgtactcggtcatggcggactcggaggctgatgcgccagtagtgctaagcagagaggtatagaattcccagaagaggataatcaggtcgtcgtagactttgcgggggacgggccaattgcgcggaaagtcctcatgcgaacggtcccagtccatagtcttgctgcccgttcgacggagaccacggctggcggcctccgagtgaatgcggtcttcgtgttgatgctcttctgggttggcagccatggttgctatagacgggatgcactctaggtgagcggcgccaagtaaaagagcttattgtttgttttaagggtacgatgctaagtttccatatctttagccggtggagacatgacgacaggttgatagaatcagacgcagtagtccttagtgatgatccgtccacgtcgaattatgagtagagtctctgagacgcgcgtttcaccagtcttatagagcatgctgggcgtccagacatggctcggtgggaca

SEQ ID NO: 8689 - DNA, 995 bp, Emericella nidulans
tcgacgagcagacgttgcttctaacatcgagttgaatagtgaaggcaagcttccgcttgctgtagtatctcttgcatttccgactatgccaattggacttcatatctttgaaccgcggtaccgtcttatgatccaaagagtcatggaaagcgggagtcgaaaatttggcatggtgatgcccaaccgaagaggccatcttcaacagggacttggaagggcaccgttcatgcggtatgggactatactggccatcaaccgccatgaactgctacctgatggaaggagcctccttattgctaccggaacatcccgctttaaagtgctcagttgggagctggtggatggctaccacgttggtaagatccagcgggttgacgatgtttcaatttccgaggaggaggcccaggaatcaagagagactgctactattgaaccaggaagcagcacttccgacaggtccatagattccatgtcaacccaggaactataccagttggcgctggattttgtgctcagagagcgcagactaggagcaccatggttacaccctcgtgttttgctagcttatggggcattaccgactgaccccgctctatttccgtggtggtttgcgacagtcctgcctaggtgggaggaggaaaaatatatgctgttggaaacaacgtcagttaggcaaagactaaaaattaccgcgcgatgggtctaaagacgagagtcttgacagtggtaagtagcctcccagtattccaacctgagagtaggcaaataagcattgatactcacgcatggtctaggttcgtccgcggccgtccaccaatatatactgtcttatgactagcggtccctctcctcgtcttaaccataatctcttggctcgtagggcctgggacaagtatctcggtctctagggttgtcacgactttcgggccaaaacccatgtccgtcgtcagtaacgttcggcccgggtgcggcacgtacacaccggggctttgatc

SEQ ID NO: 8690 - DNA, 176 bp, Emericella nidulans
gcatgattgtgataactagacgtgtcaaccgatgacggatgtagaagtcgggtaggtggtgaatgtgtaacacaggtcgctggtagctgatggacatgagtactactacaggcgcatttgtcttgcaaatacccctatgccgagcctcctccgaaggtcgcaatttaatactggtg

SEQ ID NO: 8691 - DNA, 1143 bp, Emericella nidulans
tcgattgcccttctcatcgggttcccttcttcccagagaccccacgctaactgttgttgcgcgatcgagtggacgtggccaggtcaagtctcctgagactccggggcgggctagatgaacaggatccctacgtggctcgagaatacgcagagctgcagagcatggctgaagttggagcggagaataagcgtcggctggatgctcttcggtccctggtcaaggaatgttctcaagattctgctgcgcgtcatcttctagtctttgtggtcctgatccaaatgttcttcatcatgtcaggcggcaattccatcacgtactacactccgaccatcttgaagccgatcggactcgccgatgatcaggcactcctattcactaccgtctatggcttgatgaaggttgtatccgtcttcctgtacgcattttccctgactgagcgatttggcagtcgtccactacttctgatcggatcgaccatcaacgttctgtgtctgctttacctctccgtgttcctcggtgtcgccagcatctctggcgcggcatctccttctccagcggcctgggtcacgatcgttgccatttgtatcttcgcaattgggtatggttttggttgggctccagtattctcactgaccgcgtctgaaatctgccctacccatctgcgcggcccgattgttgcttttgccttcacttaccagaactcaactttggtatctcgcgcgggtttttgaatatgactgaggatatgcacgcctggggcccgttcgctttgttcgccgcgttcattgcctgcggcacggcctggtcttacgtagccttccctgagtgtaagggcaggagtatggagaacgtcggtaccattttctcgctgccatggtaccgcacagggtcagcaaggtaccagaccattctggaagagagggtgacgatggagacttggtgaaagcggcgtgagcagcatacaccaggaaaataccctgaagtcttagcatctgtattcctatccatagacggtagttaaatataatagcgtggatcccgatcggcctcgcataagcttatgcgacctcgccagaattacttaagcttcactgctcttcctcttcgtgagtgtttcatagcttttttttctaattcaaggaa

SEQ ID NO: 8692 - DNA, 1580 bp, Emericella nidulans
tgtcccctcgccgagtcctgcgacgtgttttgggtaagcaatcagcattgccttgtgtggcgttattatctgacccgtggttctcatacgatgcgggcctgattgacggagaaattcctcgttggtggcaagaacgctggacattgaggctaaatgtcagatacacccggctagccttggacgatgatctttattggccgagaatcgcgctgttcgctgacagcggcctagtttagcttcaaattcatggcatatttgcaccaaccagggcggtgggccggcggtcgaccattgcaagaaatcggtttactccgaagttgcggacccctgggcctccccggattttgtctgccccgcttttcccttcgcccacacttgtgagttaccggtcaggagtcaaggctaggcccggtcagcaacaacggcgtctcttggattctggaagaagactggccttggaaattggggccaatgcgacaatttgccgaccctgtatatatgcgatgcggccttccacttttcggaccctccttccgttcttctgtgccttcgacccccaccatcccggtatccgttgatcagcagtcgcaagggccctttgacgatacccacgctcacaatgggtcgactgtatactttcaaccttgccctgttcgcggcgacagggtcattcttgtttggatatgatagcggtgtgatgaccgatgtcattgcgtcgaagaatttcctgcggtatttcaacaccaccaagacctctgcgattatcggggcgatcaatagcacattctctggaggcggtacggtgacaaaatctctccaattttgaatctcggtctaataaccgcagctgctatcggtgccctccaaggagggttgacgatggatcggtttggccgcaagttcacgatccagatgggcgcttcgatctgtctcgttggggcgatccttcaggctgccgcgacaaacctggctatgatcctcgtcgggcgtattctcgcgggttgggctgtcggtctcatgtccatgtctgtccctgtctatcaatcggaatgcgcgcatcctcgaaaccgcggtatgattatcggtctcgcccagcagatgattggagtcggtttcattgtcagcacgtaagccgctcgttccttaaaatcttcgcgactctgaccgtagtagatggattggctttggctcgttgcacgcacccgagagcagtgaattccaatggcgattcccattggcgttccaggtcgttcctgcagtgatcctgctcattggactgttcttcctacccgagtctccgcgtcacctgatcggaaaggagaaatacgaggaggcaatgaaggttttgcgaaaacttcattatgacggcacgaacgaggactggattcaacgagagtatggcgagatcaagtccaccattgacgcagaaagggccgtgaccgagcctggttggctagtgatgttcaaggttcctcagtataggactcggttattgtacgctcaccaccctaaagattattgaccacggctgaccggtacaggcacggtgttctcgtccaggtatcacgcagatgacaggt

SEQ ID NO: 8693 - DNA, 1376 bp, Emericella nidulans
  unsure (1)..(1376): unsure at all n locations
ggccgagacaactctattgccatggaaagggctctaggtttgtgtacttgagcaagatttgctcttggcatgctgcgcaatgctagaacaggacaggttgtagcaactgcgctcagaaattggcatccaagaggtaaggggactgtacgtttccagccctacatagcatgcatcattcagaatatcttgatgcaagttgcaagctttctgcggttgtaccacactgctttccaagccaccaaagcgctccaagctgaatcgtggtgtagaagactagaagcaagaatgtgcatgaacagctcccttcctgcagccttgtgtttaggggtatccttgatcatggtccctaacttcgtgcaggctcgcggagtaatatctgcgcggagttccagcacagtacttctgtgcctacactattccgagacatccattcagcaggcggcatatttttgcgtgtaacgttgaagcggatttttgggcactgattgcagatggcgttagtgatgacgacacactggaccgatcctggatcaaggtcctttgtcaacccttgtacaccatcaatgaatgaagattccggttagacaaatggcgtagcccggcttcaagtggctgatcaatgataaaggaagctgcgcccttggatacctacgcctttcacaacaaacagctgttaggctggtcgagagtggaagggcgagaaatggagcgagaagtattcgagtgtcatgtgtacaatccgcacccttggcccggcagtatcgcaattcaataggtacgcttgaagataagagctcagctcggcaggacaatatgtataaccagccggccacccagtgttggctgttggtcagtgggaagaatatgggaaatggatcgaatcctaggagaaccagatacgaaagttcgtatcgaattcacaaatcagagccgtaatacgagtcaagtaatgttttgtaaagacgatggcagtacagaatcaacaactcattcgcacctgaatcggtatgtccaggcgctgcacccgggcgtagagaaagcaatcagaattcaaaagctgcaggtgaagtcaagacaaagctgccgaatctcacgggctgcagccacgtaacgaatagaccaacctacaatcgccgtgagtggctcgcctgcagaaccaacaggtctcacggtcacctttagccctaagtaagcggccccgactgcccgggcgcagatgtgatcttgccgagccgcgcgattatgcgttgtccacacagaagaggtatgtgcagcgtccctaggatgagaaatatgtccccgatcgcctaatcacgccgcgggtgtancaagagatggtgatgagatccttgggaacgtagcctgagcttgctccg

SEQ ID NO: 8694 - DNA, 860 bp, Emericella nidulans
atccactgtctgcggaaccactagaccacattagtgagaattcagcgcttctgggtcaaacactgacgaacgagatgccagggacggcgagacacagcgtaaaggcccccagttcccgctcgaaatgctctagtttagggccgggcgtatgacggcgcgttttttcagctggaatgtcatcctcaggaactcatcgatgagtcggacgatggcgccgtaacggtcgctagtcttccgtcacctgaggtttgcttctttttctgggtatgtgtcagtcagtaatcgcaagcctagccagctggttctttgctgagactcagtgcggccgattgcacactgcgtgtcaggccatcggtttcagagtgccgtttcagaatctccagattgactcatggtggctgaaccaatcatgtgacgcagtccacgccttacacaatccgctgaggctgaagcaaccttgtcaaatcatcagcctcatttatacttttactgcccaccacaccttgctctccctactcgcaagtatactcgccgagtacggcgtactctctttctcggagaactctagcggtttcgccaaaaataacgactctggcgtattacgcgatgttacacccttatgactaattttaaactaaagtacatgctaggcaattatgcaacagtaacagacgccgggccggaaatactttgtagaagaacaacaggaagggtttagtaagcccgggccaagcttgcaggtcagtccgttgccagtcccaccgcacattggggtacgtcttcgcctttgttcttctggcattcagcgcgcaatccattctggaccaacgtgtttttcgcatttcggggacagaattcga

SEQ ID NO: 8695 - DNA, 1021 bp, Emericella nidulans
gaccggccaaacgaccatgtcaacagccaagacggggattcagtccaagttgcaggtcctaacgatgacgtgcgtacatctcgacagctcaccagcagcctggtagcctcgcaatgatataagagcccgggtcgtccacatcaaggtagatacattgtctctcagaagggtacgcaggatcaatacaagagacgatcgcaccggccttgagaatacccatcgcggccacgacaaggtcaacgccacggtaagcgtacgccatgacaacctcgcccctctcaacgccagcctcaaccaggtgatgaccaaggatgtttgacgcctcattgatttgtctataagtgaactcgcggtgagaagaagtggcggacttcgtctcgacaacgcaaagcttttccgggtgcttctcagcgttctcagcaaatatatcgtggatggcgccccggaatttagaccagtgcaggtcagcagttgggtcggggagaagagcgcgctgctccggtgtcataaaatcaatgcgcccaattgccgtctccgggtcgcttgtggcattcttaaccaattgagccacctggctcaagatagtgctaatcctagcactggagaacaagcgctggttgtagtacgctcccaactccgtcgctccatcagaggtgcttgcgggcgccacattgaccaccagatccgtcgtttcaaaggtattggccgggtactcctgcgatgcagcaggggcatcgtaggcggcgaatcggaagaggacaggcgttctctcggattgtgatttctcctgaatataggatcgtagactgcccaatggcacgatttcggcggacccttcatcgtaggcctggacaagtcagacggcgcgacagagctggcagcggatgcaattaccttctgaaccttggcatatagctgtaaaaaagtctctgagggatcaattgggactaacaaaacaaaaggacggccatcgtcaccaagactagtgccgatagcgaggtcgtcatcaccgaacaaccga

SEQ ID NO: 8696 - DNA, 216 bp, Emericella nidulans
gatttccaaacgcacgaggggttgatggcgccttacgacgcgatgttaggcccagcattccagatcagtcgaacatcgtatccggcgcaatccaggcctgcctcgttgacaggccctacatgcaacatgcgtctcatcgcatttgatgcgacgttttcgacaagtccaacaactggggagtcatactgtcagcttcaatggcaaacggttcggggg

SEQ ID NO: 8697 - DNA, 1303 bp, Emericella nidulans
aattgagataacatgggctgtagagctactcacttgttttttttctgtaagtcttgatggacgacagagggaacggtgggaaccgacaaccaggcatctggggactgatcaccgctgtccttaaagctccaaccctctgaaagaacgtgttgtgtgaaggcacccatcttcagagatatgctcgctgcggtgactccgtcgactgaactgtggcaaagacagcagctggtttcgaagggggttcaaaacattcttaactgccgacggctgccatttatcctgtgggtagctccgcgtccgagagccagtcattctgagcatcgtaaccaccgtcccctcttctgctttgatagtcctttggagtcgagagctagacggaggagagcccgtgcctcaggtgcgcgctttacccgtttaggagggccttggggagggacctccgtggcatatctggttaagactggactcggctctttctccgcctggggcactccccaaacctcctaaggccgcctcttttgcgagttcatctgagaaattcgaactccacactgcattgtgaagagtacagaccctctccaaattttctgaggctgtggagtccacatatcgtggagcagtaaacaatatgggaacatgcctcctatcttctgtcaacttttcaaaattggttcaagcccaacctctccccgcgtgaagggacggtttgggaacgggtttcgctccgtaaagctctagcaatcattcatcttatgatgagtaggtaagcaagcgctttgccatcagtgtagtaggataaaggcttgctttcgagtcttgaatcccagctgtttcagcagaaccttccggaaactcgagtgccgcatttcccatgtccatgtcggctcctctaacaagttaccagcctcaaaatgatccctgcaatcgttcttgaagaaacggttgaattgagactggcatctataattcatcatcacttggcatatttggtctacctatcggagcaaccttcaggttatttcaggctttatggtcttacgttccgcggttgctgtggagctatggatcgataactagcattgcctattcgctgcctcagcccagaatgattcaagggtgaattaaagggacaccctcaaccgaagacgacgaaggattggggctggaagcccggaacctgcctttgacaggcacactcggcattcttctctcacaatgattcgacggccagcttaagccggggtcaattctatggattacccctcgtcgcttaaaacgacacaaggacatttgcgccactaga

SEQ ID NO: 8698 - DNA, 1070 bp, Emericella nidulans
aagacccgcaggaggaagcagcgaaacgggaaagaatacgacagaagctcttttccttgggaccgccgccggtgaaaccaagagcaaagagcaaaggatctccggaagttaataaggttgaatcgacgactaccagttctgcacagtcaccaccaaaacccccagtgccagagcccactggggcgccaaaacagtacggcatgatgaaggtccatcaccctgataccgtgaaaaaactcatcgagagagaaagaaatcaagacaagcccgcaccagcggctagctctaagcgtcctccctctcctagtcgggagccgaaagcagatgctgttgcaaccaacggacttcaaccagcacccgaatcgacaggccaagccgaagatatggctgtggagcagaaggttgatgaagagaatgctcaatggaaaagtgggattaatgtaccaaactacacgccttggacagcgaataataaactcgtcggccccgcagctcctatcacgaatccctggaagcctttcaccaacgacaagacgttaggtaacggcatcttcgaccaatccctggggaactttccagcgagggacttgaccttgcgaaatcatctcagtttggagcaatcctccctacctccaagctcacagccattccctcagactacgcgttctgcccaggaaagtacaacaatatccccgttgccctcgcccgaaactaggcatgcttcctatgacacgttaagccctattgctcgccccggccctattggtcctcctaggacccagcagtcacactggcagcatgagacacgtaccgctgcatggaacgaattccacgccgttgctacgaagcgtgaggctgaggacaacgtgacagtacgcagcgacctgaatgctcgtgaaaaccaaactacacttccggccacattcaacgaaacttgcggcaagtccgcccaggtgaccaggctgggcaaaaacaagtcgtaagtatttccaggtcaacagatggaaatcctccacttgtgaacccttaaccggccttgaacatcctgttggttcacttcctttcgtgga

SEQ ID NO: 8699 - DNA, 704 bp, Emericella nidulans
agattagtctcgactgtaaagccatgatccattcggactggtcgagcacacaagttggcgatcacatcactgcggtcgggattctgccgcgtaagggggattagtgagttcctgcaaccgcctaccgcctcctgcttttgctttagcgcccacacgtgacatcacgatctgccaggattcatcgcctatagtgtagctacgcgcttaacaagttcttaacgagttcgcatctacaagtcccactagccggtgtcctgactcttgctaggcctaagagtggtagtctgagctaattggagtagatctcttgtacagtggatcgaggttcgtctcgctccctgattttgggcaggggaacgtaattgcggatattggatgttggcagaacgtcgaagaaacaagctgaatgctaggcagatgcccaataagaccgtcggcattgtatcgtgcctacttcgtcactctggggtttgtccagactccaaaccagacagccaattgccgataatcggcagattcgaaagctgggggatcgctccgatgatgtattgacggcggaaaacctcgggccaatggggctgggtctatatggctcctgtttccgctcatagatatggctcagtatatatagagggccaggcggcattagaagcagtaaagattgcaggtcaatcaaacggtatactacaaatcgtacactacgc

SEQ ID NO: 8700 - DNA, 1235 bp, Emericella nidulans
gctgattattggtctgaatcgctcaactgttgactattgtctatcggcgtgttatctaacaatggttattgacagtgactgtggtgatgatatctctcttacgtccacggtcgagagtgaacaggcttccgagtactttgttgacaccattctggcggagtacgaatttgccgaagatgatataagataccttgtcaaatgggatggctacgatatacatcgatgtacttgggaacccaaagggaatttcaacaacgtccacgagacgctgctcgaatgggaggagaagaagcagcgaattgccgaaggcaaggaaccagcatttgatgtagctgtctgggaggaaacttgtcgtcgattggacgagaaaaagcaggaaaggaagcgcagaagagcagctaagcgaagagaaattgctgcatcacaaggaaagcgcagtcacacagctgctaaagacgctccgaccgtacagaggatcacttcccgcaaagcttcaactgcctcagctcgccgacctccaggtccagctaggtctctgtactcggatagtgtccatccggcccgacagctgtcaggctcatcaactccaagaccgccgccaccggtcctgtttggaaacagccaatcggccccgaaaactgtgcggcccaacaagatcttgagtcctgacgatggaaagcctttcaattccatttacaagaaatggaagagtgatcaacgcgcaaagaataaagagttgatgccgcacatcagtcaagttgatataaggcgaccatctgactgggctactatgccatcggtgaaggcaactcagccgggcaattctcgttcgcttggtacgggctatgacagcccggaacaacatgcaccacggtctgctctagcctccccgcaattgtctcacccacatccacagtccccagatgcatcaatcaggttggagtgtggcatttggaacggttctgagtctgagcaagacctggtcgccaagcgccacttgcagtggatctagctgttgaagttgagcccaaatacatttgaagcccgattgaaccttaagattctttcacggacccggttgttttgtgggcgccaaatttggtcttaggcacctatggactagacttcgcgataggttacctgctttaggtgggggttattcctccttaaaccctggggcttgtggaccaaggaaatggttcgtaccttggttgtgccaaaattaagtcttgaaa

SEQ ID NO: 8701 - DNA, 699 bp, Emericella nidulans
ttattctaacaacctgttgactggtcccagagtgtctctgattgtaagagtgagataccccctaggctggtgtgtatcaccaaggaaactgaaagggggagagccgggtggataggcaaccagcacctccttggagccaatatgggctattgcagctttatgtttgctgtaaagtgtttcagctgctttttggatatgcggttcggtgtcgtcgaacccttcaatccagccattggcgtacttggtgtttgtcatctaacgaaggttgtgttagcgaatctaaggcaatatgctgagggggcaaggaaagctcctcttgcgagtacttacaccagaacaaaattgttcgtactgatccagcgaacatagatgccgaagccagatatcgattttgcctttgttatactttgatcttgtcccgagaattcccgcagtatactgagctcccataccacatatcctagcatctccaagacattgcttatctggaccaaaccaaagggtaacgaacaattctccttggttccaccagcgccgggggtttgagtgcggaatatgcctccacctgaaactaggtctcctatcgcgaaagtctagttccataggtgccctaggaccagatttggcgaccacaaaagcacgcggttccgttggaggagtcttaggtcgatcggcttcgatgttttggctcaactgaca

SEQ ID NO: 8702 - DNA, 1705 bp, Emericella nidulans
aaatgtgtaggcgtcaatacaggaagatgccagcggtgtgctcgagacgaccgtccctgcaaaatcaccaggtgttacccaggaaaatttccaagagagacacaaccagcttcaccgcggcgaacaatatcagtggccgatatgctacatgaatccgccagcttcgagtctattgatagtagtattgatgctaacaatggtaagtactgaagaaggtgaaagggagaagaggctgggggttcaacatctaggaaaatgctcgtggctaaactgcctatagtccaagtggtgaagataacatggcccaagttcctgctgcaactccgagaggcccttgcgctggattcacgcatagagctcgacgaaagcgatatgatggccatgcagacggtatacctccatgaaaaaatgaaagtactcatagctgaatggctatagcaataccaccagccgacgatcctgcaaccaaacgaaatcaaccgtatccagagagcatcccgggcccttccaccgcgagccgttgtgaacttcttgatctcggtatgcttgacccatgcctccgatgttttcttttacctcgaccaggcccagtttctggcggacatcgaccagctctacaccatatcggcatcgcctctgcgtcttgatacaggatttatatgtctagtactttcggttctggcgctcggtagtcagtggacggatttggagcggccgtcgagcttccctgcaactctgccgatggacggcagagatcctggacgagtcttctacgaagaagcccggtcactcattcccgatctgatagaccgaacttctttgacgtccatccaggcgccgtttatactaggtgtttactcgctgccagaccgggccctagggtcggcgtattcctacatggggttggctttgcgtaaggctgttgcgcttgagatacatcagcaagtagatgatgcaagaatgtctgagcacgagagacaggtccgctgccggttatggtgggcggtttattctttggaaaggtgagtaatccaccagtatctttgctggtgtacaagatgacggacggacgaccgatgtataggactaccgctatcaagctaaatcggccccgatccattgaccctgagacaatcagcacaccgcttccagtgcccttgccttccttggaccttgcgcaggcagtagataatatccagcatcagatagcgtatgcgagcttggtgatgatcctagacaggatagatagcctagggtgcgtagagcctgttctgcccatcatggtattttaactaaccctagtttaggacaagaaacctcgacaattcgcagtatgatgtcttacagctggaactagagacctggaaacggaaccttccgccagcgctgcgcatagaaaacgttcgccccagggctcccgattaccgcgccgtcttccacttgcagctcaactatctttacgccaggatcgtcctgggcaaaggctctctcctcaacacgattcagacccacattcaacgccatcggccggtcctcgaaacaaacacaaggccggacttagaaacagtgttggacaagctagcattatcctgcgttgaagctagcaaaatgatcttgtcgctctgcgaatcacttttacgcaacaacttgacctttcggttctccttcaccgacttccaagggtgcagtatcgcaaccatagtgg

SEQ ID NO: 8703 - DNA, 487 bp, Emericella nidulans
ggagtgtcaatgaccatattttggcacatgaagacaggcttacaagcgcgcctgctgtattataaggcatcaatgcatcgggtctgcaatagacctgcgctgacgactacgctcagcattggacgaactgccttgatgaggcacggctgggatgcctaccgacctattgtaatctaaactacggagggcgcttcatgtgcacgggttcagtcgatgcacatgacatacaacctgtattagattacggagccacgcatggggttacgagagaccacgttagacagctggtccgctgcacggttgaatatctgcatctagtatcccgcgatggcgggttgggctgtgttagataacgcagggatgctcgaacggacgggatacacatgatgggcggccgcatgatataacaactgagcactagagtaaactcgcacacccacccactaccggtcgtgaggccgataacatgtttagacaatgtctcaga

SEQ ID NO: 8704 - DNA, 866 bp, Emericella nidulans
catatcatctcaggtgatgatgatgcgattcccacggggaatgcgtcacccgggacccggaattctttcactcggtcgtacactacaggggggtttgccagtactggtcgtacggattataagccacgttcaaaggtcacgattctcctgacaaggatgttcagtgtcaacttgcctgaggcaggcaccgcgtctgaaggacgtgatcttggtacgtctttaatccaagaatctcttcctgagaccggttatccctttcccgatgtgacgaagcgcaagaaaatcaaagagaagaaaaccccaatgtacgcagttgccatcacaatccggattccggtgttgtcccggaatacagcacgccctgtttcccggtttagtactcagggtcaagattcaccgaaacccggcatgtcctgctctttagactctgattaccgctggcgtggtggattctttgatgaaaaccttgcgtctgcgcctgctagtctggacgaacggatagacatgctggttgatcattgggacgtcatcaaccgtacactatcacacctcgaaagattatctcgaaaggagatactttttctgttgaagagagcggattcttcaggaatacacccgaagcctgcaaaacccccaaatatgcaacgaacaaaccagacattccttcatctaccggcgaatgtcttagcgctcaactcaagactgaaacaggaagcttctcgcagtgcccgccgcatcagtactgcactgcaaatccccaaagttataacggggcaaagccgctggggtgtatggcgcgaggaaggtcgttctattgtgcgcagtcttggagataaagatcatagctttttcttccttgttctaat

SEQ ID NO: 8705 - DNA, 1402 bp, Emericella nidulans
tatcaataactaaatatgccttacaggaatgcaagccgaaatgtttgggagacctgtgattggcacaattgatcatgaccaaagttgcgcgctcttaaattatactctctaagagtctcagggagctgtcggatcttccagaaggggtaggtgctagatgtccacttatctgacctaatgaggacataagtttccaaccgcgttgtcagccaccattcccctctcaatcagagcaaatggtttggatgtcagttatgaataaacaattcgcataaattgaaaggaatctactgcgccttggggccactcaagaaaaaatgtctatgagatgccgaatgccaaaggaatagcactgagatatattgaccatataggcataatatttgaatacagataatagcagattcaaatgcataggcatatagagctatctcagcgacttacttcgtagatgaagggtcaagggcagagcggggtcacgtggtccgcttagcgagctccgcaccgcaccacctcagaattgtgtcagtctagcgaagcacgccgcgaagaccgattcgactcaaccacccaacgccaatcgacaacatctcgtcccaaccggtcgcgcatctataacgttcaagatgcgtacctacgacgattctttcagcggtcagaagatctaccctggaaaggtgcgttctgtcctcccgcccaaatccaattcgatgaatcctgggctccgagcgaaggcccaacaggcttcacggtcgatcgaaatcatcgttatttggaaggcttaatttgagaatgtttgttgacagaatggttttggtgcaacagggtaagctgtacgtccgcggtgacagcaagatcttccgcttccagaatggaaagtccgagtccctcttcctccagcgcaagaaccctcgccggatagcttggactgtcctttaccgtcgccagcacaagaagggtatctctgaggtccgtaccgccttttctttaccactggattcgattttcgcagttggaatgatacatctggggactgcgaatggtttacccctcggccgatactatgggtcgtgaagagatggaacattccgaaagtgttttgcggataacattggtggcatcgaaaacagaatgctgaccattgatttcaacacgaacaggaggttgccaagaagcgtacccgccgtgtcgtcaagtcccagcgtgccatcgtcggtgcttccctcgacgtgatcaaggagcgccgctcccagcgccccgaggcccgtgccgccgcccgccagcaggccatcaaggacgccaaggagaagaagagtgccgctgagtccaagaagaaggctgagaaggctaagaacgccgctgctggtgccacagggtgctgctcagcgcatccagagcaagc

SEQ ID NO: 8706 - DNA, 573 bp, Emericella nidulans
acggaatgaatatgtttagtttccatctctccaatatctagtatgccgtgcacttcgtgtattcgtggaactatggaatttcatgatcgaactatgattcgcattacttatactgaaaataatcagctgtacatactctggtatcgcttatacaggaacctcagacagtaatattgatattgtcatgcctcaagaccaaactccttttctcaccccgtccttatccatttcagaaagatctaagtgactttcacctcttcatacctgccttagctccacggtaacctcaacgcggaatacaaaaagtacccatcgaattagggtaactaagatggcccgcacggtggaagctgcaatagcggcgactctgagactcatgcatctgcggatggcagctgtaagtctcgtagtctgataaacaagaagtaacggcaaaacaagattgaactgaagcacgtatgcccatcaacaaggccaggaattaagacttggtcttgctccacggcgaatgtttcgctttttgaacaaacggaatggtgattgtcatccgaagctcgggttttcttaagtgtg

SEQ ID NO: 8707 - DNA, 927 bp, Emericella nidulans
cgtggcttgtacattatgttgaaacctaggtgattagtgctcgaatgaaggtgcgaattccattgccttaattgctaaatgcgtgttccttgtctactatagtagaagtatcctgttagtaaatcaatgtacctgataaatagaagcatagctatgctaaactagcttacatctgttgtatcctgaagcttatactatactagttaagatgtattcctggttgaacagcaacgatgcataatccaccccacacggctcatagaacaagtatgtcaaaattcatattctgaaatccagtttcagagctaaatgtcaaggaattcaagcgctttttaagcctagtcaatgaagtgggccaatacccactctgctgtcaccgtcccgtcaccgcaagaccgcaggttggtgtccactgattggtttgctaaaaaatgcagaaggtagcgcagaaacatatttacagtgattactgacttattattcataaccttacttatctgcggaggttcgggagcatgtaagagtgaatgaacgattcatagtcaaagatagcaaagaaaaagcgcgcttggatctttgatgtgcattccatgtacttcgtaagacaccatgactgagtgcaaacatactaccgctaagctggaacatcaagtcttgagttcgaaggtgagaattgaatgtgaactcaaatccggattaaaaggtcgggcccgcctgtagaagagaaaaagcagattccgcaatgcctggtaaaagcaagtcaagtcaggtcgagattgagcaaacaacattaaacgcagccagcaagaatttttgtaaatgtctcgccccatttcgcactacgtctcactggtcagtataccacaacagatgaactgatgaggtaggaagatgcggagcataccttgtattgttggtattgaactc

SEQ ID NO: 8708 - DNA, 1357 bp, Emericella nidulans
agagagggagaggggggagaggggggacaagggagctggggcgggatggaagagggggagggggaccttaagggagggtgggggcctaacaaaagtgactgtggatcctgagtatttaagccagaggggtctgaaatatggggctaccagttactgctcaagcaagaagggtgggtccctaaaatctctcctgcaggttaggccctgaaaagaacacgagatgggctgtgggcttaccaggtctcagaaaggaagagctgtgccaacgtgcaccgccaagccagatggaatactttcatgacgtaaacggcggggacctgtaaatcttcgccaaatccctgcatatacagcgcgagcgtctctatggctgcttgaagatcatgcttctcgatgaaatcctgaaacgatagcaacagatcttcgggcacgggatatgggagatcccatccgtccatcagataagggtattggagtagtatttgagtgtagcgcgtcattgcctcaacgacattgccgacaggcggggcaacgggctgtcccgtgcgaaaatcaactcgctgggttgcttcagggtttccgttaaggaattcggtggtcaatgtaatgttgaaatgagcgaagaaactcctggagacggggtagtcgctgtatacccaaacgccgtagtcaataggcgtgccgtcagagtcgtagtatgtgtgcgtatgtccgcctagatgatcatcacgctcaatgagaacaacggtctttcctcgttcccgcagacggaccgcagcaaacgtccccgaggcgccgccgccgataatggcaacatcacgcgagataatatcattatcgcctgcgggaaagtcatcattgccgctttcaggagtagccagagcaggtaccaatcccaagaagatgctggcgaataccaggagacttgttccgattgaagaatgcatgtttgcggtgatgagcttatgttggtggggatgccccgtgcttatatagctgagccctgtgttggaagaggacggccagcagtgtctagggcaggagttctcagcgcggcatgtgcccggaacattttctcacatattcctgcgcatctggggacgccttctatccagtacgcgcatgacagtgtcgaggcgagttaccccgagtagcaaacaggtataccccagggtaaacacgccaatcagcgaaacgagaatttaccgtgataatggccgcgcatccgaggtatgacttgcacatgaagccgtcaataagcatctgtaagaatagcaacttagaagtacgtcgatatgccatgataaggaatgaaccactggctcagaaacattcccataatgtcctcgatgggacaggc

SEQ ID NO: 8709 - DNA, 643 bp, Emericella nidulans
caagcgaacagtatcagcagagcgaataaactacacaagggcgtcagttacagggattcaaccgtgcatctcgcaactgcaatcaacgcatccctctccaggattgaatctcaagcaaagtatatccacgacagccacagcagacgaaacctttcatcctctgaagacgaactcgacgaatctagactgtcccaagtcgcacctgaagagcgtctaacactaactgttaacaaagacgactttgcgcgcatgcgcatccatggccaattcaacctaggcttcattctcgcctcgcgaaccacatcaacatcgcatcgcgcagagtccgacccagcctcgggcctagggttcaaagacgaactctttataatcgaccaacacgcctcagacgagaaaatcaacttcgagcgcctccaatccacaacgaccgttcaaaaccagcgcctcgtccaccccaaacgtctcgacctcacagccgtcgaagaggagatcgtcatcgaaaaccaggtcatccttgagaaaaacggcttcgtcgttgacgtcgacgacagcggtgacaagccgatcgggcaaaggtgtagtcttctttcattgccgctctccaaagaagtggtattcgatgtgcgcgatctggaagaactta

SEQ ID NO: 8710 - DNA, 168 bp, Emericella nidulans
tgacgccttaccattaggccaccggcaccgatgatggtataatccactatactagtatgcaactgtagactacaataacgattcatatatctttacccggcctctcacggtgactcagccaactccatctcccattccaatatcatggtacttgtgtatcaaatacta

SEQ ID NO: 8711 - DNA, 825 bp, Emericella nidulans
gtgtgtcgggacactcggacagatataatgctggttggaatcttgtagatgagaatttctggcttgggtcgaaacgaacacccggcggcaccttgcgcaccacgaatgtcgcgatgtactttcgcaatgtgcatacagagccgtttcagaactgaaaatcctttcgcaaatagtacattcatagttcacgccatcaaaggcaagatacgggcctaggtccatctttgattctgatgactctggctgcaaaatagcaccaccaagtgaggatgtcagcttccagccgttgatggaggtgtccgacattgccccgccctccaaatagcacccgatggatgttgggcgtcagcaattttagcgccgcagtagtatacggtaggatcttattggcctgatatcaggtgatttgcgcgtgactgggtctttttgaaatagtgagagaattgatgtgtggtgaattgggtttttagcctcctgaattctggtttcagtctcatatgtctgagattgaaaggttgatgggatacatggtagggagttggcactaggtctgatagaagttgggaacgagcaagagattctccatagtgctgtagatgaatgtacacgcgacctgatctgggaaacatcggcgtccgattcctgttaatagagacagatggcaaggttgcagctgagaagtaggttatagatcgtgttatgtacccttgtcacatgaaactgaagcgtgaattctttaaaggatttcggaactgggacatggttttcgtccatacacaactgtgactggctggtagaggtggcgctgctcatctcttatagtag

SEQ ID NO: 8712 - DNA, 149 bp, Emericella nidulans
  unsure (1)..(149): unsure at all n locations
ttacaccgcgaacgagcgcgaactgacatattggcagattgttaactagtctttgtgcctaacgtacattaccgagctaagctcaacatagtaccancaataggcgatataacttnagaaaactctgggaatgatagaanagatacatt

SEQ ID NO: 8713 - DNA, 792 bp, Emericella nidulans
gatggccttgcgggtttcaccaccaggaagggcagtattaggaaggctttcaccgctcaccgcaatactgacggtctcgccttcgtttgaatcttgtttctcgccatcgctgtcatcgtcgccatcaggggtcacccttatactggagctgatggatgatgagtgaaagcgagagctgaggggcaattgatattggacggctccagcaacgataagctcgaatgggtgctgcaacacacgctcccaacgctcggtgccgcccttttccgtggaattcccgggcctggagaggcggatctgaccttttgaagtagatggttcgtagtgccacggtgacgcttcgaaagtcagagtcgaatcgagtcggaaaacgcgcccaattagcatggtttggtggtcgccggccgggtcagacgggattggatcagtacccttgtccacaccccctttaggtttccaacgtcccacctgacctactaagccgttgctttcgcaatccaggccatcggtgcagtgagtcgtgtgagtaacatcagcacgctttttgcgttccactcgcgcaagtcttgcaaggctcggggcatcctcgcgccagaattggtcagtcccgacataacggcttttagcaaatatgtcaacattgatgtcgtcaataacgacgggaaacagattggggttaatcgcttgaacgttgagatctagcatgagctcctgctcggaagcaagcacgttctgaatgtcaacgacctggacgtccagtagaggcttagtgattgcgacgataaatgacgt

SEQ ID NO: 8714 - DNA, 887 bp, Emericella nidulans
tctggcgtgatacctagaatttatttagtctccctgtaccttgtacctttccccaaccctccttatcattcaattcctgacctttgaccttcaccagggaattggattacctcttcaacttgccgggcatcttatcacaaactggtgataccagacagcttatagtcatggacatcgcactggaattatttgacacgtttgtcggcgaccggctctactccgctcttctccctgcctcgctctcctcgactgtctccgttcctgggtttccgacagcagcaaacagcaccctttcattgttcggtgcatcaaagccttttgtatatgagccagcgaccaagcttctctacctagaaccatccaaatatgcatacctgagcgcttggcctcggaacaatatctaccgccaattcttgagtttctttttgattgtctggtatgccactgctcatgatctccattgcaactccccagtctccagttgctgatagtttgcgctgtaggatcttcggtttcattgtctactttatttctgccaccctgtcctatatgttcatctgggacaagtcaaccgtcaagcacccgaagttcctaaagaatcagatcccattggagattgcgcaaaccatgcgctcaatgcccatcatgtctctgttgactgcacccttcttggtcgccgaagttcggggatatgctaaactttacgataccttcgacgaggaaccattcccttactacagtatcctgcagttccccctgtttatcgcgttcaccgatttcttcatctactggatccaccgcggcttgcaccaccccctcgtttacaagactctacacaagcctcaccacgaagtggatcatgcctagtcctttcgcttccatgcttt

SEQ ID NO: 8715 - DNA, 1000 bp, Emericella nidulans
aggcaaggctaataaacaacatcgcagacactcgcaatactaggtcccaaaaaatttcaaaatatctctcatataagtcgtaaatagcttcatgcgcggtcactgttcatgcatctcgtcgtcgtcatgttcgttgggcaaaactggctcatgcagttcatgcagttcatgcggttcattctgtccattctgtccgttctgttcgttctcgttgtgttggtcatcagtgggtagggtctggtcagcgtcactatgatttatagaagcagcagtgctcaaggactctgtcatagagactgtctccatgaattgcagaggcctttcctctggagtatggtgaatgtcgtcgatggacggactctcaactgcagtcagcagggattcttccaacacgctctcactgagctgcgctaggcatctttgctcctcgggaacagcctcagtatttttcataggggagtcaccagtatccgttggttgtggtttctctaacgcactttcgctagaatgggggaactgctcttgttccccggaaccggattcagcgcttcccatcgaggagctatcggtttctatctgaactggcccatcaggctcatttccgcggggatataccgactgctcccgtagcttggagacaagtcgagtgccttctgcaaacaagtcacaactttctgctcctaacggcgactctcgcccaagctcaatagagggtattggttcctcttgctcttcagacacaatctttgcacttttggcagacacggtgacggtttcagttggtggtacttcctctcgtttggtcacagatagtcctgccgcggcagtcggaatgtcgtccgagcttacaaatggcacagattcgacagcagatgcgagtatccccgctgggtctgagattgcaacagatggagtatgagaactcgtatgtaccgtccacgtttgggtcgcaggttgctgcagtgaaaccacggggcacagagtggcatagggtagccct

SEQ ID NO: 8716 - DNA, 1229 bp, Emericella nidulans
caagtacatgtttgttgatgccgttgtttatttgcctttgtatactgtctcaagaggcacgaaccccaatttcttggatcgggatataatatagggcagagtggcggttcgttggctgccggcgagaaatccatatatcggaatatcatgaaagccatcaaacaaaggatggcactaacttgtgcggttcggcctggcttaatacttcgtgattcagtacagatatttttgtgctgctttatagcagaggagagggattttcatcacagttcacaacatggcagcagagggatagcataaagggcactgttgcagagtgaataatagtcaaagcattgtatcttcattctgaacagtagacaaatagttgaaaaacttcaatacctacaaatacttgatgttcgatagtaagacaggggcttttgagctgttgctagcagctggtggggaaataaacctgtggctagagctggaagcggttaggactacggccacaggtgtttcactgagggtacgatggagcagaagtcctcttgacttcgtataattaattctcaatgctaacaacgctggtggtataaactaaacgaacttttgatcgttttggctctataaacggaggccgtgaaacggggcaagggtcgaaatggtgctgatggagctgcagcacggcgcgaggaagagcagcgcagcaccgctcagaagagccggctgagacttctgaccaccctgaagctgaagaacagcggatgcttcggcggcggagattgtttcgaaacatttgatttctaacatcggcgacggaggagtcgaagagagaggtaagagacgaaagaatagactgtagcaagagtgttgactcgcagtcttctcatgagaaatggataccctcagtattgcaagcatgcagtagtcggagaaagtcattctcatcgcacttgtttgcacgatgattcgctagccccgcggtatccagaatccgctcaatcttgaactgaatcaaccgtgtcaccgacgtcctaggaacctgctgcccagcaactgtgataaccggtccgctctgcgcaactgctgcacccttttcaccaccttcaacgccattcatgaaaatatcaccaacatcatcctcatcgaccacgggacccgcatcatcaacatccatatccacatccaagtcatccttgctattcgcaaactttccctctggaaacggtgtcttccctaaaaaa

SEQ ID NO: 8717 - DNA, 563 bp, Emericella nidulans
gcatgacgtcctgtactgtttcactgttgaagccgccggtagtgaccgcccagtgcagtgcctcacgatcacagcagtccagcgcgaacgtgacacgcagtctctctccgttatcacagcagaactcgaacccgtcagagcaccatcgctgattgctttctttcacggccactctgcctgtatgtgcccgtttcgatggcggtacagcaggttttcgctcaagcaacagcgcattctggcgcatgatccggtaaacacgtttggcattgatcgcaggcataccatcaagttctgcctgtctgcgaacagcgcccatacccgacgataaccatacgttggcagctctccgataacatggtgtatacggagaagcacatccgtatcatcagtgtgacgactgcggcggccatccatccagtcatcggttcgtctgagaatgacgtgcaactgcgcacgcgacacccggagacaacggctgactaagcttactccccatccccgggcaataagggcgcgtgcgtatccacttttttgcccgtcatatcaacggcttctttgaggag

SEQ ID NO: 8718 - DNA, 1467 bp, Emericella nidulans
attttcacacctcaataagcctccatcctcaccgcgaccctccaaccccccccaccgttactcaattagcctctgggccaatccgcctcccaaccggagtccgaccgtaactccctcagcctatcctgaaacccgccttggtaacccaagtctttagagctccaagggacggccaccatcccgacccatcctgaaatgttggataaggcgcaagggccctgcctccggttattggccggccatgcccgcgagcctccaccaaggagtccagaataatccggagttctgtatatttggctgtatatttggctgtatatttggtttaccagcccactgatcttctggcttcgccagtcacagtggctcgagtagtggctcgagtgctcgctcggggtccccaggccccaatagttaatgggagacgaactctctgggcgccacctgcagatgcgtctgaacctacttcgagtgctgcgcacaatgcagtgcacacctgatcagattcaggatcagtcctgtcttgtgagcccgcgcaatcaccaggcaacatatccaggctgaggtggctgtggctgtacctgtgacgagctgatgatgacgactgtacgggcaactatatggagtagggtgctggagactctctgggactctgggactctgggactctggagctctggagatggtagataagacgagtcctttcatgcgccacagacatcacaggcagagagacggacgctgacaagcccaacagtccactagcagtccactggcactactgcagtccagtccttcctcaaccaatctacggccgccgctgttcgcgcctgctccatctccacagtctgctaaaaggaggtcccttattcgactcgggatcgtccgtcctccgtcccttattatctggcgcttgtctcgtcggtctgtttgcttgtctgcaaacatacatatatccatctcctccgcaattactcgggtccggttggatttacacactctctcttttctctccttccaaatctccaagactctccctccggcctatgccttcttgccaacggtgaacgttgatgtctcactcataatcacgattccccaccaacaccgtctacaatgcgcgacatgccctcaaaattcgtcgaaatcctcgacttcaaagatgcgtaccctcgcatctccgactcagacgtgcgcctcgaagatgtcttggccgaccacgaggccatcgtcagccgaccggtctcctcaacacatacctccaaggtcagcctcgaccgcgaacgggtggaccgtgcatgcccaagttctcccacctcgcctacatcgccgtcgcagcgctggaagcggctgagccagatcctcgccgtcgcgcggcggccagactgagaccaggtctgatcggatcgaatcattcaaccacggaccacaatagacatcgttctcagaggtccccctcgggcctcctgg

SEQ ID NO: 8719 - DNA, 873 bp, Emericella nidulans
ttatcccggcaaaggaatgagtcacctccatcgaaggggagagaaacaatttaattagtcttttgacgaacgcacagacttcgtttcttctttgctcttaccttttattgggctagataagcaccttgcgagagagtctttgtatacctataaaaaggcccagatgtctcttatctgagtcgtgtgccgccagattcctgcaagcttatcaatccatccatccttcattccttcaagcttataaggatgggatatctgtttcacccacgaaagaccgtactacttgtacatttgatgctcacactaaccgagaatgaagttggcgattaacaaagaatgaacaaatgagccgcaccattttgtccttttattacctttccatcccccttcgttcccttcagctgcatgctcatccagccttagatctacatttcatgcagcgtgttataccccgtctcgatgagactccgtgggcctcgagtgtcccccccaatatgccagtagaataatcctcccagctgctctcgggttacgaacctcgccttctgctgaacagtcttcggcgtgtcgtacgttacgaacccaccatccccgccgacgcagtacgctgctgcaacctcttcgtcatgatactccgtcgcacctgggcgcgggagctcgcagtaatcgaatactccatcttcgccaccgcagcctgcatatcgctgtccgatattgtcactgccgagaaacgaccggccataggcagggatacctaggaggagtttcttgcgatggacgccctgcccgagaacatactctacggccgactggcataatacgcctgaaccgtatgaaggactatacaactgggcgtggtgtccggaatagctt

SEQ ID NO: 8720 - DNA, 1461 bp, Emericella nidulans
atacgaaagtatgataataaacaatgaatataaataacaagaaatcattatatatttataaatttaatatataaatataatataatgaatgaaatattattaaaaaatctatacaagttttgaaaaaagagccacatattatatcaacaaattcacctataaaaggagaaatagaagtgtagaataataaataataagataaaatatcgaaattacacagctattttagaattaaatctcactaataaaaattccttacaaataaatgaaatattgtaacttccggatatcactttgatgtgtagggttctttagagatatgcctagtaaaagataaacaaactagacaattaagaagttgaaaaaaactaaagcaagaataacatctataatagattaaagactattgtatcaaaccactagataatacagatgtaaagtacaaacaaacgcaatcgattcagataacgaagttgacaccggtaaagagaattcgacatcagtaccgacatcggcgcagtgagccttccaaaaacacttgcttccctccccgcacccgacagcaagacaaactgggctctacgattcgaggtcgggccatggtttgaggcccagggcgtcgagagtttctggccagaggttgaggtcaagtttacggtcaaagggcgcggaaaggagggtgaggagggatggagacattatcatgttccggtgttgttggggccatggaattattcgacgtaccggggatcatgatactactattgacattatactgggttgggcggttgaagtacatacaagtctgtggaaggctggctgaggtagtctggctgagctagtgtctagtttagatacgagtgaaaactcgatctgattttatcggttgtccacagtacctttgggggcatcacgcatgtaaacggagttaatgggcgtatatacctgaccttccagggagctatcaagtagagttactgaagtactgagtggtctaaccagagatacaacatctgtggtcctctatgagttcgctgttctggagaggatgatagagggttatgataatttcattttctcaagtactatctacgggtatactccgcatatgacatctatagctggtcagtgcttttaatcataacaggcacagctgcgcaaatggccgcatttgtctagagccggaaaacgacgttagctgccaagacactggcactgggcggcagtaatgcggatgcttaactcaacctcttctctggtaaaaaatactttactatgatcaaagcacgggaacttacttaacaaggacagaaagtaccatcaagcatacatatgtaataccgctacgaatccagacccaagcactctgggggagccgtatcccctaagcgtttccgggtggcttcccgtgtcagaactaaaagctagcgcttgcctgtgacagctttgaatgaaggccag

SEQ ID NO: 8721 - DNA, 5754 bp, Emericella nidulans
aaaattagcttcggggtggaatgattattgtagccgccaaaacgtttgcttcaacaacagaaaagcgtgtaccctagttaaaaagctcccaaaaaacgagcaaaacgttggtccaaatccttttataacctcaaaaaagggcgtgggcatgtgttcctgtttctcaaatgttcgggcatcttaggtcttttcaagatcacaaccgattcggtttccacttgaacggggtatagaagcattctatcacagcaaggggtaaatgtaataactgtgttccgatgaaaagccatcgacaccggcgaagtccgtgaacgcctgtcgagattatcgagtgtcgcgctctatagaaggctcgttgtgagatagcctagtgcgagacccatgtagaatgcgccacctcgacgaccgatctcattattcttgtaccaggagccgagaacatagtgcacacctgggaagtaggaggcctacagtgactctcagcttaaggttgtgtctacgagcgagttcaacagtggccacgaggcaattgcctacctcaaatatagagacaatgaatcaatacgccataaattccggcataacttggttacttcaacaatgtgaaaatccctcagaggaggtctaatgccggaacgaggtagtgcattggcacccaggggaaaagatacatgaatggtagtaaggcgatgccgttccctactgtgaagattgtttgaaattggacgagttcgtttcggtggaagcctagctctgtagccatgctagaaacgtatgagttgtctgtaatacatattagaagccgtcactaatgggaagtctgccacagggggtgcagggaagcgtgctaatatttccctgtcgatgtatttcacccagtataccgtgaatgcgtaaggcactatgagcagatccagctttgtaatgagcttcagctcttggggcgtatgttctggagagtaccagttgtaccattttcgggttggttctgacattgtttgagctcaacttagggcattaacagaaaataaaacaaatattgagttattgagatagtcctggggatatataggtattttcgataagtcgatgttgccattctcgcgttgatagcaccaccaacaagcttctccaactcctcagccaacagtatccttatgctagaatgatgccattaaaagcttgatcacgaaagcaagatagcgaaacctgctatatagctgataagaactctagtattcttggctttccgttaagttcctaacccggctaccacgtggttgtgaagatgcatcgttccaaattgtttacaataaaaatagcttgaagaataactattctttatccgtcttctttccactttgaagagttcatcctaagatccttgaattatttactatcagttctggcattcgtccaactatgttagcggatatgtttgaccgttcagcattaccaacatactcactgcccgctctggcattcagattatattataagtcgttcacattcataaaaggctgcggtttatagaaatggagattaagctggcccttcaggaaaagcaaagagtagattgcggtgttaccctggcagaaggcggtcctatagcttacagccctaataagcatacacccaggtgaccttccgatctcctctccgatccgttctattctgctcctcaacaaagtcctcaccctcccaagtctgcacgattgctcttctcctccgattctcccacatatagacgcccctcattgcaagaaacccacccaccccgactgcaataagcaccatcgtaacaacaaggggatacttatagccaggcgcatatttactcttgaacagttgtcccgcaataacaccagccagattactccagccattgataccaaggatcacagagcggcatgctttattaggcgtattacttgcgagccaaacggcaactaaaggaccgcccgcaaacacaccggcaagacagacgtgcgcaaagccgtagcggagtttctcgttgtagctggtggccatgacgacgcagccgatcagtccgaggcacatgccgaagacggtgtgcaaggagcgttctttgaggtggtcagaggagtaaacaatggctataaggccggctgtgccgacaataaacgggggaacggccattagtgttgcttttacaccggcataacccataccttccacaattagggggaggaaggttgtgaaggcggttacgggctgggcaacatcagcatatctgctgttgatcaatgaaccaaaagtttgaggggacgcaccaggacggacaggatgttaaaaacgacaatcaagagcttcttccagtctttcaggacgtctaggacgtcgcgaactgtgatcttagactcaccttcggcggcttcttcggcttgcgcataatcgcgttccatccgctttatggcatgagcacgttccttgggagtaaggaaccaagctttgccagggcttactgggaggacgataaacccaagaatggcgacgaagaccgtcagagctccctcaaacaagaagaccgtctgccagccatgctgtactgatgtctcaaggtgcagcagtccatacgcaagaagccccgcaaatgctccagcaacagagtacattcccgagaacaggcccatgcggaagccgagcgagaatttaggatagaagagggacatgtagtagtacgctgtcggcgtaaagcccgattctccaacaccaagaagaagccggagagcaagaaaagtcgacgtgctgtttacgccaacatgggcaatgcagatactcccccaaacgatcattaacgtgcacacccaccatttgggtccgatgtagcgaccgatcatggcgaaaatgggttggagggggacgtacgttgcagagaactagacagttagccagaattcattgtgagtcttgtcagcctaccaaggacagagagttggaaatgtcatttggatgcaggttggcgtcctcgatgaatgtactcgtcgcgacgaaaccgacgttggtcttatcaattccgagcagctgcctctattagcttagtttagcgtgtcctcggtaacagcgtacgatgaacccaatagccagaatcattagcaagatgaagtctagcttgagattgacccgtctatccagcgccttttcttcctctgaaagagcctcataatgggatacctcggtgataaccctcttcttcgcatcctcagcctcggccagtgaaggcttctcctgcacgtcggtgacaatttccatgcttgcagtattgtacgccgttaaaaggcatatctgactattgatcacaggagctggggtgctttaaagagctcgactggccaaccgtgtctccacttggatgcagacaacgactgttccccacaatccggggttaagtttgcggggtaacagtggggaacataaaatggagactctcccagtcttatcccagtcattgttcttcattctccttgtccctagcatggcccggcatcggaagaaactgaatttgccgtgcaatttctgtcccaaacgctatacgaagcgcgaacatcttcaggtacacccttaggtttccttgtggcatttgcagcaactgacttggcggaagagacatgaacggacccgtacgttgtatatacatcgaaatatgtagagtcctctgactgtctagatactggctcgaagccgtaccgctgcactttctgcggaaggtgcttttcccgtcaggacgtattgaaccgccatctcaggttcactcagatccagctagttcagacgctgcagaagcaagcggtcataccgagaccagagctcagggacacaacagaccttgattggaccgacggactggcctttagcgtcggatcatgatgcatcttcggtgcagtttccggacagtcgctatctgccgttgtgtgagagcccaatgggtgatactcggccaatacccgccgacctcgcccccgggttgctgtggcctgactcggaaggattgctcgaaaacatcatgtccgtcgatccttccgtctggcagcaaccacttgccttggcgccatcgacgttgggcctcgaggatgcaccggaggagtttgcgggaaataggaaccatcagtcgtcctgtggcaatacaattgccgacgacgggaggcatgcagtgcagtcactcagcagtctgctcagtgatacagtgagtcaagttactctccatctctcctcacgtctgacggtatcaggtctcgaccgtcaccgcgcccgcaagtctgaccggtttgacatcgcgcttcttggatggcagcctgcatatgttcttcgagaagattatccccatgttccctatcttccatcgtccaaccttcgttttccgagactgtgctcccccgcttctcctaaatgccattgcactcggagctctattcctcggtagcgcggatgccgtcgccaaggttcgttcttcaagctgttgcaacacgcaactaacatttccaggctgaagtactttggcgcttgtcacatactgctgtagcaacttcatggcatactatgattacttggcgacgcacgtcagactcctgcgcaggcgtcgagctagtgcagacagttttgctcagccagatttacgccgctatgtccaaagtgtgtacctttattagaaatgctcaatgcttctctgacacgatctagaacaggaccttccgcaccacaagccaggtctttcatggcttgggtatacattgggctagtcattgtggaatgtacgacgcggcaaacatggtgactttgccaatgccaaccgacagtcaaagtgtaaaatgtaaagcatggtatcgatggatcgcacaagagacgatgctacgaacgcttcttggactctatatcgtagacggagtggtctcacagtttagcggcaatccaacctttgctcgacacacggcaaaccctcttgcgctgccaagttgtgatgcagtattcaatgcctcatcggctgacgactggatccatctgatgcagaaatatcccgctacaccaatcaggttctgtgatatctacaacgacctttttcaagaaacccaagctagctcgagcagacctttgctctacgatgtctccctgtttcaccataaggtcgtccttgagggcatcagatgtttggtcactgaaatgaacgggacaaatccccctcccgtcggtgtgccgtcgaggcaagatctgatgtctgccctgcgagagctgcgccaacatatccttaacagtaaacgcctcacgcccactgatcggctcactgcgctgcttcagtggcactccatttgccttgatacagtagtcagcaccgcacgtggaactagacggatgtgccatttgttcggtatagggcagagtatatttggcggcagccaacgcgaggagggccagatcaacccaactcgttgggcgcagagcgccgctgggcgagcgacattgctgcacgcgatcaacatacagaccattgcggcccagttaccccttggtatggcatatgatatcaacatcccaggtgccgttttcgcagctgcgacgacatactcgtcgttcaccctcgcaggggtgtcgaagattgtttatccagccgcgatagactgggacacggttctaacgacgtttccgctggacgtgaggagaccgacaggcagtgagagcaccatgcagtgtacgctaaactttgttactgggtatttggatccgcagagatgccgagggata

SEQ ID NO: 8722 - DNA, 100 bp, Emericella nidulans
tctgatataatgtaaagtcagtcgagttcataatataaatcctacagtaagcatgcgacatacttcgttcaccaaatccgcgactagtggcctttgcgat

SEQ ID NO: 8723 - DNA, 1072 bp, Emericella nidulans
acccaggggaagattaggtagcgatttcctgtttttagcgcctaaaaagcatgccggatcgatcgcttcaggtcatcgggggaaacgtggcccggcacttgtcattaaactttcccatttataaagattagcggcctgtccagaatgcgctatccgaccgctgggggggtcctacctggatctccctcggcaactcattcgcgtacacagcactcttcgagtcggcattcagcagccctttaaagaaggcacccgtgtccatgcggtggaacagcacctgcagtaaccgggttggcttgctgggcaatggcttgccgagacgttcagcctcgatatatggaacgacttcggccttaatgggttcctgcaggtcgatcttcttatagcgtagcttaacgccggggaaggcagcctgcaggatcttggtggccagggtgatctcccccggggtaatggggtcgaaggggtggagggtagccattatgtgcgtaaaagagagaaagaacgatgcagttgaggagtgtaaggctgaagagacagtccactattggagagggtggaggtgtcttatatgttgactgggcatatctttatcagtaccgtcccccgccctttcggcttgatggatctgcatcctcctcgcatgggagttggagatctcaggaggacgtcctattgggccggcgtatctctttcttattatggtttagtgcagttgccaaattttcatcatcttatcgtcccttcagataacgcagaccacgaaatgaagtctactcaccagtcagagatccaaaatggaaattagggctacaggcgaacagccagcctactccgtattctgcgctcggtggttgatgtgagtgataatttaagagtattgattgttctggcagaccccaagtgcttcgctccttgatcatagttgaacaagatatatatttctgaccaagccagctatactacctagtattagagtattgtaagcgtgaggattaatcaagcagaaagaactgaaataaaaacgccagccatatatctctagaatattaggtataggagacattatgct

SEQ ID NO: 8724 - DNA, 1524 bp, Emericella nidulans
  unsure (1)..(1524): unsure at all n locations
gggaggggaagagtgaggaggaagagagaatgacagtgagcggcgaaagaaaaaggcggcaaatgttcccaactcggcaattctgcgataagccaggagcccaacctacgtgaaacttcattctgcagcagtagtaagaagtacgccacttgtttttcttcattattcaaatgtctttcctgtaatttgcacgaagcgaaaatttcatctactatctactcgtatcggattgagttcgtcctcgatgctggccaatctagctggaaggcgtgatctctgacgatcaatatggaaaaattttgtatatccttgcaaaattgcgacaaaaatagacatcagcgactatcctacaaagcaaagacaccgctagctattgttacttgttaccttgttcgaaagaagacttgcctcccatcaatatcgagtattggcctcggagtcagtgttctccagatgcgaaaggcactaacaatcacgaacgcctgcgttacgaaaatgtagtagtgttgctaccagtgacaactttaatgatgctcgctggaagcgctctcgaagcccggagtagcgagcctcggagtccgcgcggtggtgtcgaccacatcagcatcgtaggtcattccgtcaaccatacgggcatcctgagcaggctctggagtagcagatcccaggtgtggtgaataagaagccgggggattcgcacggctctgcctgggactcccaacggagctcgtcggccgcccacttggcgacgcccgattgacgccggaatgtgaaatcggtccgctcatggtactcgcgccttcaccaaagccgacaagactagcatcgccttcatcgctaaggttaccaacgctggagacaccatcatccgcctcactcattttgtccgcgtcaaaggcatcactcccgctggcccatgtagtccgggcgcccacgctacccgtcgcgctggcgctttcgacagtgcttctcttctttaagccggcgcccgtatcaaagtaccctggggtgtatgggaactaggtagcagtggcctgatgtgtgccaccagcccgtgcagtagccacccgctctaggccggctaggcgggagatgcgatcagcacgctcggctttcattgtgtagttgagctaatggaagcgtttgaagagtgggcgcattaccgtcctggagaagggctggcttgttgccatttttattgcggtgtgaaaggcgnataaggtatattgaatagaatgtgcttataaattcattccgttcaaaaattaatattgatccggcctttagtgggtattcttttaagatataggggtaatatactcatactaatggtttaaaatttattcagacaagttatccattagtaatacatattatcttctattcagtgatgtaatctctcatttataactatatatattatttttataatactttttgacataaatttataatgatttttactaactatatcctctattctcaatcaattgtttatttaattggtcttatctttcatttttt

SEQ ID NO: 8725 - DNA, 564 bp, Emericella nidulans
cccttgtttttaataaaattaccctctaataattataaaattaacatcaataatttactttaactattactattaaatattataaaattctaaatataaattaatataaatcataataactaatatttatataaaacaattaaaaatttttactcaataatactaaattaattataatatattatattatctaattaaatttttatataaataaataactaaccatttatttataaaaataaactatatttattataataattttcatactcttaaataaattttatatattccctcattaacctaaaaataacataaattattattaaatttcatttcattaatatacttcttagaaacatattaataaaaaaataatattatttaattattaatatacttaactaaaaactttaatccataattatttaattacaatatatattacattattattcattatataatataatttaacaattatatataaaatatatcattaaatattattttaattatcattaaatacactctttattaaattttactaacaataatatactt

SEQ ID NO: 8726 - DNA, 1583 bp, Emericella nidulans
catcatagtggaattgctcgcggatatccgctggaatggccgcatttgcagtgtcacttaagtgaaacacttcaactggccggggagcgttggaattgtacatagttggtgctccttgcgcacggcttaattgatatggtgtataatgtgggccctgaggaacggcatatggaagaggaggggttggcccttggtaagtgcctggtataatgttctggttcacaaagccactagaacgtctctgttgtatggctgtctggtaaggaacctgaggctggtgatatggaattggaggagctggggctggcgaatgctgagcaggtccgacatgcgcggccggcgaacgcaccggaacaggacttgctgcggccagaagtgcggccggactgtttataacaggctgcgtgggtgcttggctcattgacgcttgtcgagaaactgacggaagagccgatggaggaatggccggaagaggtggtgatggagtgggctccggaggcggtgattcctgcagaataatgtcagagcgggctaagcaggaaagcaaaaatgggtgaagtatcacttacattttcatcgcgcggacgacaatgaactgcacctaccactggcggtgcattttctgccccccaggatggttttggtaggtcgtctgtctcttttgcatcacttttgagcagatgcttgatcggactgggtatcttctttattctgcgtggaacatcatataaatccatctcataatccttctcccgtacttcgtcgggaaggcaactggcccaggttttgatcttgttgagtttatgtttttcctcattgtaccgagcctcgcacacgtagatctccttgtcgagaggaaagtctctgggccttccacggttataccgcgtaaagaacatcacgaagcaccggtcaactatctcgttgattcgatgatcacgatattgaccagtcttaaccacctcattagggtagaagtgcttttcgaaatgatggacagtttgctccgggcgatagtaccaacaggcattgatccatttctcgccctcagagtcctgccaagtccggtatatttgcgccacgattggcttggtcacatcgttggggttctggatatgcacccagtccccaaccttccacaactcgcccttatgaagaatgccatccggaagcggtagacggccgtcttccattagataatcgctgtccggttttttcttctctagatctgcaagccttcttgcctccatttgaaggtacaccgcgtccttgtagatctgactctctgggtgattggaggctttcgcaatggtgaacattagatccatatccttatgaagtggtctactgaattgtactttttcgcttgactttcgttgtgagatcatcgcataggcttctgattccacgagtaagtcgatcacaccttgcaggtgccgtaaatgccgacttaagtgataccggggcttagtttcgatcccttaggatgtttattctgctccatggattacgccgggggggctctttttttggtagagcgaactgccgatgttttgccgttgtaaaacaacggggggggtttt

SEQ ID NO: 8727 - DNA, 1783 bp, Emericella nidulans
aaagataagagccgagtaaaccgaagggtaaaacgcaggggggagttgtatcttcggtaaaaaagtagaaaggaagggaaaaaatggcggcgccaggcgggggattacttaatttagtaagggacatctgagtgagtaatgtaaaaaagaactcccgaacgtaaatgcggaaaaggaaatagcgattccttgtgacagggattcaggcgcaatacgccagattggaatgccgcggcgaacaagtatgcatcgcaagccgatagggtttcataaaaccagtgatacaatgaaatgttaggtaggaagagcgaaagaaagatgtagagaattgttgaggagatgggtacaaaagagggactatttaatgagaatagaaaaagaaataaataaaggtaccaatggtgtggaaaactcaagatcccatgatagaaggggcattataattcacagcggggtatgtattggcggataatatggggggggaaagaaaataatagcaggctcgagttcgacgtcccgaaaatgaataaaaagacgcacactagacagtgtgcaggctttgcccgctcagtctaggaagtatcttgtaatgagcgtgctcgtataccgagtgcgaatatcgtaaggactgtctgaatgttgaaagatcccgcatctgatgtctccgtcgactcctccaaagttgtatagaaaaggccgtgtccgaactcatagactggagtcccagtgtaccacatgtacgtctgcccagggttcccgctagtctcattcggcttcaggttcatatcgatggccgggaacacttctgcatattcagcaggatattgcgttgtcacgaggcggccagcaggcgcgcgcttgccggtaatgatatcggcgagtgcatgcccacccgactggccggggtatccgccccagatgagtgcgttgacgttgtcgttgtcttttagggaggatgaatcaacctgaccaccgcccatttgcaggacgacaagcggcttgccgagctcgctgagcttgctgattaggtcgagctggttcccaggccaagtgatattctcgcggtccatggcttcggcttcgattgtgttgtcaattccgccagcaaagatgattgcgtcggcttgcttagctgcggtgagcgcctcttcgaaaccggatgtcgagtgcgaggtcaggttggtgccgagcgcgtagtggacgtccagaccagagtcgcggaagccagtcagtgggctaatgaggtagggcgctgggccaaaatagttgccctggagttcctcggtgacgttcgcccaaggaccgatcaccgcgacgctcttgatgtccttggaaagggggagcgtctcatcattcttaagcaggacgattccctcgacggctgcctcgtacgcgatgttccaggcgtcggtgctgaggacgtcgtcccatgtaatatcgcggtatggcgcgtcttcgccgtcaaagtacccagcttgcacgaggttgctgtagaggcggataacgcgcgctcaatgtccgatcgcgagacgagactgtcctcgaatgcatcctcagagtgccactggtatgaagttccacagtcgatgtctgtgccggcaagaatcgaatccgcggacgcagccgcctcgttgctcgcatacccatgagggttccacacgttgtagacagcaccgcagtcaccggagacgtacccgtcttcgctaaactcaaatgtatcctcaacaaagtctgaaggaagaatttattggcgcactcggcaccccgttcacagcattgtagg

SEQ ID NO: 8728 - DNA, 1307 bp, Emericella nidulans
gtgtccaagagttagtttattattctctagtgccgtaactgtccggtgcatgtgggtttcagcgagtcagttaacaggtgtcatgactccacagcaatagcatgataccaaagatccgcagtggccgtccaactgggccgccattgagtttcttcacaaggggatatacgaactgtttcaatatagcggcttcaaacctcctttcttatcgccagggccggactaccgccaatggccagtcaattcattctctcctttcctttccaaggaccagctctgccatcaacacatagcgatgaggcagctggtgaatccaccatagaccggagcgggtgcgatcgagcaggatcgcatagtatgcaagcataaccatggcatacatattgccctcctttatcatacgatcaaagtcccgcgggatcagaataagccatgtgaacacattaagcacatcgtcgaggcgtacagcggacagtcgcctatggatctcttctaactccacagcggcaggctcgatttggcaagggtcttcatgacctgcttgagcgagggccggaacggtcaactgggtgaccaccacaaatgcggcacgaagactattaagagcggcgcacaaggcttgcgactcagtcgctgggaccgctgggtttctctcccataaaagactcagcctagctaagcgtccatcctcaacgctgacccagctcgttgtgggctcgcgcacactggggcgccacgccgttcgatggcagggtacagcaggatattcgaggtccagcgctggaatctcgagaagatgctgaagatgccttgctgcccgtgaatcactcgcacggcatgcgttgcgagccgcttgatggtttctggtcgcttcgacggcacgttgcgtgcgacccggagaagggcgccgcattcctcgctaacactctccacggtgatcacattaatgaacatggcgaagccaaagagtgcggcggtattgtccttgttgatgttcttgatgacttctaaatactgcggaagagcctggtcgacgtggaaggcggactctccgagtaagctccgcgaagtctccggggacagcgacgccatatggatgtacgcgacgctgagcagtccatggctgataaaggcaaaagatcctgccagctctggcagtgttcgcgccagatactctgtagacgagggaggcacgggagtggcagtagagctccaggtcgcgcgtacacctgcgacagaaggacgggcctatccccgtctcagagatacgagtaggaatccgcccaagtaacgagacattgctcgtc

SEQ ID NO: 8729 - DNA, 1401 bp, Emericella nidulans
ctcttttgcaccacgattattatctacgagggcctacgatccgctccgaatacttttctgcggttccgatcattttagtatagcttctttgaaagctctccatgatgaacacaagaaacggcccgatcggatcgcttctatcgatgtcgtctgtaggcccgggaaaagggtgggaagaggcatgaaacaaatacgagaaggtggttcatggtggagaacgctatgtgagacggcttgttgctgatacaatgcttcgacagttccaatcaaattcgtcgcatcagacttaggtctccctatccacgaagttgacaccttcacgggatggcaggtatctagaacctggtattcaccaacatagtcacacacaaactcatgatgctagcccccggtgtacccccatggaccgatcaatctcatagtggccgtatcgtttggtctttttgtgcccccgcgaatactcaacggtgctagatacggtggattgaatgtgcacccatcgttacttcctgagtaagtacggacatggtggagctcaaccttaccggtccatgccaactgagataattacagcttccgtgggcctgcgccgctacaccatactctcctagctgggagaaccacgactggcgttagcctccagacattgcacctccagcatttcgatcacggaacaatcctcgcccaaactccctcccccggtttcgagatccccaaccctgattcctgcaccgttcctgagctgttggacgttgttgcccctaaaggtgcggaactcttagtgaagggcatccaagagggcttgttcgtcccaccgcacaagaacgccggctggtacacggctgagcagagggacctgatacatgctaccaagatcaaaccggaagaacaacacatcgactgggcgacttggacctggacaactataatcggcgggaacgggtgctaggacccttatggagccgtctttggttcttgtggaaaatctgggcctctccattttggacaacaaggtatttttatgaattgaaaaatacaccctgaaggagcaggaattccctgttcaggctgctttatgagggagcacctaaatgggctagaaagggtatttttctctgacaaagtgtcaaatcttgataagggaggggcccaccgggctcgttgcctaatgggatggacccttttagaggtttattcctcctctttacgggaaaaaatagttttgaaacccctttttactctatggctttttgcccactctttcccacctatcaggctcttccccaatcttccctctatccttctcccttactttcttttatcaagcctctaggattccaatatctttcgcttctttatactccgtcttttgcgttttctcttacctcgagtgcgcccttc

SEQ ID NO: 8730 - DNA, 647 bp, Emericella nidulans
gataagaagctgtggtcggtcgagtatcatcttacagggcggcggcggccggactttgttgccatctcgcatgtgtatgttcactcctcttgccccttcccttctgcctcccttgagatatggagagaattgatctcagcttgttaaatctgcagctggaccgacggcaaaggcaacccggacgccaactccctgccagaatgtcagctcgaccgtatccagcgccttgtcgaaggcgtcacctgggaaggccgctacagaatccccgagagcgactacgaatcagacggggtaggtttctggatggatacactctgcatccccgccaatgacaaagcgcgtaaagacaaggcgatcactacaatgcggcgtgtctactcggaggccaaagcagttctcgtcctcgacgactggctgcaggagatccgctccgacgcgccacccctcgaccttatcacgcgtatattccagtcgaactggatcaagaggctttggactcaccaggaagggttcttgcctaaggcgctctggttccagttcaaggatcgagccgttgagattaacgaactcagggagggattcggcgcatacgaatcctcactccagaggcagggaatccactcggatttcccgcggcgcagaaatga

SEQ ID NO: 8731 - DNA, 623 bp, Emericella nidulans
acaactaccgccaaggaaatttcaaagaaaattgctaagccggtcacctcgatagggccaaatcctacggtgctcaggctgggagctagtgtagagaggcaagcgagaactgcagctttctctgccaaggggcccaataatgagaaaccgccctcatcctccacgagcccagcccctccgaccaagtcaccttgggccccaattccacccgttgaaaaagcgtctccggtcatgcctccggttcaagttcaggccgcaacacggccttctcctagggaaaagcccaacgatggcttcggtatgcctgttgctcctaaagaaatagcggcagacgacttcaaccgttcctggaaggaaacacagcctggcacgcgagagctctataattccagatcgggacgttatgagcctgttcctgaaccgagaaaaggcgggaactaccgaaatgagcagagcttccgtgctccctctgtgttgcaacgacctacagcaccagatgagcatgccggacctgcagagccttctgctgcgttccaaacgcacagaacaagtggtcaagatggtggacattggactcgtcgtcgaacctcgtctaatgttagcggtgggagtgggagctttgg

SEQ ID NO: 8732 - DNA, 102 bp, Emericella nidulans
tagttgccgtgtacattcttgccgattggcaagcatcggtagcacacgcgcacgacgctctgacggtgtctcacattctaaggcagtcgtagtgtaccctgt

SEQ ID NO: 8733 - DNA, 1845 bp, Emericella nidulans
gggaaaaggaagaaaataagtggaaggaaagggagataggaggatggagtaaggggtatgatgtcgaataaagtagggtgtatggggataaggagagatgagggggaggtaagattagagacaaagtaaagagttagtgataaagaggatgaaagaagagaatgatgaagaggaagagatgagggaaaacagatatatagagtagaaggggaaagaattatagtgaagtagaggatgagaatagggaaagaaagagagggtacgggaggagtatgcagggataaagagggggaaaggtggttctaaaagggagtattgtgaaacagaaagaaaggatagttgtatggagaaaggggataagagatgagagcaagtcgtcagaagtggtttggaaaggcaggattagcccttaggaatcacctaaagtcactcaccaaatccctttccccaaagggtcgcgatccaatgctccatcatgtgggtcaatgtcgctcgcaaggtcatcgagttgatccacactaacattccctgcgatggaacttccgggccgcttccggcttggtggtataatatcctatgtgagtctccaaaaagctcaccagttcacgcaagagctaaccctcgagttctagatgtatacacagcggcaacagttcttgtcgccagccgcctatgcccgtcagtcatagaagaggtaactgaagcagccatcacgcggtcgtggaactgcgcgttggagatcctacgaaaataccaaagctacagtacctccgctcggcgatgcgtggccgcactagagatcctctacgagcgggccatttctgaagctcctgctggggatattccaccgcagtcgcaatctggcgtatccatggccaatacgattggggacatgcccttgggcgaaggcatgaatacaagtcttttggaaggctttgacttgcctgactttcaggatatgtcgtggcttaatagcgttcccagccatctatactgacctaagcctttgctcgccctggcctctttgtttactttttctattttctccttttttttttcgtgtgccggtgaaggtctcatccatcaacagcctcgagtcaatcagaaagtcttcgtactcaaaccccagttcaaccatcagtcctagcgcttctattccattggttgggtagtaaaagcgcagaggattaatgtcaacatcgcatacttaaggttgaaagctaagcatcagcagcagcggcatcgtctgcgccgcacttccccaaccctgccccgtgaacgaagcgatcaagtttctgtgagcactcagctccgcatcttttaatgtcgggtgaagatacaccgagcaatttttccgtcaatctaaaggccgaatgtcccttggcagggggaaatccccgcattcccccgccgggattgcggaggcgaatgactggagttggctcacgatgcacagcgctgcagtgctctttcatttcccaacgcgactcgcgcccctgtgtccattttaagacagataccccttccctatctccgatccaagaagcatggcgcagtggctggggagcttgttcccacaattcggcaagctttaccccggatttgaaaatctgtggagaatcgatcaccaacacacgccataaaagccaggatctgctgcatcgagagaataaactcgagccgtacgcctctgtcagcgcataggccaaaccatgcgtctcggtgtctgtttcagtcttgctgcggcggccagtgtcgcacgcgcagccctaactgcaacagagaatgacacctccattgtccttgagaacgaccggctcagagccaccttcgacaaagcagggg

SEQ ID NO: 8734 - DNA, 697 bp, Emericella nidulans
ctctgattaccttcattgctgctcctgctcgcgttctcctttacctctctcaacgacacttctccatccttgatccatcaacatcgtcgtcctcctcgtcctccacaaacatacaccaccgctccctcccctcctttccattcaacttgccacatccataatctacccgctcttcacatccgcttcttcaatccagacagcgttgatgcaaggtctctggttccatctgtctgaggtctgagtctgttgtcttagctatcagtcgacagaagactgctgctgtttcacttggtttccgctctggtcggaatctccgctctcaatccgtcataaggggctttggggcttcatctctcatccgcttcctctgtgtctagtcgtcgacagacccggccttccagctctaccagtccggtccggagcaacgtttattctaccgtcagagttggcccaggaagaagagtatttctatctcttcggtggcaatcacaacgccagccaatttactgcgtcacaaaaacatgcagcggcgattgatcgaaaaccacccgccttctcctcctcagtacaccgacggagacttagcctgtgacgcttctcaattcggtgatatgtatccgttgtacggcactccagagccttatgcaggcgccgggcaaggccatgatgagtcttttaaccagcagagctcggtgac

SEQ ID NO: 8735 - DNA, 1148 bp, Emericella nidulans
tctttggtagaaatgcaaaaagaatagcgtcttactataagctctagagaaatgtggaaaggactgctgttaagcttgattagtctgatatgcagcgtcatatcgcttctcacccaggtcctgggttcttcctccgcgttatattatggccgcggtagaggccaaaatctttatatgatcgacctgtgttgtgaaagatgattggctttgcgcgtgttgggtctgaatctgagtctccggcgtcgttgaccagctcgttgtaggcggtttgacggtgaccgaagaggtttcctcgagcgacagacgttcggctggagctccacggacgcgatcatatgagatttaccggggctgaggagtcagtcaatggatgcctcaagtgagtggttgatgtttgctcacagtcacttggcctcatctacaggatcaggtgagactgcgcgcgcggaggctttcatttgacctacggttattgcattagctttcgtttagtaatagaaggcttgagccaaataataccttctcacgggtcattatgctcaaaattctagaatctgcttgaggtccgggatccatagtttagtgctgaaattgactggcaggttgaaccttacaaaagctggcttaagccctcttgaagacagccccattcttggtgtcttgaccccaaaaatctatccttgtaatacacaactatatgcactgtagctatgtagaacccctcaaagatccatgtatctagcaacctccaagcaatcatcctgcattctccatcctgcaacctgcaatttatatattgaccaggaatcctgagcttcctatgggtcaactcttttgtcagcttactttatccttacaatgttgaaggcccgtgacgagtcagcatctcacacttagtgtctgaagtcatacggtctggctggaaatactccccggaggggccaacctctgtcataccatcacattgctttgttttgcgcccgctaccataatcaagaatgcgactttatttgagcaaactttcataccctacccgccagccattctcgcgtcttaccgcacagcaagtgcccttgacgccactatcaattcgtataggcagcaacgctctagctccagctcccatgcagagacatctctttggccca

SEQ ID NO: 8736 - DNA, 587 bp, Emericella nidulans
gctgtatgcactatccccttatgtcttcaatgtgttatatgcacttgtgctacatcacctgactaaacacatttctctacctatctaatattcaaatccttatttctaataccttcatcacttctattttcctctctcccatctacccacttctctttatttcactacacctcttaccatatcctacttcatcctcctacaaacctttcttttaccttttcacctcaaaatactttataattatctatttttcctcctaaatatgcttatagaacccgcccaccctttcctatccttccataactccattgccttctctccatacgtaaatgctcctcccctcccttatttttctctattcatattctacctaccctacctgcttctactactcacactcattatttttctctatccctctttctctacatttacccttataactattctcatttcactttcacctacttcaattcattatgctcatctattcaaacccttattatatcgattctactctacccattaatccatatttacacccatcttattaatatctcttctctacatattactttacactatcc

SEQ ID NO: 8737 - DNA, 1548 bp, Emericella nidulans
gaagagaagagaggttaaaaaaccccaaaagaaatggaaagtataattaaatagataagagagagaagaaaagaaagatcaacaagggttaattatataaccacccctcggagggaagagggagggcacctttttctaaatctcagaacattaaccccaggagtcgagtgtttttctataggaactgtcccaaacggggtgggagtccctatttttttacgtgggagactttttggttagggttgaagcgaacctattcaacccagaaggtggtgcctgttcctgaatggcacttaatgataaccggggatgtactgatgcaaacgcggcacccaaatgatggccgaacgggcctagagggccaatgcgaacgaaaacattcagatcacttcatgccacccctcattcctcagcatacaaaatcctcgctgaacgcaaaatcgcccaccgagtcaaaggcaaaccagtacattacctcattaattagaacaggtttgccctcgtctgctgcagttgcaatcaggctttctagcgcgtatattttggatagaatccggcgagtatatagttggattgcttttgctccttgtcagctactgcaattcaaattagatctggtaaacaggtgaatacatgtactacttaaggctttagtccacagttggcgtcgcttctggtggagaattctgtcgcgggtgaagattgatgagacttgcgggtgtaaaaggtcgtaccagtcactgcggatgtttcgattgctagggccatccattcttgattaccttcccgcctgctacaaacccggggctatcaggatacattacgtctaagtttgcgctgaccagattcatcgcgtgtattgccgcagaaaacccatccgtctttgcggcagcactcaacccaggcatggtttatacagcattgaccaataaattgggagcagacccggacacgcttccgcttgatgatggtgagaaaccttaattttatccaaacaatcaaaggaccgccgaagatagtatgctgactctgtgtgaaccatgtacagccgaactccccgcaaatttcacggtatggttgacaagcgaagagggagcgttcttgaacggtcgatatgtctttgcgaactgggatgtcgacaaactaaaagctaagagagaggaaataaaagccggaacgatgttaactacaggcgtgaatggatggcctttccatcatgaccctgcatagtttgttctgtaattcatatcgggacggcaagccactcagaatattcaacaactatcctggcgctcacgttcagagttctaagatcggagaacagaatgatgtacatgtggagcacgtttgatagaagtctttacgaagcgaatatgaccattatgtcggtagttagaaatgccagaagtcgattcattctgtagagcgaaatacgcgattaaatctgatgtgggcgcgacaatcatcccgagcatcatgcctggggtgagctcttgaagcgatgctagaactttaagcagattgtctgagttccgtgcttagtcaata

SEQ ID NO: 8738 - DNA, 206 bp, Emericella nidulans
aaaaaaaggaatcaataagattaagggggccgcagaacttctggctatcttcactcgtggacattcccttcaggcggagtcgtcaccgggtctagggaagtgctacggagaggcagtccatctgcaacgacagggattgatttggatggggatatgcgtctaggatgcaagccatttgagctagctgttttaatacgagcgtgagg

SEQ ID NO: 8739 - DNA, 142 bp, Emericella nidulans
cgttcgcactggaaaagtaagcggcagcgatgcatcgactcgcaatgatgtataccgaagtcgcgcccattaacgagctcaatgacatcatcgcggactgctgctggtctaatatcgttgagcgcaacgtcagcaagcaggt

SEQ ID NO: 8740 - DNA, 101 bp, Emericella nidulans
agctctgtatggagtgatacttgcaacgcgagctagtgatcggtcggcgcacgatagctcagaagtagtgtgatcgtgagatgaatggcactgtgatgaga

SEQ ID NO: 8741 - DNA, 1987 bp, Emericella nidulans
gctggttgtggttgacgttctgtcaggggagctaggtagcaagattgtcgcggatgacgggcgtgcggctgcggactgtcgaccaggagtgatgagcggagaagtaggtgatttgatactcgactggagcttcgaatcaagaattaaacatgggagagatgaaaggttgggagatgaacaagaaccccagctcgtttcctgcgaggcgcaacaggcgagtctgccaagaaggctggcgagtgcagctgactcagctcctaagcggctctccatgtggctgagcgctaactggagagtacgcgtcctcgaagggcataagtgatcagttttacgagatggatatggactgctagaccagagggggcaagaagaaagtaaggccaagttgtcgactcgatttatttggctagaaacccatatatattgtagttgacgattatacctcgaagcagggctatcgaatagccacgagatcaccgactcgcttgtctaacctcgcagcagacagagcatttgccaacttgcacatcctcacggagtcgttccctagactttcatagatggcgttcagatctgtccctagtccagcatcctcggcggtcttcaggctccgggagtccacaaacggagcgatagtgggccagacactttgcacgttattgaagaagagctcgactccaaggtccccgaggccgtggacttctttgatcagctgcctcgttgtcgtaggatcatagccagctttctttataagattgttaaggtctccctctgcgaccccaagttagctcaagcaagcaagtgagcctcagcggcccggaaatgatgaaggcacaccatatttctcgtccacaaactcgaccaatcttccaaggttcgttgacccctgctctctgtatcgattatatccgccgtccttcaataccatggctctctcttcccagctggcgtttcttagtttctgaatatcatggtatccaacctcgacaagcttcttgagagtacggtctgtgagaccgtgcgacattggcttcgacttcaacattgcgtccatgagcatggcgagaatggtatctggtgagccgctaagcgctttaccctcgattgctgttccctccagcgggccacggccgaatctctcaattgtcttctcgagcttctccctatttggagaccgttgcggtttatcctggctcttatggccgttctcgcgttcttcgtcttctttattttcctcgctgccctctttgtcaccctcctcgctcatatcctcatctatctccccttcgccaaactccccctcatcgtcaacatagccctcatcatcttccgcttcaggcggtttcccagacttggatgctttacgcgggcgctacgacttcagctcttttgagtctttctcctgtaattcaggtgtttcgatgcttctcttgcgctttgttgtgctggttacgtcgtcggtctcaaggccgtcttcgacctgaggggctctgtactctttcatattggctgtagctgcgtcgttaacttactcgtacttcctcttatccttgcagattactgcgtagataaaaacaactacttaagggctaattctttaggttgtttatcgtcctggcttgtcttctatgatagtggtgacgcaatggcgacgtctacaaaataccccggtatgctgtggggaagcagtaataaacgacgtcaattactttttctttttcttttattttgccattatttttattttttcttatttcattttgggaaaggacattaactcatagtatttaattctagttcccaatcagtctgcacgggtggcccaacctgtcggtatttgttacaaagagacctttcactactaatcacaacttcgctcggattttcttctgcaaagtgtctttcaccaaccgcactgctcggcggcacagccatacgaagcctgatacccaaatcctccatgtccatagttatgcacgaccgcaac

SEQ ID NO: 8742 - DNA, 1181 bp, Emericella nidulans
gttattttagggtaaattgtttccttgagaatccgttcatttatgcaagcagtggctttaaggttcttctaaggtactggcgccggtaaaccgtctgtgtatctatttttggtctccctggcgtttcctatccactccctctacccccagtcttttgccgcgttcccgttctcctaaggtgccgtcaaaacctggtagtatagcttgagtttagtcattcgtcgcccaggagttgttacctaccctactagtctcgtatattgccgaggaaaattattctcccacagtgccgtcttctcgtcttactgattacgtggcgtagatatgcttcgccttctcggctccatagtcctgaatgaatgaggtatgcagctgttgatgcaggtgatgccgtaactccagtggtggatgtaccaagtatgatagccgactgaagtcgactttgccaaggatggcctcaagacaaaataatggtatcttgcaagccccattgtcgtagagccaggtcatatctcactcagcgcttttcgaacatttgaagcagctccttcttcgctggaaaggcgaaacgcatcccttcatgttgtagcaggcgaagagaaacagggacgatcagttcaaaccctaagtgagtgatcccatccaatgttgagtgcgccagttttcttctaaaaatgattttgcgagaggaattcggaccagctatccgtcggcagctcctctctgccggcgttagcagcgaatctggtatgtcgacaaagtgcaagcagcccagcgagggagtaaacaatacattcgggaatccataggaatgccgggtaaggcgtggttctggtggattggtccagaagatccgtcctccatcctgtccttgctgttctagcaggaatgtgaaactttcggggaatagccattcggattccttgcgaatcatgctagccaggcagtgtcgtagatagatacggccatggagctgaaaccatatccagacttcacctctgcggcaatgcttttgactagtatgcgggcacgggttacagtttgggtggaatatggcatggttaactcgccttatcaaaggaggtgggaaatatttaatcaaacaatctcccttagagcgatatgcatcactataaaaccctccatgttctccacccttcaaggtattgtgtgatcagtat

SEQ ID NO: 8743 - DNA, 1821 bp, Emericella nidulans
tagatgaatgtcagggtcatatgttcggtctgaggctgaaagctcataacgggctgctagcgtgctccgactgggcgcggtgtatctgtaataccagaatttaccaaattacgcaaccacgatgatggtatctgcaagcaagagtgacagattgatacggtaatgattccaatgatccaccggcccattcagccgaggttcattattcggttctctcgctggcctcatcttgcctctcgtcttcttcttgctcgtcctatcttttttttcttgctcgtccctccgcaacgtttcttcttaaaactaacacccttccctccatctcctctcactatcctttttcccgtcaccccgccacaacgagagtgatgtttacagcggcagctcggagccgtttctcttctactcttgctcgcccccgtctcgctccgacaaattcccttctcgctagatcttcagtggtaggatacttcttttctttttaccctgcagatatcggagtctggttaacagattatcaggcttcaacaatggctccgcggcgcaaggcttcgtctgtccccgagggtaagaatcacatgcacattggatgcactctcgaccttacgtggtgggtgtgcaagaggtagacgcagcttgctgattcggaacaggatacaaagaagatctctccaagggaaacatgctccgatttgaagattcgctaccgcgtctaccagtcccatcattggaggagaccggtcgtcggtacctaaagtctgtgcacgcagtcgtgtctgaggccgagtacgagaacaccaagaaggccgtggaggagttcattcgccctggcggcgcaggtcagactttgcaggaacggctgcttgctcgcgctgcagaccccaagcacaagaactggctcactgagtggtggaacaatgccgcctacctgggttaccgggaccccgtgatcccctatgtctcctacttctactcataccgtgatgaccgcgcccgccgggacccggttaagcgtgctgctgctatcactactgcggcgcttgagttcaagagtcaagtcgacaacggctccattgagcctgagtacctccgcaagatccctcaggccatgagctcgtaccagtacatgttcaactgctgccgaattcctgccgagcctgccgactaccctcagaagtaccctgctgaggagaaccagcatattgtggtggtgcgcatgaaccagttcttcaaggtacctgcggccattgatggtcgcccgctcaacgtgtcagagctggaacagcatttcgagcgcatatacatagatcgcgattatggggccccctgttgacggactcactgttgtacactgcgaccactggactggcggtcgcaagaagctcctggtagcttaccccatcatccccaatgctatgcgataacttgagaatagatggattcatcgaactgtttagcaaatgggcctttacccgtccataggcgagggtgctgagtaattctggtagggttgggtcccacaaccggtgattcgacaagctccttcctattattggtagctaaaaccctcctggcatttttatctgcacagccattcacccttgaaggtttcctcaccccgccttcttatccaccccttgaatgtacctttttcctgcactctttttatctttaagaaagagctgtgtttctaaactgcccgatgcccgaatcatcgatttcaccctaattatgtatctaggtaggttatgacatgagtctagtactccctggacaattcctcttccacttggttaagtttccacttccgcagggcttcct

SEQ ID NO: 8744 - DNA, 450 bp, Emericella nidulans
atcattgatacgtgcaatgagccagtcgattgcgcgctcggcggcgccaattgtccgcatggcgtggtgaatacggccaggtcctaggcggccttggatgatttcgaagccgcggccttcgccgagaaccatggcggatagcggaaccggtacgttcttgaaggagatgtgcccgtggccatgaggggcgtcgtcgtagccgtagacgctgagcatgcggtggatggtgatgccgggtgtggatgcaggtaccagaaggacggactgctgcttgtaggtgtctgggttgcgaggatcggtcttgcccatgacgaggtagatctggcagcgggggtctccggcactgaggacaccatttctataggtacactctattagtttagattcctaaagaagggttggaagaggtttacgagccattgagaacgtattcattccttcgcgccgaat

SEQ ID NO: 8745 - DNA, 1022 bp, Emericella nidulans
aacagacggtacggataggttgtttttaaacatgctacagacaaagaaagtacgttcaatacattctcaatcagactttgtacgaaggtttctttgttgaagcctctagtacgaaggaaacacctctttatcttcttcagatattctctttgtgctttataacttgatcaacaatgtattcaacacctaacattgcacctaatattgcagtcatgtcagtactatagaaaaacttcgcactaattggttaaaagtctggtccaacgcccaggccaggaacaagctagacagaaagcgggatagccggccgccaaccgcgaggggcaaaagacagaaaattgcaggagaagataaagcagaaaaaaaaaaaacctcatttcccctctcccacgttactcaacacagcaaacacctcacacctcaaggtcctcacttcacttgctgcatttctaagacctatttacactcacattattcagaatgggtaacgtaagtcatctgcctagtctaattagttctttcagacctactccacctcgatctgccggataaatccaccgtcttgcgcttaggtaactgacaagggacaaactccagggagcaaaagccgcctttaagcgtgagcgtaacgctaaagacaccaagtctggcggcaagtcgcagctaaaaaccgtatgttgcatttctttttaaagccctcttattttcattgatttaccatccggtacgaagtccggtgcctaatatgagtatgtagaatgaagctgcaaaggacatccagtgcgttgtatgccgggccacatttctcaagaccaccaggggtccggcgctcactgagcatgcggcgaacaagcacaacaagacactgcaagattgtttccaggctttgtagatgcgccaagaaatgatctcttctgcctacgtgcctaacctgccctgcctgttccagcatcgggtaagcccgcgttggaaatctcgaaaggagtgttaaggagtttgaattgattgggatcggactggat

SEQ ID NO: 8746 - DNA, 607 bp, Emericella nidulans
atgtgggttgacaacaaggccgacccaccaacccaaacaaaggacaatgataaatatcccaaaaacctaccctaccaacataaccaaaaaacacacccacataacctcacatacaaattatccataaataaacatcaccataacacacaatcaaaatacccgaatcactacacatacacaccaacaaaaccaaatacaccccaccaaaaaactaaacaaaccttacccatacacaaaaacctacatacaaactctcttataaaaaccaaactctacaaacccacctacctaacaatacaaacacaactaaaaaaaaaacaaacacccactaaattaaagacaccaaactctctcaacaatactcctaacccccaaatacccaccacaaacttcaacaaatcccacacaacaaacaaatcatcaaacaactaatacacaataactatcactaactcacgaaaacttacctatactacccacaatctacccaacaccatacaactccccatcatacaccatactacacatacaaaaactctacaaaactaccacacactaaacaaaaaacactataacatcacaaacaactactacacaaacacccatc

SEQ ID NO: 8747 - DNA, 1779 bp, Emericella nidulans
aatttgctgaaaccccagactggaatttcgtacggtgaattaactgtcgtaccaaactggacattccaaacccgatggaaccctcgcaaccccaactttttcgctacggcttcatttgacggcaggatctcgatccagactattcagaacaccagcactgaaactgccaaggcagtcgccgaccagaaccaggctcttgacggggaggatttcttcgccaaagctcagagtcagccccaggtctcgagtttctcgctgccaaaggcaccaaaatggctggagcgaccttgcagttcgacctttggttttggcggccgggtggtctctgtcaacttactcgagaaaggtgggcgcgcttcaaagatcaagatcactccttttgaggtcgatgaggcagtaggaaagtccactgagactttcgagtccgcacttaaggagggtgatctcaagagcatctgcgagaacaggatcacaagcgctgctaccgaggaagaaaagtctgactggagggtaattgatgctttgctttctgatagtcctcgaaagggcctggtggaatatcttggtttcaatgaccaggcagaagatgtgtccgagggattggccaaacttgggctgagcaaagaagatgaagttaacggggaggcggccccgaaagagtctcgcaggccgggagcaaggaaacataaacgcctgcagtcaatgtttgacgctagtcccgacgataactttctatctgaccttgccgcatccaagggcgcgaagacgaacaaccccttccagattttcaatggtgaagagtccgaagccgacaagaacattactagggcactactcttgggcgacttcgagaaagcgcttgaccacgctctcaaagaggaccgaatgtccgatgcgttcatgattgctattgttggtgggcagaagtgcatcgaaaaagcgcaggagcactacttctccaagcagacggagagccccaactacgtacgcttactggcttccgtcgtcggcaagaacctttgggatgttgtatacaatgctgatctgtccaactggaaggagatcatggttgctctctgcacattcgctgacgaaaaggacttcgccggtctctgcgacgccctcggtgaccgtctcgaggaacacattcgaaacactggcgacaaagcatttcgcaaagacgcctcgctctgctaccttgccggctcaaaattggagaaggtggtctcgatctggattgaggaacagcgcgagaatgagcaggcggccatcgaaacggctgctgaagattccagtttctctattcacgttcgcgctcttcagtcattgatcgagaaagtgacaatcttccgtcaagtcacgaagttcgaggactctgaacgtaccaaggattgcgactggaagctcagcgtgctctacgacaagtacattgagtatgctgatgttgttgcgactcacggacgtctacaggttgctcagaagtacctcgatcttgttcccgagaaacaccctgaggcggagattgcgagaaaccgtatcaagctagcgatgaggcagccaactaccagagctcaacccgcgacctctactgccagggtcgtttcgaacaagcctcttccccagccagctgcatatcaaccccctacaactttctccgcaggggctcgggctgccagcctaacttcatacgctcctcccgctccagctgcaaacccctatgctcctcctgccgctgcttcgaatccttatgctcctcctgtcgctgcttcgaatccttat

SEQ ID NO: 8748 - DNA, 648 bp, Emericella nidulans
  unsure (1)..(648): unsure at all n locations
taaagtatcccttttgggagtcaccccgcaaggccaactcattgccactgttctccacccgaatggaaacatcgcaagatatcttctggaagccggtctcgcccgatgccacgatcatcactctcctctcctcggtgctgaaatggcagccttccgccgttcggagaaggtcgctaaggatgcccgattgggcttgttcactggtcttgtcgcgcccaagggtcctgctggcggggccactgagcaggattacgttgttgtccgtgtgctcaacgctgacaccattttcgtcaggaacaaggctggtcaggagaagaagcttagcctgagtagcatccgtcaacccaagccatctgaccccaaacaagcgccatttgctgccgatgctaaagaattcctgaggaagaggattattggcaagcacgtaaaggtgaccatcaatggcaagaagcctgcgactgagggctacgaagagagggaagtggccacagttattcaagggaacacgaacgttgctcttgcccttgtgcaagctggatacgcatcggttatccgtcaccgtcaggatgacagtgaccgatctcctatttatgacgatctgatgattgctgaagctgaagctcanaaggatggaaagggcatgtggag

SEQ ID NO: 8749 - DNA, 570 bp, Emericella nidulans
tccaaggttgaacgaactatatcggctcgctgggcagtggtgttcgtgctgccgctaaccaatgtccccgttaaacgcccatgccattcaccaggcccttattcctgtcaccagcatttgtgcccgatgcctactataactgacgtgcctcattggtctttctcgtccctcaccatcctgctccctttcttatcatacagcctagtactctttctgctgttccatgtttctctccttattctccttctgtttgtcccccttttatacactctctccactccattctccctcttcttatcttttcttctatccatttattacatttctcttactactccttactctatcattcatctttctttatcttctcaccctcttcttttctttttcctctccttcctttcttttcaccactcctcttttattttttttcctatttacctcactctttcaattccttctttcacttctctaaatattttcatcactcttttctaaatttttccccttatcataccctttttttcctctctctctttcaactcctcaacttttctctcttcatcattt

SEQ ID NO: 8750 - DNA, 159 bp, Emericella nidulans
tatgtagctgctcgtcgacgaggaagagatcgatcgggtagtacagttcgacggctgcgagctcgtagtgctcaagggtacaatcttcggcattatgaccagcgcgttggacgatcgcaatagcgctatcgctctcatcacgactgacgcgcagatctt

SEQ ID NO: 8751 - DNA, 885 bp, Emericella nidulans
agaaaccagtacgtctattctgacgctccataatttgactgtctaaagataatttggaaatcatgatgcctttttggcttaacggtatattctcccaataactaccaaacagctaaattgtgtatgcgagctgtaatatgtatcttaccatagaaccattcattagataagcaggaaatcctgaacctctcagattcagacaagaatttgcgatctcggattagcagacccttcgagtgcgaaatatagtatgcagcatgtcctcacagaaccgcactctcacgggctgcgggacatgtcgcaatcgccatgtaaagtgcgacgaagcgcgccctacttgcgaaaattgccagcagcagggcctggaatgtctcggctacgagcgccagttgatttggtcgagtcatgatgccgaccgagtattcgccgccctctattttccggtatacttcgttacaggcgtttattagtaaggtctgcttgctaactaacgccatagaagctgaccagcgaaagatgacgcgaatgatcacagccggtcttgaacaccagtctgccagcgctactttggctagattggaaaatggaagcgcgaacgccttacgcttggaaggtgctatattcaaaggcccttttggtgttcaggtgttgccaaatccggcatctgcaaataacaaccaagatgagccacactctgaccagattgagcatgacctattggaatgggatcctctctggcccgccatcgcaggagactctgctacgttcgatgggctgtacgatgtacctgggagctcgggaaatgcgactatattagaccctgtattggacgtgatgaacgatcgtcagtctctccttccaccttctctaggcaccgacctcgac

SEQ ID NO: 8752 - DNA, 685 bp, Emericella nidulans
atccaacagcctcattgtataaatctgaagttctttcacctgtgcaccgaggaaacatgcctcgaaatctgggtcgtggtccaacatgtaaagcagagatgctttgtgaaatgtcgaggcaaactcgctaccggctggtaggatggatggcatcgttagctttccctaggaacataatatatgggtatttcaagaagattatagtacttaccagtttgctgaatcgtcctctgataggctctcagcatgaacccttctgtgtggaaagccgtccaaatttcggagtttagtatttggtcacggacaatacggaataacattgcccgcagagctaagtcaggggttttttcaagaatgctgctgtctttaactgtgctgttgaacaaattccgaagatcggtggctgcattcatctgaagtacaagatgtagtaaatcgggagggtgtaaacagctggacagtaaatctgcagtacgaataacaccacgtttgattaatatcatagcatcttcgatgctagctgtgcttgttggaaggtccgtatttcgaatcctcgaacgtaggaattcatgctcataagcctcactcaagcttgattccaggtcattaatcgagcaaatctggcgttcgatcaacctttccttctcgcgcaatatagcatcgttgcttgtagcactttcgggcg

SEQ ID NO: 8753 - DNA, 1481 bp, Emericella nidulans
ataccgcgggcatacatgttcctgagcgagtcagcacatagtctactcgcaaggagagaataaaatacataccttttcatcgcctgaaagtttagtgtccaaaatcaacctagcgacttcgtcgtaccggtgcaggtgtgggtagggagtcttttggctgcgttgaatgccaagcacaacttcgcccatgacctcaaacttcttccagttaatccggttgcggttgtcgccgataaaagtcctgttaccctcttcggctgagacgaggtcgcggcggtggagtggtaaaaacggaatgcgctcggagaaggagttgtcccatgccagtcggtaggcgaaatggctcttctgagtacccataagaattaccagtctcatgaagtctttgtgaacctgcggcgggacaagctcgcgggtttgattaagccgatgtaccggtgtcccattaatcccagcaatgaccgcacccaatgaattataattattcaggcggcgtagtttctaggatgaattagccaggtcaggtaacagtgaaatggcggacttacctgagcaatattcataaacttctctaatgcccgtgctcggtgctttggcttatcccgcaacaaaattacacttgccacgaagaatgccacatgattaaattgcttgatcatgcggttgacatgcttcaaactctggatcttatccttgtccggtccagatatactcacatgtcgcacaagatctcgcggtcggaaagtgttgaacattatccaatcaatgcgggtcaactcgttggcaaaatcctcatccgggatttccatcagttgccgccataccacctttgtcaacggtatccgccccagcaagtccataccgcttgcttctctttgcgcaccgtcaatgctcaagaatgtgaacgactgacttggtatattgccgggtttctctaaagatgggttcgataatgtggctgatagtttcattggctgatcgtgcacaccctcgctgaggtccagcgcactcatgctgtatatagggtcttcttcttcctcgtcgttttgattgtcgtcctcgccttcgtttccaattgagaagtcacctagaaacgtggatggcgagttcttaacaaaattttcaggtggaaaatcgttctcgtcgagtgcttcggcttctccatccttgaatgcccacccgacatcgtcatcttccgcatttacttccaggtacgatccaatctccttggccgcgaacatgtagaagtggctcctttcgagggttgagacaaaatccacaatccgctttcttgtcttcggatacgccaggtccccaggatactccgaaacccactgtgcaatgacactgagaagccttagttggtccgcgatgcgagttaattgatccgtaatatctttctcattccgctcaaatcgattgataatgcgcgtcaggagggtagccggtgcagcgaatttcgataagacagatgatatcga

SEQ ID NO: 8754 - DNA, 1252 bp, Emericella nidulans
  unsure (1)..(1252): unsure at all n locations
ggagggtatgaagttttggcagccaagatgcaagttcgtcgctagcgcgggagaagttcgggtgtcgcgagagggtcgtgaatgcgtcggcgcaggatagggtgagtggtgtggctgagcgatcggtatttgaacggcggggtgctgaggtgcggctctgactctggcagcatccaccgtcgcgacctttgccgccacagcatccagacggggtgccgctagcggacgggnaagccgccagggtcttgcaaaataaggttcttcgaggatctgagaggcatgcggcacatgttcctggcccattagcgcagggattggcagcggttgcctggcttatgggcggcagagtgacgttatctgagcgtacatcactatctgatggagggggtgtgaactgggagatgttctggattggtgctagacggttgctctcaaaagtgctgtttcgtcggcgttcttcctcctgtgcagccatctcagcacagatgcagggcgtgccatcctggcagaatccgcaggggtctactggcggggaggcaaccgggctagcaccagtgtcttcttcatggtaaggtgcatcgaaccgggtggtgaagtcgatctccatctcctccggctcgggcttgatctttggctctggggcccggttcatctcaatagtaggcattccaaacgcatcttcaatgcattggcagtgcgaggtggaacaccggttacagcccaatggaacttcttcacccaattcggaccggcggtctaccggcgagctcttttccacctccatgcgagaggatcttgacgatcgagccgggaggggcgcggcatcggtgccggaggtgttcttctccggcagcgatgatcgcaattccttgaccagcgtctcccgcgcggctcgctcaacggaaacctctttctcgagagcatggcaccggtcgcgccaccatcccatttcggtgggacactgttcggcctcccgcgagaggttcgcgatttgctccttgaacgtagcgacgtgaatctcatggtcgtcctcgatgcacttgatctggtcttcgagttcactgacacgggcagctcggcgttctcgaaaagctcgctgggcagcacgattctgggccttgcgctttgttggaggcgtgtttgtggccggcttgcgacccggcttaggacggggggggaataatccattgcttcaaggagacagaaccgggccttggccggaccgggtggaccggtgacacaagggggcttg

SEQ ID NO: 8755 - DNA, 1029 bp, Emericella nidulans
gcgtgtgtcgctcagtcgataattgtcctttaaaattatagagtgtgactactatatagcccacaaatacgaattgcatgtcttacctacatattccgtggctaagctgtataacgtaatcaatgcgtcaggtatctatccctgcattcgactgttcagctcgttctttcttctttatctcagcatccgagaggctgagtctcgactgctctatctgatccttgcgatttaatatctaattactgctgcctatggaccaagctcggcctcatgttcgagccatcatatcctgcactttctgcagacaaaagaagcacgataaacctcttcgttgatacatcacttgcctaacttcttgtccaggttgcgatgcgatcgccttcgaccgtgcgggagctgcgtcaaacgtggcctgaactgtgtctttctcaacccaagtcctccaccccgcactgctccagctcggtctaccaggcagctgaatcaacgagtcagggaattggagaagctggtgaatgctctagcaagaacaaagaactcccgcgaaccagatcataagagcgatcaaacagtcgacagtactgatgatgcagttaccagttcgctgggcaggatccaggttggggaaacgggcacgagttatgtttctggggcgcactgggcagcgcttcaagacagtgtaagctagcagctcattcatggaccttagctactaagttgcagatgtacagattgcagagattaaagagtgtctcgattcagatcaatctctgacgcagaactcgagtgagggtccagcactcttactagggctatgtccgccagggagtaaggaggattttttggctgctgtgccgccaaagcccgtggcggatcgcctgatatcaaggttctttaattcaatggagccgggagcttgtacgtcggtttccctcccaacacgaatggcagccttggcggtggataatagtcaattagaaaaaatagaacttttcagatagaagttgaagccgctatgccgtactgtgc

SEQ ID NO: 8756 - DNA, 2070 bp, Emericella nidulans
ttctcgtctggactaatgaaggaggaaaagtgaagggctttttaaattgaaagcctgataaggaccggatatagtgctggtggcagttagccgattacgtttaaaggcgtgagttacctactcgtctgctttccttgtctttgcattattttaactaacgcggatcctagacaattgggtctctgtcccggcaaactcgattgtcacgatacacaagcaaaccgtgcatcttcacccgattttagacgaatactacaacgaggattcaaaccacgatcgttcctcgtgctatgccgtctcaaagggccttgtcagcacagccccaggaacgacggttcagccgcagggcacagatactctccccaaacccgacatcggcattagtgatcccgggctggagcccgaggccaacggaggaatgccgagaagtcagcttaaggcaacgaatcagtgtgccctatcccactgatgggcaactacgtatatattttgggcgtttgcagggcttatggagtcactggtgttggagtcgctatcccgggttagagtagttcagtcagcctttttggtgttattatttaggtcgacacgttcattgcagtaggtaggtttatcggagtataagaatgttcttcattaggtcatgtgtcatcccccgttatgttggcgtgcttgaagtatttcatgcccacccatgcaattataacccatacccatgacatgaccgccgttagtacaatgagcgcaggatagtacccaacaatgggaagggttgggtcatcttccaactcaggaggggcgtaaggagtctccccaacatcccaagcccaactccaaacaccaaagcaactccccatccccacgacaaagaccagccaggtcactatcaagattatccagccccaccactcggtctccgagtaatcccagctcatcgcctcctggctgccagtaatgtcgaccgcgtgcgttgcgagaggcgatttggcgcgatgagcagccctgtacttctgatccggttgaagtgagtagtatgagtctgtgctagatggtggagtcggaaggtgcagtcctgcagctccgctgttgctggaagtattggaggaactgtgaaacgcggaaggggcagtgcccgcatttttcgagggaaaaggaacgatgtcttcatcatcagtggtaacatcatcgcggagtttattctccttggatcgaatggactggatatgttgcggtgtcgaggcagagagcttccgactacgttggggtgcgtccatcagcgtccagctcgaagtcgaagtacttctccccccaagtccctcccggctcgatggctgactgtgtataaatccatcactcgacgtggctggatcaccgaaagatttcatccgagtatgcgtaggtataggtggcgccgtacgtcttctctgttattctctggatctcttcttgctttagtctgcattattttccatttatgatttcactttccctttttctcttttagtcttttcccactcccattcctcacttctttagctctctttccttcccttttcttattctctgcttctctccttatttatcacttcttctacattctacctttctcttctcctcttctttattttccttcttttctttatttcatctcttcttttctttctcatttatctcttcatattccctctatccatgtctttttcctcctatctctcctttgactctttaccctttatcttttttccttatttttctattatatcacattcttcatttttcctctttctcttttcctctctatatcaatcatttttcttatatcttcccatttctgatctttttcccttttcattttcttcatcttattatattatttaatatctctactctcctctctatcacttccttccttcaatctcttacttctaactcgttatttactttaatcctctttcataagcttttctctctcttaattcctcttcctattcttcctttctttccaatgcctgcttttctcttcttatcctcttcttactcctccatcctttctttcttgttttctaccca

SEQ ID NO: 8757 - DNA, 1445 bp, Emericella nidulans
gaagaagcgatatgcggaattgcggtctggtggaagcgacatagcgaggcccgccattgctcggctaatgtctcgacgaaactcgtcggcacctttgtagcttcgtgccttgtcggagctcagccagtcaatacaggtcgcgactaaccacccctccagatgcgagatcagttccaaatgagacgctgataggcgcttcgctttcagcgtgactgacggtagcggatttcccattcctttagcggtcaatacctcaaaccgatcatggaccgtagggcgggtaataaaagagactagatgaacgccaggctcataattccgcccagacgcagcaaagtcgcgcatatccttgaggtgcacttctagtgctcctgatacgacattcaaacgtctggagaggagagaagagacgttatcgattgtagcaaacctaaaacctgaagctgcgagccgagaggcttcttgctttctcagctggcgcactgtgaacaacaactggcccttccagtacgtagcttggagtatgccatagcgcgcgaaaaacgtgatgaggtggttgatgtggtcaaaacatcgtcatacagcatacccaattcatccagcggttgtcgaacttggtcagcaagatcatacgctgccacgcaaaagtggcgcttgaacatttcgtcgaaccctgcattggcttcggcttcttgatccggatctatacccttcgcaatataccgcttgtgcgcctcatcctctacttctatcctgtccctcatataagggacaacctcttttattagactccaattccgacttgcccggaaggcccatagaaaagcaggatgagttctagtgaggtcgtcatcgctgaaggtcttcataatgagttcgtaagcttgtggcgagtagcgatcgctgggaaggcttagcgacttaccttgccgatataacggtcgactatctttcgggtgggaagaagagcatgtggtgtgaccataactcgaccttccaggtcaaagaaaacagaggccagcaccagctgttgcgcttgcattctcagacgtctatggtcaccactggcagttatagcacatgccgacaggatgccacaggcgacacaggcctagattgtgttagcattttgggaaggtgcccgttgataagcatcagaaactaaccaggactgagcatatgatgactgtctgagtccttgataactggccacctcggcttgcagttgggtcatgctctttataggttgttccgactgcagcagtccagtgcatgccggacacagccagagccagtagacagccgcagatcatgcgcctccaccaacgattagtccacgaagctctccaccgaaagaagatactgagcgctgcgatgctagcacatactgcaatcacagcagagccggcgacatttccggcagagtagctgcatttgtagttggt

SEQ ID NO: 8758 - DNA, 1190 bp, Emericella nidulans
ccctagcccacccccaagactttctacctctatggctcctcccggtaatgctttccctccgaaccctgtattccccgcgtttccttttgcgccgccgttttcgggggctccacccgcttcaggagcacaaccaatgaattcacccaatgtcaatcttgccgagcttcaaaagcagctcgctgcgcaagggatcacactaccgccaggtttcccgcaccatttcactcctgtgtctacaccgttggcgggtggcggacttcccggattacagggtggttaccagcctgataacaattatggtcgctgattgacctaacaatgcggcatttcattgggggtgatgacggcgcaacgggcgggcagttttcttggatagtagcatgacaaggcacacggtattaaatatgaatgtatcatagcatgtcgacgctttcacctgttcctaatcggagcagaagttgcattttcggcgtgatgtttctgttattcctggacagtgagttccgcaactcttccgtcaatacccagatccttacctttgtataatagtagctataatccgcctggcatcgggaagctcgacagtatcaaaaccatgatattcaccccggcccagacaatgggaatccacgtcgacattctgaaattacccgcttcgtatacggagcccaacctgaaatgttagcgtgcagtcgcagcaacccgcagagctcctcagaatcggttacgtacatgcccccaacgatacttcccgctacaactgcctctatacctcctatggcggcgtagataataggtatgcctaagcaaatcttccagttccggccttgcatgacgagcgaacaggcagcaaccgctaggtgacaggctatgtagaaaatcagcgtccagtataatgtgaatcgccagatatctctggtatggtataagtaataagcaacattgtcgcggccggggaatgggtcgtagagggatgggaacggaggcgttacgtaatttattggaacgcgattatttgccatttcgaatgcgcgtatacatgtattccgacctcaggagagacggaaatgtctgtgagaaggtgccataaaattgatgccgttggcggagctatcacgcgcaatatctttgatgcttctccagagtatggaaggagacaatgttgcattaatttgcaccttccatattaa

SEQ ID NO: 8759 - DNA, 667 bp, Emericella nidulans
ggatcgctttttccactgcactggcattatgggcgttcgcatcggccccgtggcgaaggaggaggtggacgatcgaagagttgcctcgctgaacagcgtctgggagggcggaggtgagtgtgtcgtgatcgattggggtttgtgcctggagcaaaatacggacgaactcttcatctccagccctaactaaagttatgaactcctccgcgcatgtattcggatctgcgttttcttcgaggaggatctgagtatatcgctggctgcgcatctgaatggcggtcggaagcattcgattcacaacatcctggctcgctgaatgggcgaggaaatggaacatgtcggtctgcttatatcgcatcgtgctgcaaagaaggaggaaaagcaggtcatcagtttcttcattcccggcctgctgtctccgtgcaaatcgcccggtccgtgcctttttcggtttctgcagccgaaagctctcccagacgctttccgcgactccaaccgagccccggctattcacgagatcagataaaacgcagcagtagtcctcgtacgtccatttgtctttctttatttttgaaacagtcgtggtcgtcttgaactcgccgtttcttcgtacttcggaggcttgtgcgagaagtaggtccgcctgggcttcgtcttccttttgggt

SEQ ID NO: 8760 - DNA, 107 bp, Emericella nidulans
caggttgacacataccgagagacacggatcgctcgtggtaccatcgacatgccgcaaacctcattgcgcacgagcaccccaaaaactatcacgtctctgtgctgaca

SEQ ID NO: 8761 - DNA, 576 bp, Emericella nidulans
agatgcgggagtagacgtccgcaataagatcttcaagtaacgcgactttcataagattgttgtttagtttcttgagttcaatcgcgtcccggaggagctcgagaagtgacggactttcaggcgcaacgtgaggaagctcttctagacgggcggtgttggaggagaactcctcccaccctatcggtttgaagacactttcttcatggccctcactaatcccagctgctctacgtatgacgcgggcgtaggttagacacatatcctcccataacttagtatgattgatgaaatcgccttgcttttttcgaacacgacgtagcaattgctcgagattagctctgtcatcaagctgatcaagtagagtgacgaagaagtatgcatatcttgtcgtgtatacgaagtgtctaccggggcgctcatactccggtttccacacctgaatggtcatggtcttagtgaatatctgctgcgtgactcactcttagcctctgcagcggcaatagcacctttgttatcgtcataaatgatacgtgcagactgtgagatgtgagcttccaatgtaagaatggcaggaaa

SEQ ID NO: 8762 - DNA, 1270 bp, Emericella nidulans
cgaccatagggccgagaaccggccatttttgaaaatccacacggcgagagagcttctcatgctctgtggctattggctgcaatgtcggagatccgcttggactgggccggattgggtgaactgctgtgaactgctgcagtcagactgtcactgtgactgactcgtgatccagcactggaatttgtcattctacagtaacctgcatcttgccctttgtcgtttgagatagcctcgtgtagagtgttgttgttttcctgtcttcaagggcttccatggagcattcccactggcttaccgtgtccactgtgcccggagtcggaatgcatagggcggtttgttgagcggcttgtttccatgaaactattgtgtgacatcacctgtttcgcaatcgcgcttttgcttcaaccacgagttcgagaaagttgtgatcgatcgataataataaaacttatggactactacagattcagaattctccgacgttttactcatagtctgtccgcacccttgcccaattgagattggcttgccaatagtctggcgttctattgcatttgcatcggccccaatcaacctagtcggaactgacttcccctgtcctggttcatataatgtttcctgctttggcaggactgagatggctaggtaaacaattgatcagacaacgtgcatcttagcgccatttcctgtttctggacctccttgaagcataacaagtctccgttctcacgctcacggatgatctaccgcctataatttgccctgcaggagttcatcccttggtcgatggggtcgaccagcggagactatgattgaattcggccccgtccactttccgagaatagacatgatggccgttgtctggttctgcactccaagaacaataacaatcataatagtcttgctcggctgagccttttgtgacttgtccatactgttagccccgtagccacgttgtcacggccctcaatggtttccaggaaatctccttcttgctttccgatttcagaggcttggtgggcgatgatcggtccagctccatcattattgaccccattctccgcttctggaatatggttgatgttccaggttcgcaacgccgctctgggatcccagctctagctccagctgggccgcggctgctatcctcctgcctgttcaggcatcgcccttccgcagcgcaccggattgtcctgccagatcacgttatgctccttcagccatctaagtgccaaggctggctcttatataatgcatctcatgcttcctg

SEQ ID NO: 8763 - DNA, 2659 bp, Emericella nidulans
tctgatcttttaggagtaaagagaaccaactcggctttggatcttttagcgaggagggattctttgacactttatgggcatatgatagtgaagcgactgctccattgcaggatgtcccgtgaggaaagctgtattttgctcttcgtacttgctctgcgtccaagagtatggtgaatatggctttcgagacaatcccaacctagccattgcgcactcgagataaccgctgtagatatggtacttgcaatcgctggagttctacttcaaagactaacagagtgtgatagattgaagcctacaataaatcgatctccatcaatcccttgccgatatcatcaaagttaatcgaccagtctcgtcttttgaacgtggaccacctgatggcgacgacaaacaagctgggcaacgtttccttggacggtgagaaaagttgaaatttagtgcctttacaataccatctcggagcgaggcattgatgccctgggtatgctccgttagttgatagtctgaagaatccttgtcgtccgtacgaaacgtgtgtgaagcataaacagtatatgcgtcccaagccgctattttggtcaacccgatgtcttttcgtttctaaacgagggtcagtataatggatgattctcagcagtagaaaacgcacaccaagcacggttggactgatgtcaaagccaggatacctggattatatctttccatctcagattgacaagctatcgcgtatccattggaaaagcgttaaagatatgacttacctgttgaagtgggagaggaacgatatgggatgtggagactacctgagggcagtattcagtgctgagaatgctgatgtccagctggcgagggaggcgttggaagcatttgcttggaggcatgaggcgagcagttatcacaatgcagtagtaagtaatactttggtaagtttgtaatagcttgggtgtgtgttgcattatgctgagctgctttcattaatcagttgtgaatcattacccaccatactccaaagttagccctaactatgcgcccgaagggaaaaactgttgacgtcagccatttagaaaaagtactctaaacataaaacagtcaagcctccagatccttcaagtatgtccacgacccaagtgcaacaaggaacttcaacctccctgggtatatcaagtatgaatgaaacaataaaacagttccacttctcttaaacatccactcgcctccatgaaaccttagcatcagggaagccttaaatacaacggccattacctctcttaagctcactcaggtcacccaagatatagctcatccaagaccatttcacaaaagcccctataataatccgcccctttccacccccgttccggatttttcaagccgactgtttcccacccatgagcacgtaatcgggcaattcgatctcggatgctctcgcgtctgaaacatgagccatggattgacgttctttgctgaaatgcaggcaattgtcgagttaaagggttagactcgttcgtatccttctctttattctttactggactaaacgaccagaacgaggatgaccgctgtaaacccccgcctacactctgtcgagaggtgctatgcgctttttgcgccgccgtcacgtcttggattagggcttggaggtgcgtggttgtgttcgttatctgggtgtggaggaaaggtgagaatggctgaataatcatggctggaggtgatggggcttgtggatagcgaacgaaatgtatttcgtgctgggtaataggcataagcattctctctaaaagcatacctgtgctattgaccccggccgttgattttggacccgtgtcgatacgaagagagtcagagaaaggtggaagaggatgtggctggggatgaagctctgatgcgaatgcagccctagcccggagatggctctgttgggtctggagagtgctttccattccgttacaaggataaaaagacagcggaaggatcaggaaagctgtggaggacttagacttgcggacttgcaatggggacggcaccaagagatgctccagctctggctccagctgtgaatcggggttctccccgtcgcttctgtaaatcgtgttgtaatcctcattgccagcaatatcctcgctgtccaagtctgacagaaacggatcatcgtccggacaatcaaacgtcttatctatgatgtccgttatgcatgttacaatgctgtcagcaagtgaaatggatcttgatctcggccttgaccctgcagttgatgcgtcaggagatggggatgaagatgaggagatagaaggaggcgtataagctctctcttgaggttcagctctggactggggccaaaggacgtgatcaaagcgattgttttcatcacgaactacgtccatgtttttttgcctcgctctcggaccgaatgcaatgtccccacaaagaccaaacctagagtctcgagggatagtttcccctggctctatcacggccggaaaagtacatagacaagccgcaagagaccctaatgcctcacgcagtaacggtaccttcttgctcagatactgatgggcgtacaaccgcaatcgctcgtagcacatagcattgtagacatgcaagtaaatcttatagatggggttcatctgtgctcagcagctcatctcattagcatgac

SEQ ID NO: 8764 - DNA, 165 bp, Emericella nidulans
agagcggcaatgccgaaacacattcaagacggccgataaggctcatgagagagcgcagagacagaagataggatacgcctggcccagacagaaccgggcggatacagtcagacgctgagcagacaccgaattgcgacccggtgcgatgagagtacacaacagaga

SEQ ID NO: 8765 - DNA, 518 bp, Emericella nidulans
  unsure (1)..(518): unsure at all n locations
tcgtagatgcattcagctggggaatcccttccacagaacgatgcccactcactgacctcacccctcatcactcaaataccgcgacttcctattccacccatataccaatctatacttctcctaccaattccactcctcactcactacaacaatacataatatccatccattccctcacccaccctcacccctcacttcaccactctctaactcaactataattcactaccgttccattactaatccaacccaatatcttccacactatatccctcaatcttactccacatctaaaccttaccatatcactatcactaactaattcctcctcttctaccccaatatctctacattctatttactcatatactattccacaacatgatactacttcctctattcntattacacacctaacaactacctacatccaccttatttatccacttattcaccccaccaccataatacaccacttctccacacattttcactctcacaccatactctcaatattt

SEQ ID NO: 8766 - DNA, 145 bp, Emericella nidulans
aagggataaacggagattcagagaccatgtacaataagcttcttcactcaatgtactcgagacaaacactcagactagctcagaactggtgacgttcagcatacagacccttgacggaaatatgcacatcgctgaaagtgcccag

SEQ ID NO: 8767 - DNA, 209 bp, Emericella nidulans
  unsure (1)..(209): unsure at all n locations
tagaagggtacccagcagaggagggtagcgcgtgcgtcggggagttaccatctcagccatgtggaagatcccaccaacgtagtcgatggcgacactcttgccaacgaactgntgctagaagtggcaagtgcagccagagagggttcgctttcagatgaccgggggaacaagagcacagaaacagacgtcattgggctcagctgcgagac

SEQ ID NO: 8768 - DNA, 579 bp, Emericella nidulans
caaactctctgggctgtttgataccgccagcaacaactagctgctctaacacaagatctcctgaaagtcattgacattttaagaattttgatccatccatctccctatcctcttctaccagtaaactcttccaaacacatatccacaaatcaactactctttcatacattttactctttatatattacctacactacatcattattcattccttcatacaacatctctatatacatacacacccactctattcactaaccacaactcttacattcaataaccaactaacattatctttacatatttctccttttaatctttacaactctcatattacccatcccattttacccttcattaactacttctaacacaatgataaaaccacatccttattctttctccatctccctaccatatcaccctctttacatatcaacattaacacatactcactttccactcatacaattcaccactctatttacttcttaccaataccttcactttaatatctatcactcatttccatctccattcattcccattctcttctatactcatattttaaattctctc

SEQ ID NO: 8769 - DNA, 1714 bp, Emericella nidulans
ctttacccatccttacactctagcatgggcgaaagggagcggcaacctgtcgagctttggcatggccgtctcacacactgagttgaatctcgttgcaagcggcccgaccaattcgcagctaccaggaaaccctatatcgtactacataaatccgatcggcattcagtcgatcattctgtcagcttccgagtttggtccttccaccgtcctcactgcagaaaaccccaagtcattttcagcggacgcggtgctgcaaccccaagccgggtctgctcgacgactcacgttaccagtgctgcaaggcatggcttttgtgaccggtatctacactcaactgcagccagtggttcagagcgctgtacatttccgacaagtcgtgactgctggttcaccccgagccggcatcttcaaataccgtgcgacgcttgaggataactcgatttggctcatctatgccatcccagacaatggacaggaccccaattttcagttagtatccactaccgatctgcgaggacctagcggatggtccggtactgtccaagtcgcaaagaacccagctgggtcttcaggtgaaagtctcttcgacaactcggccggtgtcttcgctgtcgaagcaaccgtctccggttcagttgacggccacacaggcacttaccgtcttgcctgggccaaggcagggaaggagactcagagcacgcctttgatgatgtttgctctgcctcaccatgtagcctcattcgactcccagaccagcgcccgagctgtcaatatcacgctacgaaccaccaccaaaggcatggctagagccgtcatcggggagtactggaccatgacagagcctgatctcccaacaaacatgggctttgcgccatgggtcttggccacagacagctctccccaactcagcgctgcagcccaggcagtgattcgagacgtagctattacggagcttcagcaggatattgacggtcagaccaacctgaacagcatgtacttcagcggcaaagctctaagcaagttcgccaccatcatctggaccgtcgacaagctcctcaacgaccatgccacagctgctcctgctctcgagcgcctgaagcaggcctttgcccgttttgcgcaaaacaaacaacagttcccgctagtatatgacactgtgtggaaaggctgtcgtctcatccgcaagttacggggggatgttggagccgataatggaaacacactatacaatgaccaccatttccactaccgctgcttgaatcatgccgacgatagacatgctgctttagttccaaactgggttacccccaccatgtctggctgaacaactcgggggaacaacacgaatcggggatgaacgcatgcgaagtatcatgattcaagccgtgacagggtgacggactctggaccttatcccgggttgacgcttcttaacagggacttaacaggctttaaagctcttctggattcgcgacttgtggggccatgcgtatcccaagggaccccacgaactgttatattagaatttttttcctccgttggcccagcgtttctcaataatatccttgggggggccatcttaacccaaatgcgtggtcaaccttgtttggcaattcccaaagaatctaacatctaggcttttttaacctcgctcttatcatctatcccctatccactctcttatttaaattctttttttactttctccttcttt

SEQ ID NO: 8770 - DNA, 188 bp, Emericella nidulans
  unsure (1)..(188): unsure at all n locations
agaccagagataccactatatggtctgtaaacagtctggtcgagaaaacataccgagcttaaacacttcaattaactgatgcgcatctccacgtaggaanagcatgaagcaccgtatcaaagccggtgtttccacagaatattccacgcaatggcattgttaaattgtttgtttacatacctggattc

SEQ ID NO: 8771 - DNA, 521 bp, Emericella nidulans
gccacttaccaagcaccacaagaccatggtaccgcattctaagcggcggttttcctcactcattcttaaaatcacttactcttgcttttactctctaccatcctattatcacatttacaccctcaatcaatatttcccctcttttttctattccttctaattctcaactcctatcctgatctcctatatctatccttacaaactctttattaatttttttttcattcctcccacatctttttattacttcccctctcctcttatcttcttttcactttcacactataatacaccttccttcttctttccttccatatccatctaatttcattttccctaatacttcattacatttcttccttcctcaatcctccatctcaaaacattcttcactctatcatcaaatgtaatcaccttatttttatttttccaatataaaacattactcacacttccgtaatcataattatattattttcctttcgtattactcttaacatatttttaatcctacctcccac

SEQ ID NO: 8772 - DNA, 773 bp, Emericella nidulans
gggcacatctgttcctggatctcgccgcaaatgctggatctgggttaagcagtatgacatgaaagtgtacgccagcatgcactgacttgagcgacctccagttcttgaaccagacaacctgagaacacggaatggcaagacttagtacaacactgccagggacatcgtgcatgcaacattacgtacctgatccggtggcatccttgagcagaacgtccgtttcacaaagtcatcaatctcttgccttgcgcgtggcgtcaaatcgtctgtcgccaggtcgtcttccagcgcaaatttggtccatactactaggtgaactatgccttcttccaatccgtatggccagtcgttgtgtaaaatccgcatatcctctgtttaggcgcagcctcgccgtcaacctaagcacgtctcgctagatattcaagagcaggctcgctctttcgcaaattgtatagaaactaaggagaacaaaccttcgtactcgaacgggtgacccttaggcttcaggtcttcggcagttccctctccccagccgagccgctccttaaccacgaatcgcattatagagccatacttagctacgatctgctccttgaattgtagatatctcctcaagtcactgggcaggcgttggaagagatcaatacggttggtttctatagagacgagaattagagattgtatgcacaagaaatcagatatatcacgtaccgactattttccgtaccagttcccatccttgtctctgatattgctcgtctggggttgagaga

SEQ ID NO: 8773 - DNA, 531 bp, Emericella nidulans
tgcacggagattcagtattgatgcccgctcaacccgcacgcaaaaactaccaatgcttatatacttatcttcacccgtaacattttttccccccctatctatctcatcctaaatctcactcacataataccaatcattatcaattattttatataataaccataattcattccctctctcacttttcactaacctcactcatcatattattttcctttcccttacccactcatattaattcttcctaccactcatacatacatctccactaaaccacaatacaacttatctatttttcctataaatatatacacagtcatatccatctcttacttacttacactttactctatataacttatgacctactgtcatacattctacattcttcacttcttctcttaaaagtttgaaattcatattacactactacataaactgctaacatatttttttatcaatattctactcatattttataaataattttcaaagtatgcattcttcctctcttatactcttttatcatcc

SEQ ID NO: 8774 - DNA, 126 bp, Emericella nidulans
gacggatacctcgagtaacagagtgtggaagagacgttacccctgccgaagtcgccgccgagtgctgaaagcgggggagagccgactaatcgttccctcgccatgagtggacccagaacactgcga

SEQ ID NO: 8775 - DNA, 1588 bp, Emericella nidulans
  unsure (1)..(1588): unsure at all n locations
cgctcaaaaattaggggaatgtagaaaagaatctagggagtaagtaaattgttcaagaacaatatttcctgaagggaaatagtaaattagaacaggagaaagagtattgagaagaaatctatgttatatagacaagggttagagggaaaacggaaaattccaaattttagagctttaacaaaagggtttagggcaattcctattgacgggagagtagttaaaacggattcataaattgagggactaggctcatttacacgttttcttctcaagtgggcctcagtgtaaaggggaagctagttttcctggaagtttgtaacaggacaaaaaggttccaatatccatcaacttggccaggaatgcctcactattgtaattccttttttcgacggtggtgtataaatcgcaggggactattagtttatgcttaggccatgaaccggtatagatcacggtctgagtccagtctttgttggtgtatttggttgggggggagagcaaaagggtcgtcaaaattattgtcgccggcccactcggacataagttatggagtcggcttttagtcgacactagagtaatagcttcggcgacagatttgcgtatgtaattgtaggtaggcacatactttgttggtcgagacattgcggctgttttgtggtgctgggaatcgtgtttgaaagattctggatttctgaaagctgaatctcccgttgtggatttgttcgccgggagtgtggtgtggcgcttgtggcggtgcatttacggtcacgtgctactctctggggtatatcggcgcgcatagagacgtactgtagacgcctatgccacctgtgacgctaacaagcacaaattgcctgtcgacataggcgttatgtgtactttgcacttcaatgcaaatatatctcagagtaaaatgcaacctatatagggagaagtgattgctcctagggctgttactggtgcgtgaaaggagaatggtacgagattgattaaaattctttgactgaaataaaatacatatatctaaatatccaaacacgtccggattatgaaattccaaaagtcggaagagagcctgttacctgccaaaaaacttgatctcaaaaggcctcaaacaaagatacgaaaacgccgcaaatgcaaagcccaactcgaatcccacatcaccgccggctgcgtgcctcgcgatagggcccacataccagggttggctcatcccagtgatcataccagcaacaccgaacccaaatgcaatggtagcagcgatacccactggaagcttttcacgcttatcgaagttctcaacgacatagccggagaagccgcgtttaaagacaaaatgagccatgattgcgatcgcagagtaaatggccagccagtacgcgatgaagttcataaaattctccaacaccgtttcaaaatgggagtaaccggggattgcgatagctatcgaaacaccagtgccgaaaagtgtccagataaaccgangaacgcgttgagcgtaccggctaatacttgaactgtgagaccacggaagaaaaattcggccagtgtttgcaacattggagggtaggacacgaggcaaaat

SEQ ID NO: 8776 - DNA, 736 bp, Emericella nidulans
tctcaatgtcgatcagatatgatctctattacacgaggtctccaatccacgctaagctcgtaggcggttcttgtgtctttggggcagtgaccaggtcgtctcgagcagtactattggccagaactcatatgtagttcttctaggctcgagagaagagagagcgtcgagtgactgttatcagttggcataccttccactgcaacgaaagcgttctgaggaccatacatctacaaaggacgaataacaccaggaggcaaggtagctcggtgctcgaaccaatgccaaaacacttcagctgacggttggcttccgggattcttaaacaggcggaccccgcgtcggatggaatccacgaatccatacaagtttctgacttgtttcgagcttcccagcccgtttcaaacctggtctagcttctctggcctccatcgatgatcgcagtgggaagatttcactcagtaaagtcgctgcaatgtaggtgggcaagattcccggcaaatccagactgggggaactcgagccggagaattctgcggtgtaactagccgccgtgccttggctttgttgggcgtcaggctctgcagagtggaggagcatgctcaaaagagctaatccaaagagaagaccgactaaaactgttccagagaaggattcggccggatcgtgcccttcaatctgctatctgatattgatgtcgaaaaactttcaagcggccaaaagtcggaatgttgattat

SEQ ID NO: 8777 - DNA, 466 bp, Emericella nidulans
gtgctgtgcggtcttaacggacccatagcaaccaacattcgagcgctgcttacgcctgctcctctaaaggaactccgattgaaatcgcaatacgtccacaacaaagaggtcaaggcggctcttggtgtcaagattgcagccaacgatcttgaacacgccattgctggctctcgtctcatggttgtcggacctgacgatgacgaggaggatattgaagaagaagtcatgtctgatctcgagaaccttctcagcaaggtttccaaggatcagcgcggtgtcagtgttcaggcttctacacttggttctctagaagctctgctcgagttccttcgtgtctctaagattccagttgccaacatctccattggtcccgtctacaagcgcgatgtcatgatgtgcggtacaatgttggagaaggccaaggagtacgcggtcatgctctgcttcgatgtcaaggttgataagg

SEQ ID NO: 8778 - DNA, 1277 bp, Emericella nidulans
  unsure (1)..(1277): unsure at all n locations
ttcggtttcgaacacatccagagcgggctcgaaatgttacgaaggacagaacgagtaagggacgagtggttgcaagaacgaacgcccaaagcaaggtcttccgaaaccgaaaataaccgtgagcggctgatctcgtcgctgcgtaaaacttgcaattcgcatgagaagaagttgctaaacggcgtggttgatgcaaaaagcattcgcactacttttgctgatgtacatgtaccgcccgaaacgattgacgcactcaaaacactgacttccttgtcccttatccgtcctgaagctttcacctacggtgtgctagctacggacaagataccgggtctgcttctttatggaccgccgggcactggtaaaactctactcgcaaaggcagtggcccgcgaaagtggtgccactgtgctcgaagtcagtggatccgaggtatatgatatgtatgtgggtgaaggggagaagaacgtcaaggccattttcacactagccaaaaagctcaatccgtgtgtcgttttcatagatgaggccgacgctatcttctgttctcgtactggagccagcagccgcacatcccaccgggaactgatcaatcaattcttgcgagaatgggatggaatgaacgacctttcaaccttcatcatggtcgccacaaataggccgttcgacctagacgatgcagttctccgtcgtcttcctagacggctactggtggaccttcctacagagcaagaccgtttggcaatcctgaaaatccatctcaaagatgaagcactggatgcctcagtcgaccttgccgaactggcacgtcgcactccgttatactctggttctgatctgaagaatctctgcgtggcagccgccttggcctgcgtacgagaagagaacgccttggcacaacagcatacaggcgaaagcccctatcagtaccctgcaaggcgaacgctgacatgggcgcatttcactcggggcatggaagagatcagcgcatccatcagcgaagacatgtcttccctttcggcaatcggaagttcgatgagcagtttggagaccgcaaaggtcggcgcaagaagagccccgggtggggattcacaacgcatgtcagtgaccaggctataccagatgctgcccgcgtgcgtacctgaaatgcaacaatagataccctagaatgagacttgggacgtgtttggttcgacagtgtgtttgacaaggccttcggggaggatggatcgatcatgcatgcttngaccacactactactattttttactgatacg

SEQ ID NO: 8779 - DNA, 495 bp, Emericella nidulans
tttgaatctcgcccagagtacccttgacgagctgatcgagagtctccgtgccgaccaaccagcccgaatccgcctcggaaagcaccaaaccctctactacggctcaaacaagtcacaacatttccattccacgcccgagtcccaccagtctgagatatacacaaaagacaccacagggaatgggacgttatacttcactggtgttctaagtcacagcttagaggtccaaaaagcccaagaggcaaccgcggctaccgaccaagctctggccaacctcgagcaaagcttgagtgcttttgaaagagggaaagaatctaagaagacccatatgatcaccgatatttctgaagtgaaagctctgcgcgcgggtgacagccgatcaagcaagctccttgcccgtatgccctcaagtaaggtggagctggagaaggatagattgctgaagaccaagtcaaacgccaaccgctcagtatcttcaagccctgctctaggcgt

SEQ ID NO: 8780 - DNA, 555 bp, Emericella nidulans
atgaacctactgattgcataatgagcggatcgttccacacaccactctcctagctaccttccaactacccccaaataacactccccctattaaccctccatcaattctacacttctacccaccatccccacctcacatcttccctacaatactacccccacccctcacatttctcttactctcaaaaacatctacatcatccactaccactaccacttaacactcctattccactccctaacacctatacctaatctccatactcttattcatccaacactccacaccacatctcctatccaccacaatacaccataaatcttctctacctcaatcctcacccattccctataacgaaccattaccttttctctcaatctaacatattatacattataccccttccactctcatcctcctcgctcccatacatacctttacccatctcatcataccccctactacactcaactctatactcataaccctcacatcacactatcacatctactttaaacacctaattcacccttatctacaccaacactctactct

SEQ ID NO: 8781 - DNA, 2146 bp, Emericella nidulans
  unsure (1)..(2146): unsure at all n locations
gggattgcccgagaccctatcccgtcactatagccttctgctccccatcttcgtgatcgaacccaacaacatccaggttttgcagcagccttgccgggttgttactcttcgggatcaccgcgattcccctctgtgtcgcccacctcaacagcacctgcgcgggagtcttcccgtgcttctctgcgatatccttgatgactgggtgctcaaaaagcggtggtgctccttccgcctgtttcaccgacaattccaggaaactcaaaggcccaaacgacgagtacgctgtaacagcaattccctcgcgctgcgcaaatgtcacaagccgctcctgcgtaaggtatgggtggtgctcgatttgcagcgtcgcaggccggatccgcgcatatcggagtagatccagcagcaactgcgcgctgaagttactgattccaatactccgcgcaagaccctatcaccaagactctccattgctgtccacgtctcctggatagtcgccttacccaattcgactttcccctcggcgttctcccagccgggtgggtagcggacttcggggtcaacgtatttcagcgagacggggaagtgcacgatgtacaggtcgaagtagtcgattccccagtcggacagctgcttgcgcgcgataggctcgacgcgctcgccatcgtggaagctgttccagagcttggagacgatgaagagatccgagcgtttcacgatgccctctttgatggcacgggcgacgccctgcccagcctcaacttcgttgccgtagtctaccacgcgttagctgttgttattcactgacttggattgggctattttgagggggtgtaccgcacgcgccgtcaaacagacgggtatccagccttgatagcctcgtagacttggtctgcgcaggtatcgttgttaaccttccataggccgaagcctacgaggggcatgtcgtagccgctgttgagtttgacggtgggaggggacatcttgaactgcaggtgtagatagttttgcttagagagagaataagagtcaggaagagcttatgagagaacgaggatacgcctcgcgaaagattgttctacccctcatgacccctccgtaccgaatgggtaaagtgaacactgaagagtatgattgcaactcgcgaggaggctaaagtgaccggctgtatgcgcggtgggtatggagtcaccggctaaattggtcgccggataaattggccgttagtcagaatcacccctcgctcaatttccacctgtgagagcgaggggaaaagccttgggagggcaaaaaaaaggaattcggatcaattcattcaataaaactttagaaattgggaataaagccgtggagttctgaaatgaagaatgagtatattaaggcaaagcatggactaaggtgctccaccattatagtacaggaaaatatcaggataaaaggaaagaggggcagggaatcatagaagacagaaaaccagaaaaaaaaaaaaaaagggaaataaagaagaaccttaaaaatcacacattttttatgccatggttatcattatgaattaagaggttctcccctgcgtagatggagccctaggatcacctctcccgtctgttcatagacatggtaaaggaggctagacagcctcaaccgcagtatgttcagcatatgccgaagatgtatgttcggggcccgccccgttcatattaggatcaccagataatcccccaacgattccaacgagatcatccgaaggcagtagcccctcaaagctgtgattctggtgcgactcgcgcgataccgtaacggagtgatctgacgtcgtaaacggtagatgatggtagttgccgccgctagtatcgccggaaattgttgtgtttggagctgaccatggggcgtgggaatggctaatttcgtcgagtgactgggtgcttggngcgaagtaatgacctaagtcggtggtgctgctgtgatcgtgcagatttgctggattatggtgtgacggcacataatggctttattgccgagttcataggttcaaagtttgaccaaaggataaataggatttgagcattaccgtgtgccgttgaaacgtaatcccgccgttggttaaatcctgggtgagggtgggaggggtaagcctaggttgggttttttt

SEQ ID NO: 8782 - DNA, 1226 bp, Emericella nidulans
taatctggtggaacccactgatagagagcctgttaagagacagactaggagttcacgcactcagccacccagacgggagtccgttacatccacgacacagcccatagggcatagaatttatcatgagctccccttgctattgtcaggcgacatctgcgtatggatgggagggtcaagcctcactcgttcaggcgtcacacccgcgttgaccatgttgctcaactccgatagactgttgtggaccaagtctggccgttaatggagcagctggcgatgaagatactgtgggtccagaaggacgaccataagtggatgagaacggcgtcaaagagaatcttccacgcaggcttctttgcagcggagtctacgtcttgagcatgagatacaacaatcatctctttctataggttgatgtgctttcagtctagtgtacttatattcttagtggccatttggaatgtttgcccatgcagcttaccctggggagataggcctccacaattccctgcagagccagctagatctcgtgcagagatgacacttgatacccatcaactaaaaaggaaaactgtaagaaagaaagggactgaaaaagaagcgcaggcgtaaaggaggtgcgagacaccaccacaagcaatctgctgccacaaacctagtgacgagtcattactaagatgatgcaaatctcagatgctgaagggcatcacctggatgacttaagagtctttcgtgagggcaagacgccacattgcaagaatcgagtgcccagtaaccgtacgcgacagtattcggtgggagaggcggagtcgggcgcgaggccgaacagtatggggtatgtccatggcatacaagctccactcgatgcaagggaacgacgtctctgatgtgtttcgtctgcatgatagagattatcctagagactgacggctgtatggcagtggtcgtcaaggtgagtgcaaacacaacaaacagtggaaggatctacctgggcactgcgtccactctgaaggacttcttccctcattgcaggaccgttgacattgcccggccactttccagccgggaaccccctgtttcaactggaacggcatcataaaacatcccgggagtacctgtgccaccgggctcgatctggggtaagcagattcgggagacgatccagcgctcggatcctgtgctcgatcatttgctccctcgttgcttgaacctaggccatcgcacaagat

SEQ ID NO: 8783 - DNA, 537 bp, Emericella nidulans
cttgctgacttccccgaatacccctaatcaattttaataaaattaaatctaaatatatcatttatctattaccatattacattaaatatttctttcacttcacactaacaacatattttcctacaactcacaccttaacaaatacatccctatcattacttataattttcttttactatactcaaaaaacctatcattacctcttacaaataaataatcttaatatcaataaaaattcattataattattctcccatacttatacaattaataataccaatcaactcaaacattcattaaacatctaaaatttctcaataaaacaattctatcttacaaacacatactaatactcattattttcacactctctataatattattactaatttcacctatataaataccatcatctacattcataaaacctaaaaaaatacatacatttcttacttaatcatccacatttaaccatttttttaaattactataaattcaacaataacacctcttatactcttctactcattcaactac

SEQ ID NO: 8784 - DNA, 1296 bp, Emericella nidulans
agggagagcggggaaggaagtagtttgtgagggagggtaggatgtaagggtatgagtggggcatgcctagggggggaaggtgagggggtggctaagggttgagggaaaaaatgaggggggtgagaatttgttgcagaccgaggaatctggagactaatgtgtgaggaacttcgggtggaagttgggagggatagggctctggagggaggagttagcaggagatcaggttgacagggcccttggggtgggtgggggttaacagacgggggggggaagctttaaatggatgggttgtgaatttagaggcctaggaggggggtaagagggaattgtttcacccttgttatccgggagtggcgttggtgtcatgggcataatcaagaggagggcctatccctgatttcacaatggtagcctgctcatgccagatgtagtgagggttgttggtgcaagaacgctcgtgtgggttggactatggggtgtcaatccttcaggttgctaggaatacgcgatggactcactctttctggactgtacaagtacgtctgtgttttgagcggcaaactggggcgctcaccatatcttccctcgagcggtgcaagtggatcttccggaacttgcactgtctcctgttccgtcatcatccacgcccaccgtacccaatttggagacaaccaccaagcatccgcattcccgtgccaacctcccgtgaagggctccagattttcgaagagatctttatttctctcacgtaactcaccgagaacctcatcgaactcgctgactagcccctcatcatcctcatcctccaaagcccacgcaacatcatccggcggcggaagataatggtccaacaagaacgaagcccagtgagaaagacgttgaggaaggaaactctgtcgctcatgaaacgacaccgagctgtgtttatgtctgtttgtggtatgcacggcaaccacaaagcaggcaaagagtgggaaccggaagggggaagcgttcttatcgatgcctcgtagagctgggatgcggcgcgacgccgttctcagaatagtgtcgaagcatttttgtgctgttggaaggacgtcggcttcgcggtgttgcagaagggagaggagctctgggaaggagaagagctcgccgctgtggaggaggatggaggggcgttcgagaatgcggacttggatgcgtgattggactaattctggaaatttaccttgtgggatacaggacatatgttgggagaggaggcgtttcgtttcgtcccagccgccctggaggccgtagagacgtgcgcgc

SEQ ID NO: 8785 - DNA, 1367 bp, Emericella nidulans
gattccagccatatttgcaacgctctccctgaagtattatcattaaaaccatgcatactatgtatataagtagtgatttcaagcctagatttttgagtagtcagcacgggtcttttaaggaggaaaacgctctaaaattccccgcatatccatgatcgacaccgctacgtatgccgttaaccgatgctagactggatgaagagcataaactccacagatcattctcataaccggcttgtgccgggcagttgattgcataaacgcggttatacttgatttcttggcatatcttgcagcttctggttgtcattgctttcggcaatccggtccctgtatggagtaaatcaaccaacatggttccccgcatggatattccatcaacgagagcgctttgcccacatccatccagaattgatctatatatagaatgcgcctggccgcgtgttgtatattaataccagtgcatctgtctccaaccgtccaactgtgcctcttcaggtatacaccacgataactgcaccgcaatgcccctgactctgtcactcatcctctggcctttagtgggcttctgtctctacgttgccatcattacaacatggtataccctcttcagtcctctccgtgtcatcccaggcccaaagtcatggaccttcttccccattttacggcacatctccgccatcctcggccgctttgacaccgatatgcgccgcttccacgcccaatacggcccggtcgtacgctttggtccgagagaagtctcgtttataactgctgacgcctggaaaaccatctatggtcatggacacacccagctgccgaaatatatgcactctgctgcagacccgcagtccatcatctctacaaacgacactgaccactcacgctaccgcagggctctatcgcatgcattctcggccagaggactgcaggagcaggagcccctgatccagagctatgtcgataagctgattgtacgtctgaaaggcgttgcggaatcgggtcgtccggaagacatggtcaagtggtttaatctcaccacttttgatatcatcggtgacttggcctttggagagccatttggtggtctcgatagcgcagagtatcaccactgggtatcgacgattttccaatctatcaaggtgaatccgtttatactactcaaagacaattaccctatgctcggctggctcctgcttcgcgcctttgtaccagagaccctcaggcaggcgaaaaagagacaaatcgagcactcgcgggttactgtgcagaagaggctctcctcagatatccacacccggcctgactttatggactcgatgctccgcagtcgccactatacttacaaccagaacgactggaaaaag

SEQ ID NO: 8786 - DNA, 1215 bp, Emericella nidulans
ctactacagcagcagtgcaagccgcatgagcctctttaaggctttccttttccctttaccgtaaccctgcaaactacgcaattggcctcctagctacaaccctcgaaaaataataatccagcaatacccctctcttccactcctccaagcaacctgccatgattagctctatctcttcgtcgctcttccccttcgccttccaacaaagcttcggaactccggtatgaaatgcatggagtaatgtaaggcgatgatcctcactaactggtaagcccttcgtgctgaactgccttctctccacaatttcgagtcctgccgaagcgagtgcgtcacgtacgtcgctggagaatgtgaggctgtatccgcgctgaacgatccaatcgaatactgcctcccaattagaggtcatcttgcagggtgggcacgccgcgagttggtcggcgaagtcgtattcttcccattgtatgtatccaccaggttctgcttgccattagtcgtcgaatatgcagttgtacaaacgagaacgcacttagcaaagaggagatattgtccactgcggttggtaatgatgatttccgaaccgcaagaactaggtgtctggcatgtacaaggtcatattttccaatatgttcctctgggaaaggcttgtagaagtcgtgcacggagaagtcgatgtttgcgacggactccagcttgggaaacagcgaagatgagatatcaaatccatggtattttgtttgggtagtgcttggctctgattccgcaactttctttagctcaaataaccagtccctggataccaagtcaatgcggcgcgattttatgttggacggataaaagcatacccattcccagtcgcaatgtccgcaacccgttcaaatctctctggaatgtctggatggagtagcttctgatgcatcatgtgcaataacagacgatgttggatgtcgagtctactggacgtgttagttatcggccgataaacaggtagagtacgcacctctcattctcatcggcctccgaagccttcaagagatagtcggacttcctcatcgtctgcgttaagctcggcgccgatttggcgaagtgagaaacggcattcatctggaagattgatccccccaagcggcgactcagcatcgtggcagaaaggacacatgggaattagcacggtatttatcaaatgctgtgagacacgcgggtggatgtcgccca

SEQ ID NO: 8787 - DNA, 1117 bp, Emericella nidulans
ataaagtatataataaagtaaagacaataagcattaatgtatgaaaaatgggaagtaaatcaaataacgattatagatgataagaacaaataaacgtaggttaatatagttagagaaacgagagaaaaaaaagagccaaattaaggaaatgagaaaataattagaaaggaaataaaaagtatgagaaaagttgagaaataacagagtataagaaaaagatgtaatcgtaagatgaaagtgaaaaagatggaggtagaagaaaagaggtaagaaggaaaatacgtagaagtatatggtgaagaggggaatgacaacagaggcgataaattgaaagaaaattagcgatatagaacagaataattataaagaaaggagagaatagacctaaagatagataactattaaataggtagaacaagatataataaggaagagcaaataaataataatgagagtagacaaagagagatataaagaatgaagaagaaatgaagatgacaaaaagaagataagagacaaacattcaaatagagaagtaaagcagagaacagaggacctataaggaaacagggaggaggaagaagagaaaacaaaattacaatatatgaacatgatgatactagaaacatagggcactaaaatatagaaaaaaacccgtacaggactgtaggtaccgcaagcaaccatagccgtagagtttctgcttgcattgtccagagactacataccatgaccatctgctcccaaatgccgttcgaattcctaaaccgagccctgagcattgcgtgattgttcgtaatcgccctgaggccattttcaatgaccgccggttccacatgacgagacaatcgcaaggtgatactttgattgaagcgagcagatcctttgtactgggtagcatactggaaatagaacttctgaatggctgataaatcaaaccaggtattggcttgttcgctctggctgaccttcccagcctctggttctgcatctttcgtgagatctctgacagaggttgcttggagaatcttgtgcagtgataggttgattcccagatagcgagcatgggaaacgatccccattcctgtaatgctgtgaccacctaccattgttagaa

SEQ ID NO: 8788 - DNA, 523 bp, Emericella nidulans
acggtgaccgcgaatgcatggctcactggattggagtccgctcgtcagtctattattcttcaagttgttacaccgcgtaatgcttaccaagaccatttgactccgttttcgtcgaaaggcatggcgagtatacagattggcgaaatggaccaagatttgagggtaggtgaaagcgacccggtgctgcggggtgctgatagcacgcaatgtcgcaacgatcaactcaaggccagaaacagccagttgttcaggtacgaccacgagcacggtgggcgcaacttgagttttgagtcttcttatatgtgacgctaggagtatgagcaccatgcatcaaggccaaatgatttaaatcgaatcgattatgacggacatgcagctcggaactagcagatccggacagaggcggaagtgaaggccgtcgagacagcggaagaagtagggagtgcgcggagcatgaaacagacagtaaatggaagtaaacctgtgaagaagagtctaacaattcagtgctaaaacggaacgt

SEQ ID NO: 8789 - DNA, 634 bp, Emericella nidulans
acgaaacattttaacacaggcgcctttggagttaaaagactgcatcctcaggagattacttgcggcagtataaacctttcctattattatctttactattacatttcatagcttattaactttatattttcacctccctgtatatcacatctctattacctttaaacttctattatctcatactttctcttatcctcattttaccccctttttcttcttccttactttacttattttttcttactatcttctcaatcattcttacatttctattctttttccctatccttcttcttcatttcctttttctcttatatcactctacatctcttaccttatatatctcatttttaccatatttctcaatttcatcttcttttctcctatcttcatatcttctctaattcaatctcttacatctccgtgactctctctctatttacatcttcttcttcaatctacttctgcctttcatattattcttatactcaattcatattaccttttttattccttctcactatccaatccttacccgtatatctctactcttcttcgcttacaatattttaatattcttctcctatctcacttatatatatccatatatcatcttaacttctcttatccttca

SEQ ID NO: 8790 - DNA, 778 bp, Emericella nidulans
atagatatttaattaatcatttcttgatcctctcccagaatttaaaatatttacctaatataaataattcattataagcaggttactacagataagtatatattaaaaaggtagctatactatctttatatatttataaaaaatctattaaattctctaaagataattagaatagttattaaatgataagaaatatcctaagtttacagagtaattactattaaatatagattattattttactaagtattgcaagattacttatatcctaagctatataaagggccttatatactactagattataatattcttatatatatatatatagatagcaagaccttatattattcctaatcttaaaatttggctattataatatattactagattaattatagctaaaaaagtaatatatttatttaattataatatataacaactctagtagctagaagacctatttttttgaataaagaattttatataaaaattttttgtaaatttctaattagtacttaacaactagtaaattagaattactaataagaagttatataaaaagaagttatataaaaaaactagataaaataaagaaattatttagtatgagtctactacttgcctctacctgtctaataactagattattagattatactagtaaagatagaaaatattatgaaggctttttataaagatctaggattataaaaacttactaagttagatctaaagaaagaaaggctgcaaaagaatctagtaatttggaaattaa

SEQ ID NO: 8791 - DNA, 1445 bp, Emericella nidulans
aaagaaaagaggacgaatagaaaaagaaggtataggaaaaaggaaaaattaaaaattaataagaatgaaagataaaaaaaaaaagatgagtaagaaaggaaaaatcagatagatgaaaaaatgaagaaggaaaaggataatagataaggaatgaagaatgatgataaggaaattaaaaaagagtggagagagtaggtggaaagaagaaaaaaaaaaagaaaagtaaattagaaaataaaagagtagagaaaagaagatagggagaaagaataaataaagtagaaggttggtaagacaatagaaaatgataaaagaaagaaagtagaaaagaaaagaagtgtagaaaagataggagaagaaaaagagaagaatcaaagagaaagaatgtggataaaaaaaagaaagagaaaaaaaaaaatggtgaaagataaataaactaagagaagaaatggagaaaaaagaaataggggtgaagaatgattaagtgaagaaggtaaacaatataaaaagatgggaaacataaacgagagaaagatagtgatgaggaaaaagaggaaatagagagagaagaacgaggaatagtaaaggtgttaagaacatagtcgagcgaaacattgagaaaatataatgaaatagaagaaagctgaaatgagcaaatcaagaagcaacaagaaggagtggtaaaagaggcagattcatgacaatatctgacaagtgggaaggcttaggacagagctctcgttcaagctcaggctctggcggagcaagcggaaattacaacgtatcccaaggcttctatcattatgatcactcggaagcaatcctgcggaagatggcagactatgccttcatgcttcgtgactggaagttggctgcatcaacatatgagctcttgcgttcagactatgccaatgataaagcttggaaataccatgccggcgcctacgaaatgtgcgcagtcagcacactactaaaccctcttggggcgggttcaaagataaaagtcgagagcattgaccaaatgtttgacactgcctgctattcttatttgactcgatgttcggacgcccctatcacgttacgttgccttacacttgccgttgaattactgaaatcgcggggtggctccgcggccgaaagcgcagccaaatgggccatgcgggccatggaccttggcttggtggagtctgtcggccagggcctcctaagcgaaagaatctcctcatgctacgcttcaagagcacctcctaatgggttacgattcggcggccgccgtcgcaaggctggtatgtggagtcttttcgctgcggatatgtggctcaagcttggaaagccatcactagcctcagcctgtcttgaagaagctgaacgtctatacgcagatgctttggacagcgacggtgtcttttcaatgccggagatgcagacctttgttgataaccttc

SEQ ID NO: 8792 - DNA, 600 bp, Emericella nidulans
tgtacgatgtcctatccgtcgtggaaattgcttctgtcgaggattgttctgacctatattttttacttacactattattttattttttttcttctctacttaacttctctttactcttattcttttttataattttatcttattttaccccattccctatatattaattaattattctttatatccgcttctatatctaattcatctcattaaattctatatctttctttatttattttacattttaacatatctcttttatttttttatctcatactttccactactttttctactattaatctcacttctaccaccttcattttttttttttactctcctaatttattttctttttttaaattctttttaatatacaatctaactttctttacattttatttctatttttcattaatctaccctttattttatatttatctcacatctttttcttacatctctcattaatctatcttttatctattttaccctttaagatttcttccttacttttttaacattcattcctatttactttaattttcatatttaatttctatattacttcctcttcattaattataatttcattcttta

SEQ ID NO: 8793 - DNA, 621 bp, Emericella nidulans
acggtgatgtttcatagtccttcagcaattcacaccatctatcatctatacttaactaatccatttcttaaaccacaccgctcatatttttctatataattttcctacaccttatctctcactttcaatattatcatactcaattatcttacctcccgccatacataatatcttttatccataaaataaatcctgcacattctacaatctatctctaatctcttcgatataccaccctttttcactttatctcacctcgcccaccccaatcgtaattaactcactttcccccatataccacatacaataatatctatccaacctcatcctatacatctcttataccctgatcactaattctactatcaaatcgtaccatcaaacatttatctaatttatatctgttagccacctcttcacaaacacgacaaatcatctctattactcaccattcactattaacaaaataattcttcttaataattctatcataacatatcacacaatctattccatcctacgtctattatcctaatgctaccacataaataatcttgtcaaggactcctactctcccatacctaacacctcactattactcgctcccattatccttccact

SEQ ID NO: 8794 - DNA, 568 bp, Emericella nidulans
ccaggtctttgcttcagaccccagtacccttggatacactcgtctcacttatacttaacatctattacacttaatatcttttaaccttttcataactttatatcttataaacaatatcttccaaatttatctaatataacatacacatctttttttcttcatttaaaattcttacatatttcctaaattaaaatattaaataccttctcatttcaactaaattcatttattctaaatattattcctcatatatcataaatattttcttctccttgctaatatttcttattatattcttttaatatctcataatactacatatttttacaattacaatttactactctaatccatcatatacattattaatcttaactatatacttactcttatcctacatcttctataatatataacattacacttacttacatactatctcataatcatctatctactcctattatatatatatacttatttctacctatataaacatactttaattctttctaatcaatttctactccattcactcactattaccatattcaattaattaaacttc

SEQ ID NO: 8795 - DNA, 865 bp, Emericella nidulans
ctccgtcagagggatcttcagatcgctgtcacgcgggttcacggctccgccgacaaagtagttgttggtgatgatgagctcgtgcgtctgctcaatttgcttaggtgttcccacgacgttggcggtcgttgaccagaggagatggtagcccaagagcattccaatagacctggaacctggttggttaactgtgtcgttgactataaagcgtatcggaatgggcatacccgtcccccttcgccacctcgcgaatggcctgatacccgacactccacggctgctcgccgccgccatacttcttcgggcccaggagcttcagcaagccagagtgttttaggagcgcaatctcagcgcgcggcgacttgttctcctggtctcgttgcgctgcatcctgcgctagaacttcagagacctctctggcacgggcgagccacgactccgcggtgtcggggagcgtggaccacttggacttgtaggtgtcgtagcggaggggtcagttgcggggacgttagatgccatcgtgaagtctttgagccagaagttgttggtttccatgggccattgtcaggaacagcggtggtatatctacccctgccgagcacagtttgtggattgcatgagattcatcatcgatgatgcaataagcagcattcatacaaactcccagcttgttgatgctggtaatggcttgtctcggccgacaattgtgtatgtctcgtgctcgtcagatcgaggggtgatgtcgttatcgctagcatgaacgcccgatcgacgacccactggcgaccgggaaagaccagttgggtacttggtgctcggggcactcacctcataatcgaatctatcgcgcaattctgttttgatt

SEQ ID NO: 8796 - DNA, 515 bp, Emericella nidulans
aggggcaagcgataagacactagtagttggatgtttaccggataatcatatcgacaccaatcccttgaaaaggtcagtgaaagtgtttcgggagtcagccacgcaacttacaatctcttgtgcctttaggtgtcttgagctgaaagctcaacttgtttgacttcccctccttggtcgccatgtctattggttcttgaatttgtgaagtgagagaacgaaagtgttgttgatagggaacgttgatggcccggatttcccgaagagtgcggatgaggggtctccgaagggcgcacagggtgagatcacggaatgatttgactgaagaaatcaaccgcatgaagataacaactggagcccgtggacgcaattgaggggctgcgtctggtggaacggaaaaatttggatgagtcaagcaaccgagccacacttgcaccgcttgcattagccacactgtctttacatactctggcctgcaaatcctcatgatcacctaacaggtaccttgtacggccatg

SEQ ID NO: 8797 - DNA, 155 bp, Emericella nidulans
  unsure (1)..(155): unsure at all n locations
gccgcagaaagatcgtgagcaatagcgaggtgcctgaaagcgattaggataggatggacgngaaacgcggacgaggtactgttgatcattcagggacgagcttngtgatagaagatgacaggttcgcagatgctgacatctggcatccggagaag

SEQ ID NO: 8798 - DNA, 636 bp, Emericella nidulans
tgtatgtactcgcttggtgccaaacctgctctgtctgtgcctccacaccagccacaccatctaggatgcacactgcgccatcgagaatgcgcaatgaccgcagaacctcgaatgtgaagtctgcgtgaccgggcgtatctatcaggtttaccatgtgagatgacgcagatcttggagatcgagggtcttgccgagtagcattgccgcactccgcaggcggccagtggaaggtgatcgcagcggattgaatagtgataccccgggcgcgttctgcagggaggaagtccgtaactgtggaaccttcatccacgtctcctatccgtcttgtgagcccactataatagagcatccgctctgtagtggtcgtcttgcccgcatcgatgtgtgctattataccgatattccgagtcaggtcaaggttcacttgtgattgcggatggaaaactgagaacctccgtacttgagaaaatcctggcttctcgagggacgatttaggtaaagacgcaagtgcccagcacttgaccttggggtagtcgaggcatcgagcagctcggccgttctggcgggcgcgcaaaagcagagctgagaccatggcagcagcaattgtgtaaaccagattactggacgtaacgattt

SEQ ID NO: 8799 - DNA, 736 bp, Emericella nidulans
ccgtctggatgcctcccgatccgagtagcttccagatttgatatcaggcgacgatctagatgaggcatgcggcttgtcttcgagagatcctctgctgccgtaacgggtacggcttgggcgtttaggagatgccgcgccggtgggagcctcttcgaacggtggaggtatttcactcgcagcactacctgcgctagcgtgtcgaccaggtcccgacctgccatcttccttttgctgccgcgatcgcaggcgtgcttgctttctcttcaaaccgtgaagaagattgatgattatgtcacgaatccgagggagaaaaacgtcgagagcttgtggcgaagcgtcctggctcagagtatcttcgagaatcgtgcggagaagatcgggtaccgggcccaagtccgaagtgtccaccccaatagcgctgaaggcacgacaagccaaattaaattcgtatcccaaccgtacgtagacgtcggagacttcgctttccgaaacctgtcggcgagaccattgtgtcaatgtctctaatagctgttttgttgcgacgagtagatgcgtgacgcttttttcgatttgcgatatttgcccattcggctgtgattgatcactgccagttagtcacaacgtatttagggcgataagaagtagactgcgaacttaccacggcactccgggacgactgagatcttgacgagcttgacgagctccgaggtgcagaagactgtgaagtcatggcggt

SEQ ID NO: 8800 - DNA, 922 bp, Emericella nidulans
gttttcaatcgaaagggcagttcccatttcactggcaggctcctcgcatttctgaagcagatcagacgatccttgtagcccacccccagatccccgcagtgttggcaatctggccgggttgacggagcagagcgtataggtgaaggctgtaaatttcacagtataccgggcccttgttgacgactgcatccataagcgagtaccagtgatgtcctcgtgtcggatattcgagctcaacgtctcttaagtagggggggatagaagatgaaagttaactttaacgatggcttcgttcaagtggtgtcgactaatgcggcctagcccatacccgtacctgaggaaccgaggcacacgtaataacctattggatataacttcacaaggcatagaaaatacttctccattaacgattttggaagctcgaaaagagctaccatagcttatacctgaggataacatcctttttcttcagcgtcttgacggcagaaagttagaagttatggtatgtctcatcccgttcatctggtcaatggctgagatcagtcgctgcactgtgtttcataaagcccattgcagcaggcgcaagccacaccagacttacatctcactttctaccaaattccttccggctttacggattgctttggagtcaattccaatgcatgcaatagaacaactctggctgggtacaacaaaggcgaagcccgcctctatgcaatacagaattgttgcgcaaagccttaccaagacaaatgcgctaaacggtcatattgccaagtgtagaatgtagacagagagaatattgaaggttcatatgctataactgatcataacaccaggtgtcatatgcatagcgggtatatgtgccgcccgagtatatatcagagaaaacaatatttacagcttggcaagcagcttgttg

SEQ ID NO: 8801 - DNA, 646 bp, Emericella nidulans
tcaatcgactgtgtgcctgagccgatttgccggaactgtcgctagctaagccatcgagactcgtatgattgtatcggtttatcgacgccagtcgactgggcctgaataacggcaccgagccactaaccagtgcttttggggggtcgttcggggtagttaggacaagcactgcagtcaaggctgaccctcccactttacctataacgccggcctacaactggatccgatctggattactattattattggactcgacttcgctgactggttgacgtttcgctcgttgcatccgtaaccagtctcaaacgactgcatcgcagcttttcgacttggtctatttgtggctgtgagggaaggaaggtccgtcgtcaggcttattgggtgcgtatacccatcatttccaacggccgggcgctttgcacggcggaacccactcgtttcaaatcgacttcgtatgaggctgacactatttctgatctgtccatagaacatcgcatcagcccgaagaatcttcatttgcgtcttaccccgggtttttctgacgtcgaccctttcctcgcttcacgccccccaccggtcgcatttcaacctcctcgcatttctccgctattcacagctcgaccaccatgacttcgatcagtagtag

SEQ ID NO: 8802 - DNA, 857 bp, Emericella nidulans
actatactgactgcgttcatacttccgtaccatgcgccgagaccaacgacggcgatgttgaggaccattgtgatgagggtagagaggattaaagaggttgattgaaaggctattgtgattgaacaagtttatctgtagcaaatgaataaggccgactgggaagtatttatgcctatcgtacaaatatcttctccaacttctactcgagaatctacatatgcacatgagcgccgcctctttcctaatcgggtgatttttatattgccttcacgctgtttcccctcacatacgcccacatatatggcttttacttgcattactgagtattattgcgcgtttgaagagaccttgcagatgttggagcatggggtgatcaaacgtgcagtttccctttcctggacatccgcaggaccggcccagaggccagcatagtggatcgccggtatcttcctccactctcgtcgacatgaatggactccgtactctagtgttctatgtgcgagaagagtgggcagtctacgtgataggtggagggtgacctagatttggaggaactctttcctagacttctttacaccagaagagtggccattctgcgtgggatgtcaagatacggcagcaaatagtcttctcaaattgcgctagtagattctctcacaagttcggacgcaatttcagggcttcctcaaatacaagaccgagctgatcgatagaatcagccgagatctgatgatgcaaaacaattcgctccccctccagtttgaccccatacttcctcccaagctcgttccatcgatcaaccgttatgtctgcattatccagattgacccagacttgattcgtctcgacctcgcgca

SEQ ID NO: 8803 - DNA, 971 bp, Emericella nidulans
acccattatgaaaccgcaggctggagctccaaacctgctccctgagggtctccgttggatcaagtcacgcacaggcattgctatttcgctcccgacttctcaccatgctccttgggagaagcctccttcgtccacggacaacttggacctttggccaaacggcacagccctagaactgccaactaaaccaatactcagacaatacctagacgcgtacttgtcatctctgatgcacaaagttttcccggtagttgactcctctttattccccctgacaatccgggcagcatatcagcaacggggtcctggactcgaaagcccgaaccctagcgcgcgagcttgtgtgttcgcctttactgcccttgtttcctgcttgggtcaagttgaccccggtagcagtgttgcacggccccctcctgttccttgcagagagtatatcatgcaagcgcgaagaattctgccggctatcttacaagaaccgcctaatctggacgcattacagacaactcttctactggtaggccttccctcgtgttacgtagagtgagacaagtccagagtttgttcaaaccctaacctccgacttctttgctgactcgctggtcttgtattattaggccctgatcagtgtcatcactggcgaattacaaatagctgtatactatacatccattgcctcacgatttgtcatagcttcaggggctcatacaatgaccgacactctggccccccctagcaccccagacgtgattgcaaaaaagcatcttcgcacccttttctggctctgttatacccttgacaaagacttcgcacttcgcacaggtcaagcgcatgtcctcaaagatgatgattgtgcacttgacataccgcccgcctatcatgagcaccttcattcatgtctggatcattcccctggaaccgacgccgacattcgcggcccaattttccccgtcgatctacgtctgagcata

SEQ ID NO: 8804 - DNA, 103 bp, Emericella nidulans
tgtagcaaggatagtgtagatgcacacgagcgtggatacaattccgacagttcgctcggtggaaattgtacgacgaggtaatgcgactccagggcagattggc

SEQ ID NO: 8805 - DNA, 584 bp, Emericella nidulans
atctcgaagcacgtctcctgtattggggtcaatagccacaggcacatatgtgttattcataagcaaccgcaacaataagccgtggtggcccacgctcccagccgtgaagggccccttgttatagttaaacaacgcgaagattccctcggtgctgttgaagaactcgccgacctcggcgacaccaaagcgctctctgaatcgatcccagatgtcagggcgcaggccatttccgtacatcagacgcacacggtgctctttgtcttgcggcgatggcggcgcagcgagcagataccgcgccgcctcgccgacatagacgaatgcggtcgcgtccgagtcccggatatctgcccagaactggcgcacactgaacttgcggcttatggcaattgagattcccgatgacaggctggtaatcagtgctattgccgacgtgccgtggtagagcggcatgcacgagtaccatctgtcgccgtcagggccgtccttgtcgtcattcctcccggcgaagaaggatcgactgatggaggcgtgacatggtgaaacacacatgggtgagacggtggttacatgatgtttgcaaagaa

SEQ ID NO: 8806 - DNA, 792 bp, Emericella nidulans
gggtgacaggagcggacacgaagaaatgaggctcaactaggtgatgaaacaatgaaagggattggaaaaagggtggatagcctgcgaaaacgggggaaatgaaaacgaggggaggaagtggaagaaattcagctcctgacgacagcagtgactactctgaatagggactgatgacgggtgagacagaggctgagcacgaagtggcgcgcagctggaggtcgtgctgctgtgcttccaccaatccaccaatccactctatagagccttgtcgctattattatcaaatcgcttgatgatggagatttgagaatcccgcaatttaatccgttgtttcttgtacagttgccttatccttcagggggaaatgagctgatgagcttctcgactcccaagcaaacttgcaagtctccgacgatcacctcctttttcaacaaagaacaacaattattatctgacaacatcaaaactagagaacacacgtttgaaaggattttctttccaatttaaaatcacctacaacccgctcgtggcgctgcaaagtgtgcaaaggttatcttgatgccttataaggcagggactttctcaggccttattgatcgctagctctctgcagggacggacgcgcagcctgccgcagagcaacagggcggaccataacagcgggcggactacgtgccagggcggaacgagaccagaccacggcacagcttaagagcgcgacggcaacattagagtattgtatagacaattatgacaggcggaagctaggacgattaggacagagggcagtca

SEQ ID NO: 8807 - DNA, 246 bp, Emericella nidulans
  unsure (1)..(246): unsure at all n locations
tgggtgcagntattccgaagttgaatcctatgccgacatctggaacagaagacngtgaggcaatgttgatactacgatcgaagtctctgatcgttggactgtactcgaatttttgttgggatacggcgaaatggagatctcaagaagtcgacatgtactggtctcgagcaaccgcaagcgtcgcggctgaggtgtagaatgcctggaacctagctgtatccagtagaagaacgacaccagatatga

SEQ ID NO: 8808 - DNA, 467 bp, Emericella nidulans
gagaccccccatccatcactgaaccatcatatccacaaccattccatcataatatccataacacatattcaaacatcatctataccctactctaaaattcacaaaatacaaccctacaaatatacctatattactttaaataatctcttaaaaaaaaacaattaaaaaactaaaaactttaaacaacattactaaattaaactaaattattcacttacccactattacacaaataatcactaacaaataaataatcaaaaccatctccaattacatacctaccacctactaacatcaaactcacctcccatataatacctcaactaaatacttaatttatatagacaaggaccggcccaacccctctattaaaataaataatatcactataaattcacaatgcaaaacattaattaatacatattaacactataaaaaaaaactaataactcacttctatacatcac

SEQ ID NO: 8809 - DNA, 1503 bp, Emericella nidulans
agctgttaccaactatttctggggttggttgtcggatcgcataggcggaaaccggttattcttttaggcacagtccttaccgcagtgtgctttgtcgcattcggattctgcagtacgttgtggcaggctgtcgcggtgcaggcgttgatgggtgttgtcaatgggaatcagggcttggtgtcgacctgcctcggagagatcaccgacaagagcaatcaatcaaaggcatttacctatttaccggttctttacggcattggtggtgtcactggccccttagtcggtggcttgcttgtctttcgacaaaatccgttcaataacgcggagccgaatccgtacccatacctgtggccaaatcttctatctgctgcgattctcgggctagattttgttgtggcactgatcttcctgaaagaaagtctggaagatgcagataccttgcccacgtttggcaagaagatccgcgacctgtttgcgtggttatggcagatgaccagtcttgggaagcgacctcgcactatacggccaggggaccatctgccttataggatgattcgcgaacaatcggcagacgccgacgagcatgatagcgagctagattcggcttcagaagcatccgcagaccaccagggtcacgaatccctgacacggagcgagctgctcaatcgagacaccattcttctccttttgacgtatctcattttcgccctgtgcaatatcgccttcaacgcgcttttcccgatcttctcccaagcagccccgcctattgggcgtggtcttacaccgtctgagatcggtcttgcccagggcttcgcaggcgtcgtgactataatcttccaaatatgcatttttggccagctgcgcaacaagatgggaaaccggtggtcctaccgagctggcctctttggcttcgtggtttccttcatcctcatgccgttcatcggatacaaaggcgatgataccgggaagactggcgtcaccggcaagacagccttcatggctatcgagctctgtctcgtcttactagtaaagactgtcgctgctgtcggcggcttgaccagcgcactcctcctggtaaaggcctctccctctattattaaaccagcaaactgactttacagatcacaaattccgcccccgaccacgccgtcttaggcgccctcaacggtctcgcccagaccctttctgcagcaggccgtgctgtcggtcccttcctctctggcagtctcttctcccttgcagcccgcgtccagccaaagggcgaggtaattccctttggtgtctttgctgcggtatctcttgttggcttcttcctcagctttggaataaaggggcgcaagttggaggctgacgggtgggagagtaatcctgacgacgatgacgatgatgatgatgggagtggaaattcagatgacgaggagaactgacttgccggtgcacgtcagccgtgtcatggcatggcaggatggtgagctcggcctttaacgatgtgacgtttgcata

SEQ ID NO: 8810 - DNA, 204 bp, Emericella nidulans
  unsure (1)..(204): unsure at all n locations
gtcgttcacagatgactaccatgagtgccaggactcgcacctgcatagagtgcaaacgaaacacaagaggtccgcgaacatcgtgggcatggcaaaaaggaaatgtagcaagaggcgcattgctccagatgcgnacgaatagggatgagattcaatgctgggtgctcgggttatacaggtcccgtgataactttcgattcatac

SEQ ID NO: 8811 - DNA, 717 bp, Emericella nidulans
tcttattcaaggtatagtgtgcgattcaaagcctcccagattgtagctgtccaaacggttcctgcgtttaaaaatggcgagagtctcagttgctgctacttatccaccgtcttcttcctcggctttcaaattgttcctcccctttcaagggtaggaaaccttgatatatcgtcttttgaagtctttttttctttgtgatatacaaatcatgaacggccataatgcctcagaataacgaagcaaacaaggggacattgattctaatatgaaaggtctgaagaacacagcatagcatcattttttatctggtttcagctgcaccagttcataaagacgtatcacaacaggatacgaggaaagaatgttctattgacaaagattctctagtataagtcccagtgttctatccctggctatcaccacctcacaagttttcgcaaattaaatccatttggggttaaaatagttcatgcactactaatcattctagcaatcccaggatgtctttcactggtggtagttcagcttctggtattgttggcctccctcggggattcgaccctgccgttctaacgtgggagcgtctaccagagactggtgaagcctgcattgggatagctatcaatgaagaaaacgatacgcttagcgctccgtacgcaggggcgttacgcggagtttttacttgtcccttcatgatccctttagtagggttattcg

SEQ ID NO: 8812 - DNA, 118 bp, Emericella nidulans
tcggaacggggaggagaaggaggtggatagtgcaaatacgcgagagcttaggaccgtcgagagtgttgaatggagatgcgatcccaactggagcgtttgtctatcatgtagaacgagg

SEQ ID NO: 8813 - DNA, 764 bp, Emericella nidulans
ggtcggatcgagcataaagatagcgtaatccttaacggtgtcgacgaggatcttataagtctcattcatgtaagcatgctggttgttgatgacctcggccctgagattctcgacttccagcacgacaaaaagcagcgtttcatcctcatagaccggcgtcacccgtagattgtgcgctatcttttccccgaccacgacatgttccaccacctggatttctcgagtcgagcaggcggcacgcagagcaccgtaaaggatgggaatattaggaactgggatgcattcggggctgacgtcgctgatcgaggtgtgaagcagcgagtcccgtggcttgccgaagagggcgacatggctgttggagacttcgatgatgaccatcgacgcatcgaggacgatcgtgggcacgggggtgcagcggtagatgcggctcaacgagggtacggatggacgcgaagggcaagtgtggccctggtcctggtgcttggcctggacctcatcctgatgctgctggccgttgtcgttatcgtcgagagagagcgcggagatctgaccgttgagcaacatgactgctgctctgatttggccagcattggcctcattcgtggatttctttgacaagtctgaaggcaggcagaaaatggccggaacgcatgacgagatgaaacgtgacaacgcgaggccgagacgatcgaggggtcggtaaaacgtgcaccatgctgggtctgtgacgaggccctctaattcttcctctcactttcaggaaa

SEQ ID NO: 8814 - DNA, 1138 bp, Emericella nidulans
actcgaatgccagcaagtcccctcccgaacatcaaactaccttagtcagtagagattcaaaatgttcagacactatgcatttaataaagtgcctgatggacgcagacaaaggttagagctgtctcgcttaaaaaacttaaaaatatatctaaaggtcttctattctgtggttagcctctggcaggtcactgcctggtgggaagccttgttctaaaacctaacgtgaagttgaaagcgtaatattcgcaaacttaattctatgccgaccaagttttgtcttcctacacgtagtcgtgttctttccgcgttggataatgacgatatccaatgaagcaactgaagacaaagctaaaaagctgcaaccaagagaatcatcagatgctcgaatgttttgtatcatgacttcactgaccgagaacttcaagtctcctgctctgggcagtttatgggaacctgcgatcccaaaacatgtatgaagatgttcactgtcattaacttcaagagagaagagttctgtttattgtttgataatagtactacctcatacctagtaactctagcacggacgacgtgattgctaaagtaaaggttatgtttttctcaatgcggctggcggctgcaagtagcttccaaagtaatcactaagttttgacgtcgtttgatacaataaaatgtaccagtgccatggatagtcctagttagcctacctattcctcgtgatttccttacaaatctaactattgttagacctggacatggatggccagcagctagagctctctgcccattgcctgcaaccgtttcttgcccacgggtctgtcaatgtctactgatcatctatgaaaatggacagtctagacgttctcttctcataaggccaagattattggcgaattgctaggtatttaagactcaataattataaataggccctcctcgcccccagatccgattctctgttataactcttcatacatccttcacttgttcggtacctaatgtcagatcttactaaagccacccttcatggggtctccactattatagcaatgtctgctttgctgcttgctggagcatatgccccagaccgagagttcctctgctggggtcactgggactgggtcataaaccttgattg

SEQ ID NO: 8815 - DNA, 640 bp, Emericella nidulans
gtggacctggcgagccttccatagttacgcgatagaaagtcgttgaccaaattatgggtgtaactattgcgacttacgacaacctaatgtcatgattgttatggtctagacaccttctacgccaccgccgcccatgtgaagctacagagttacgaccggccgaatgtcccagatgatggctcaggcattagtgctgataaaacgagggtataccagccgcaagcgctgcatagcatattgtgtgatcatctgagctctggaacagtctcgccgtcttgctcgtgcatttgaccaagccacttttcaggtggcttttggtccctcatgatttacgaatgattcaagcaggaaatctcttgttgagcgaggagtctctcggcagtgatgacgtctattgtagagcctccatgcagtcggctcgagaatgtaacctaatgaaagacaaccaattcaacggatacccactacgctgaatagtgctgactggtacgatcgcatttgctcaggtcaagcttagatcaaggatcataatcagtgctctcaatgaccgatccatcgacgaggcccaatagatagtagatatagcttgtttttcgatatgatggtgacacgtgacgccagctctcttccctttccggaa

SEQ ID NO: 8816 - DNA, 1218 bp, Emericella nidulans
cacatttcaaaaagattagcgttgaaagcgcttgtgggtacataatgttcaaagtcagcattataaattcttagaggaaagcgtccgtcaactcacattttggtttctgcactggaggcttctggtagtcctttggaagtgctctgctttgccggcggtcgcgagaccccgcttcccaccacgccttattcctgtccacgtccgagggttgtaattcaaagtcggagggactaagtctcacggttggcgcagtcttccattccgagagcggagggggtgttggcggcggcacattgaatgagacggtatggcgtttcgacttggtctgtgggcgctgcatgttctcatcgcttccaggtactatgggctctgctccattccctaactcatgaggcgctggtattctctcgaggggattaatggcagcctgcgaatcctcaaggcgcccattctgggcggccggttctggcctagaattaacaagaggggcagcacccattttggtattagagtattgttggccatttgtcactggtcgagcttgggttgtaatatttttggagagttgatgtgttgttggggcctgaggtatagcacggctactttgagggcgtgcttgacttgattcgcgtgaaatcatacgcagctcctccggctgatgagtgactgaaactgagcgtctagcagtgttgcctccttttacctgccgcacgactgcaggcttgtttgttgcaccgtgagactccgatagtggaagcgtttcagttccatggatcgagggcgccctcactcgtgaagttgaaggcctggtaaagtctggttcttggtgcggagtgatgttctcctgcctttcatagcctctgcttccctgcggactctgtactttccgtgaaggtcgccgaactggaacctcactttcatgcgcaggttgttgggcagctaattcgggcttggttcttggagactctggagccggagcggctgcagccttcgcagatgctgcagccatccgttctctcagttttctttcggcttccaatgcgcgagcccgtttctcctctttactgatcccgcccagggcaacctcgagcttttgcagcggggagcggttgtacgcccaatcgtgctgttcaccggtggaagacttcagggtatctgaccgactcaagcgtgccgcctcatcctgcatggctggcgtgccacggccttcggagacta

SEQ ID NO: 8817 - DNA, 327 bp, Emericella nidulans
  unsure (1)..(327): unsure at all n locations
ttattggagaggagttatgcgctgtggcgaacgctgtcgaaaatcttggagtgtgatgtcgcgaaagacggcgagacagttgtcgcgaatggcgagtggctatttctcggtggtggtgcgtggatcgggtantcgggatatgagatggagtggagagcgaagatctagggtaaggaggtacaggcttccaggnaggagcggtggattgttgacggcaagcgtaggaagttggctgtcatggtcgggacgaacgccattatgctgggggaggggaagttgnagtggttaggcccagcagtgggccaggttgagcttgggcagacgata

SEQ ID NO: 8818 - DNA, 108 bp, Emericella nidulans
  unsure (1)..(108): unsure at all n locations
gaacgacgaggggattttgaggcttaggtgnggatgtctggtagcggaggacagaaggagcagtttcgggacaattgcattcggttctgctgtacgacatctgcttga

SEQ ID NO: 8819 - DNA, 1159 bp, Emericella nidulans
atgtctttgtgagggaggctgttgctagggcagcttttgagaggtccgaggcacaagggggtgcgagtggtggggttgggattgcggatgggtttttggaggtctgttgtccatttattttcttttatcatctttctctacttcttaacgcgtgccattgtttgatagtcttgtgctgatattgatatggtaggtcgaggatcttgagaaaatgggaccgcagcttgctatggacttttaggtgttgattatttaccttggaaagatggctggctttgttctgggtgttgggtgttctgctggggttcctctagggcatggcatgttctttgcttgtactcgtgataccagtcgtgtggatttttgattatgattgaggctcttgtatgccgtctttggtatgtttattgactgcatgggtgcaacattgggtgggtaggaattcattcatcatcggcttgggcgctatgcattagtataaacgcgtagtctgtcggagtatgtacatgttgtaaacgtttcttaacaaggtctaatgcttaaccactcagcaacgcatccttcgctgccgttgtcggtgtatcggccgcttccacagtgtgaaccgaagaaacagcctccatcctatcatttgctttatcctgctcattctcaacctctgccttcttctgtttctctcccttcttaacctgcaatgccccaacctccatcgcctcctccggcgttggtcgaatatgcggctgacagacccagaacggccttccatattccgcaattgtcgccttcgacccggtcaagctcggatcgggcttatgctcaaagcgctcaggaaactgcttgtactctttaagccccttcctgacttcttcctcgagaatggagagtgtgtgctcgaaggttgacatgtcggacggtgaggatctggcgagcgcatcgcggacgtttgtatgcgtggcaatcagagggcggaagagctggaagagatgtgcttgcatgaacttcgtagaagggctgttggggttcccgtggcggaatttatggggaaccttttgttttctctgtttcttcttaggcggtccctcttcttcttcttctttctcttctccaccatgggcttcgacttcagctgccggtgctgtggtgttggtagtagtgtttg

SEQ ID NO: 8820 - DNA, 153 bp, Emericella nidulans
atgatggcaagccgcgtcagtcccaggctccagcgcgatcggacctgagccgaagtcgatggagaacgacactcacgtatgcacccgatagcgcgttagctcgagtgtatatctgctggaacacggtactatatctgtacgctcttgttcaca

SEQ ID NO: 8821 - DNA, 561 bp, Emericella nidulans
accggggaagtacggccgcagtgtactgtgcactaaagggcgttggaaatgttacgcgaataactaccacaaggggtctgcttcggacggtcgaaacggggccatggtctttgaggttccctttattgctggtagtgttggtcaggaggacgaaccctctaattgacctaatgtatgtaccttccaataaatgatgtatttatatgaattatcagcgacgtttagcatatccggaaaagcagcttctcttttacgattcttttttcctatgttcagacttaagtcttactactggttaatctttgtgcaacctgaaaagacggtggtggaagaagctgatggtcctaaatgacggaggtgcccgctagaagacaaggattaattgaattttgagctagatattcgccagctatgccgtgaaatattacgtagggtaagaatagggagcctgaaaacagcaccactgccatgttgtcccatgtggccagatttaaaaaaaaaatcaagacacccaaaattcctgtaccattctataaaatacacgtgatgaatgaaagaaat

SEQ ID NO: 8822 - DNA, 200 bp, Emericella nidulans
gtttgctgtcagacatcagcatagttaagagaaatcatacgggaattgtttcacctggacaagtgcgactttagcgagtaaaaagggcatgttaaacattcgttttgcgctcatagcgcgatttggacaatatccgatgcacgtctatgcgaagagaacgatcaaatgaacgcgggtctgtgtttggtaacaatagaagg

SEQ ID NO: 8823 - DNA, 1475 bp, Emericella nidulans
tattaagtgagaatacatgacgaaggcatagctcagttagggccatcggcacagccgcctctccgcatctttcaagacaatgtccataagcccaagcaaagtggtagacagcctcaccgagtggtaggtgtacgacaagagacacacccacaaaacaacaccgatggaagcttcgtcactcgatcaacccaagctgggtggtatgtcgagcggaatttcgcactagcggcgagtcagctctttggtctatcaaccatatgctgaggactcgagctcacctttcgatcacgtttgcatgtacttctttagtgtattttggagtccgataacgactttcttgtcgcattctaggtagcgaagcgcgctctttagcaacctagtacaacaggcgcgtggtcgaaggtaggaagaggtccagtcatactcgcttctgcgcatacggcacaatatgcggctcggatccattcaagcagcgtacctgcgagaagcggcagctttctgagcgctgactgtaaaaatgctgacgtaacaacacaaagcaaccacaggggatccatgtatatacaccgaagcgatcgggattcttggtcgacgtagaatggaggagtgagaagatcaggactatgataaccttctcagaagtaatcggctgcaaattcaggaaactctaaagaatctcccaaagacgggcccgcaaactccaactgcgggaataatgcagtcctgccatagtcgctctggggttgttggaagagagaattaaacgcattcgtgccgaaatttgtaggctcatcggtcaatccaccagtgttgaccatactgtttaaaccatctagatatccgatgtaacctgcgcctgcgagttgaccgttctgtatgccagggtacatttgaggcgtaaacacgttggatgatggtgcagtcatggacccagggttctcaagggccacagtacgcttcgaattcttaggagaaatgcgagaagccgcacgacgcttcttttcagaaggcttccgaggagtgtactggtagtcagggtattcctccgcgtgcttctttttgaactcttccgctaggttcttgaagtgcagcttcccctcttccggctctgctctccatttctttcctattatcaccgcttgtctattcagcttatctcacaccgctggggcgtggcaaggaacttacagatttcgttgttcgagaggtccggtcgtgcctcctttactttggggtaatgatgctgcctatagaggatgaacgcatttggaggccgaggaatctttgcgggtttcattgacgctggcctgggtttgttaggcggttcgctgggccatgaatcaagggccctagaaggagatgcaacggaaatcgataagcccgagaatgtcggtgtgcgcagaacacgcagagcattgattgattcatcaacgaacgacacaactggagcgccgagaagagcactataacctgtg

SEQ ID NO: 8824 - DNA, 1402 bp, Emericella nidulans
gaacagacctgggcttcttgtctcgcaaagaattggtgccggtgatgtacagtaacagcaagcaattttctttttgataggcagctccactgccagtttgttatctgcatctgtttcatcatctacggctgtccgcagcatactgtctagggagtctttaggtgattttgagtatgttcttgcatctacaggcatttatatgccataccgaagtactatatccgagtgctatcatacatggatatagctaaagaatgaaaccaaatatacataaacatacataaacatacataatacagatgacgcacaaaccagcctatcatctacataagagcatctgctcaatgccatatctgccactaacgacaagttcctcaaagccctgcacccatcagcgcaacagcagcacctccaaccaccaatccaacaacaccagtgaccctcaccgcagcaccagtctcgctcggctgcgccgcagtctcttcagccgtctgagaagccgtctcagaggcccgcgaggcactggcggagcccgcagcggtggcctcctcgctcgcagaagacccattactggaactcgaagtcgaggtcgaagtcgcggtagatccccccgtactcgtaacactccccgccgtgacagtgacaggaatgtagctcacttcctcagtggccgtctcgactccaggaaagtttgcgtcggggccaccggcgctcgcggtacaatcggcgatggatttcccaacgctgcattcagctgtgaatttgctgcgacaaaatcagaccttgactaccattataaagcaaagaagggaagggtgggaagaatagtgtaggacgtacaagttatccccatcgttcatcatgtacgtcgtggtttcatccgctgcaatcacggtcatgcctggtcccatcccacagtcgttgctgtctgtgccggggggacagtttatactgtatgttgttgcggacgcgtcctgagcttggtcagtacgtttccccatacagcaaattggggaatataatcaatcacgtacattacccatgatcgacgccgcgagaggctgtctgtctgcaccgaaaatgaacatagaagtcactatgctctctgcgatggcgagggaggccagagccgggagaagaagagagctgagcatcatttcgagggatttacggtgctgaaggatttcaagagaaagacagattgaaagagggaagaacggaaattggggagtattaaatacaaaaccagagaacacatcaggggctaaagtttgaacaaaggcctagggtccaggcccagggtccaagcggccaagccgggtttagatcgtttaatcgggcagccgaaaaactgagatccagacagctgattggaagatattcgggcctgtgcaagatgcgc

SEQ ID NO: 8825 - DNA, 777 bp, Emericella nidulans
gaggttggtgtgtagaatggattccgtgataagaaggtgaagaagggagtgtttcgtgtcaagggcgttctgaggacggttcacattgtttccgtcgtcatcatcgtcgttgtcgtagctgcctacctccgtgtcaacagtggaaggcagctgagacatgaaatagtcccgcttataaactccctgtctttcttcattcactccttgaaaacgaggaagtccgacgaaataactccggcgcaaattgtcctgctcgggaatattatcgcgcgatttcttccaaccacgcgaaccaaggaaggtgacaaacgcggatcgtaaagccaccgcccatttggagcccagatactgaaacataagactgtcgagtaggtcttcatccatgaacactcggtattttccattcaactgacgacgcatctccacaggtacgccctctccaggccagctccaactatccagggatgcgatgcgcatattcaaaacgtcagcgacctcctgcgcgacagcattgttccgcatgagctccttaaggatgactgtcttctccttcgacagaagatcagttttcaacagtgactgggagacccaggaaagttcgtctagagtaatccacgtcttctccgccgagaagctcgtcgcaaaggatttgatggtttcacggagctctttcagagcctgctgcgagagcgccgtttgcataaatagtctgtcgagataggcacggatcatgtccgcttgtacgtttgagccattgaaaacgatgtgctcccatat

SEQ ID NO: 8826 - DNA, 1336 bp, Emericella nidulans
cgtttacgaaagataatcgctaatgttgtagtaagtacaggtattcgaataaccgccaattgacggccagctttcgagtaaccccatcaggtttcgtgtagtgtgtattgccgatggctcattaagaagtaaggtcacgacttcgcgaacattggttactctccttgagctagaccagccgtcgcgagccacatatggggtgtcttcagccagggcgggctgcgaaaaatcaaaggcctcaaatattgaccgccgccgatgcgctcgttcgcgcaaatgacttatgctaacgggcatggtagactcattaattgaatctgcttgcttggtagagaacctggacagaatttcggatctcttgataatgacctcgaccagggggtagaagccttcatgttggatgttcgcggtcaaatgaggattccagaaaaccctctgctgacgccgcttgacttttggatagtactcccttcgcggtgtcaggctagctatctgatgcaaaatgtttctagcatcagaagataggggtacccatggctggcagaagcctgatcggagacaatcgagagcttcttgcgtaccagttcgaccagtgagcgggtctggtaataagtgacttgtcaaagcgtgcagctgagcctttacatataatagtcgaggattagcagggcattcgagtcgtcgagcacgttgttgatagtgtacttcacgtaaattccattgctctctagcttcacccgaacgtggctcccgtggcgtgtccaactagggtcacctaaggggacgagtatacttcgctggccgcttcggtcgtcacgcagcacaagcatactttggaggccataaaaggtacccgggtcttgatcacggtcgatcaaagctccaagttgatgacatttcagcgagccccattttgtaaggctgaagtcaaggttcaagcgtttcagctcgacaatgagagtcttgggagtccgaatgatagtgatccggtttgactgttcaaagtgttggaagacctgcgaaatctgtctcgcgaggctggaaaatgggtcaaccaaggtaactcttttccgctcacatttcctagttcgaatatctattttccaatttccttcccttctcttccaaatgcgtggcttttgcctcacctccagaatgccagtacggaggtccatccaatgaatgcaatcgataatcagaggatatggaaggtcaaagtttgggccacgcccaaatacacttcgtggcaccagctccaaaatgcttctatatgcctctgctcgtatgattagctgttcaccacgatgagctagatggattcgatgtccatctgcag

SEQ ID NO: 8827 - DNA, 119 bp, Emericella nidulans
  unsure (1)..(119): unsure at all n locations
tgacaagtggcggcttagctatcnagagttatgacganctcggcactgtacgaagagnaggacacaagggngtcncagttacctacctggtagagcgaacagtggcacatcttatggtg

SEQ ID NO: 8828 - DNA, 555 bp, Emericella nidulans
tataattgtctctgatgattctaaccatccatctctgatatagaaccctgtcgtcggaggcgacaacgcttacacttgcggcgcaactctagactatggcgatggccggaaggatactctagacacagaatgtagccatgttgccaaagatcactgctacaactctcagcttccgtggaggatttggtacgtgccttggtaccctcctggggcattacaatagcataacccattaccaactctcgaggcaagaattaactgagttatagtgtcacaaccaactgggacttatctgacggatatgttgactatgccgctgagcaccgcgacttcaacgaggatggatgcacaaaggataactgggctactatttcagggcagggtgctacaactaagtgtactttcccctgttagagttggaaggaagtttgcatgagccattttaggatatgcgagaagacgttgatctagatctagtttggttcagcatgaataacgaccggactcagatcctatcttaagccgctggcaagaaggctacccaatgaatgttgt

SEQ ID NO: 8829 - DNA, 1466 bp, Emericella nidulans
gataggtgcttgaatactccactgtagactctggtcactgctttgactgtttcaaaatacgagccgtggtgactggacatgcagcgtcagcgtcagcgtcgtgctatccgagctcgggtttcagtggaactgtcggggtccggtgtgcatctggaactcagtaatcagataaataaagaagacgaccaagaaaaacaaaagtaatcaagtaatagttgtcatatcaacaaacagatacggttgatgtcccgaagcgactctaggtaactaactgctccctgaccgtaagccttaggacagaaaccattacccagaccaaagaaaccctgttatttgaacgaatagccagaaaatgataaaaaaattgtcaaacacagattcccacccccagcactgccgccatcagtggaaataaactcctgaccaggtgcatccatttccaacgcaccaggagctccctgaccccttccaaagtagccatctcaacaccaattccgacactaacattaccaaggccatgactctgacttgaattcgcacctttcaagccacttcggttggcaccctgctcgaaaaattggctgtggtcccgattcccagcctccagcccaaagagcatcccgttcgtggaactcatcacaatccacgtgaatggaaccatgacgatcgtcagaaacccgacaagagcagctttgcgccacggctgctcccttgccccctgataagcagcgatgtagaagtatagaatagccgtggcgatcgagatcgtaggcaaggaaatgtgcccgtagtggtaggtgcggacccattggtgcaggagttggggtggatgggtagatgtctcgaggagaacagggaccgtgattgtgctgagagttatcattgctcctttcattcgagaatgagggtatgagttatctttccgcaaagggggttggaaaggtgaagggagataccagagagaaaagagcccgtgacgatggcggtgttcttgagggttgtgagggaggccatgattaggctgtacttaatgttggcagaaagattactggaagcgctgatatgcagaataaagctgtttgtttgactgaaccctgctaggctgtgagcaattttaaatctactcttccctgttgaggctgaccggcagctcggtgatggttgatctcgctgtccgatggaacgcactgcgttgttggaatgaaccccggactggaagtaacacacttgcattgaatatcgaatgtggcatatggactcagtataccatgctgcatagcgagtagctacctacttcttcgggcctggaaatccctaaactcttctgtgacaacgccccgatcaataactgcgtgatccagccgatcgtcatcctgcatgcgttagtgataagcctcattttcttatcttgataatatccatccagctgaatgcctttgccagaaggattggacggaccgcataga

SEQ ID NO: 8830 - DNA, 160 bp, Emericella nidulans
ggcgagaacttaaatggcgaactgcaatacgtgggtcgcgacgtactcgtcaattgactctagagttggcgtcacgcactttccacgtgaattttaacgtgtatctcgaagctctactagcccggatattgattggatagccgagtgaatggccgtagct

SEQ ID NO: 8831 - DNA, 134 bp, Emericella nidulans
  unsure (1)..(134): unsure at all n locations
tttacaatgtcacgtttcctcaacgctgcaatattttggaccgttcaactctgacgctatgagtacgattcactgctntgcgaagctacngntaacgatatctgctcngactatatgctgttgagcatcgtgtc

SEQ ID NO: 8832 - DNA, 1292 bp, Emericella nidulans
agactgcaacaatatccgaccgtgaaattaggttcgtcgagggggaaatgtgagaaagagaacaggtggaaagtagtggttgagataagcaagagtagggagccaggaggattttccaacgccttaaggttagcctcccacgtgacaccgcccactttccccagaagttcggtttaggttctgcaggcgggagtagtaaaacaatgacaacgacgacggcaatcggcccttgtgatgattccctgctaagatatgaagtcgttctcaagctccgttattagtacgtgttgatcacaagtctgtcgtcatgttgctaacttttcgttagataagtcgggcaagaagtttgctccaaaggcacccgcccgacgcgctcctccagcccctcctcgagcaccttcaagacgaccgagtgttgcttctcagggatcggctttgcacgcgccagtgaccacaagtgtaacagcgacccctgaaccgcctctccctgctacctcgatcgaaccgtctgcccagtccgagacaactattgcaggatcaggtggtgtgccgactgttgcgccgactgttgagcatgcgcctaaggaacaaactgcaactgccataccgattcccgcacccaagcacaaagcttctgtccccgttcccattccagcccctcgatcaacgacaaatatatcgcctgctccttcagcgagcactacaacgaccgttgagcccgtagcgcaggcacccagtcgccccgatgagaacagggaagtgactagaccaggtcctgataacgtccaaaacgagcagagacatgcaccctctgatgtcgcggccgatagtgataatgaagtggtgcctgaaggccgaccctcaaagcgcttaaggacgtcgattgagtctgtcctaacaacgacatctcctcagccagaagaggaactcgctcaacttgcaacacccccatctacacagatacccgcccttgaggaacgaacggaaagccgagatgaatcggaagtgccaggtctggcccggcgaagtgaaagtgcgcccaagaaaaaaggtcgacgggcaagccgatctacaagtaatgatgcagggaaaattaagaaggaaaggaagcgacggacccgcaaccgtgagcccacccccgacggtgctgagctgatcgagatagcaccagcagtcgttaagatgtcggatttgtgcaaagacacacggacaggaaagcgatccaagcgagaaacagacgtacgcgcccacgaactagcagaagccgagcggaagaaatctcagcaagaagg

SEQ ID NO: 8833 - DNA, 1159 bp, Emericella nidulans
ttcaatgaactcgcaccaagacccaggaccccatctttaggagcgtgattatacctttcagagtgcaaatcagagcccagactggagcaagagaacagtagagatagagaacatcccggtatataagtacagtacatgaaatggattaatcgaggaaaagcccatcccgagaagcgccgacgccgtgctattagaagaatcaggagccaaaacagtgcaactgcaggaaggcttttaagtcatgagtaaagcagagttgtgagatgaaacacacaaagaacaaaagagcagggtatcgcgaaaatcatgattccaaacaccagcgctcgtaagataagaaattcgtgaggtcgtattaagttttttgattttttttagtttttttagttttttttttttttttccacagtatgtgtgcagctgtcaatttgtgctgtaggcttgaaatcaaagcttccaagcattgtccgaagggctatcgacggagaattccctaacgaagcgggaagaaagtatgtcgcggacagtccagcgtttgcgacaatccatttccaggcaattggtgatgaggtcaagtgcgtcgcgccgtgcctccgagtcggctccatcaccgagaaccgcctctcggtcccagacgccgtgccggatgttggatattagacggggctggaaagagtgctggaacggccgagatccgacgataagggtgaatacgatgaccccaaaagcccagacgtcgacagacgggtcgatgattccagtaatcgagtcgagtagctccggtgaggcgtattcgaggctgcctgcgacgctggtgctggaatcagatggcccaatatttcgcagcggtggccggtccccagcatctccgtacggctcggaggaagcatcctcgttgtcagcattgatccattccgccattccaaaatcacatagaacgaggtttgacgtctttgtgccatccggaagctcgactggatccaacaggcaattttctaactttatatctctgtgaaccactcgagcatcttcatgcaagtatcgcaaagcacacgcaagttggtatgtgtatttcttcgcaaggtccatcgtgagtttgcggcggttctgacgattctggcggatgagatcaaagagagtgccgcctatatgaagcttg

SEQ ID NO: 8834 - DNA, 1701 bp, Emericella nidulans
gggggtactttcgttgctttcaatcgtaattattatttggtatgttcttaccaattcactgcttcctctacttgtgtcatgaggtagcctaaacggaaatgcggccagttaacgaggctgaccttcctttgcaaaactgacagagagcactctctttgaagactagccccattgatctatggcaaatctttcgtgctcttgctcaactattctgggagccaatctggttggtccgcgcccaaggcccactcttgctgttaaggaaacatagggagccttctttatgtttaacttgagtagccgtcctatcccgtaacttgataagaagcgactcgactcaagattgcgctggggaatctgctgggtgtgggcgaaatctgcatggcagactcaccgtgagtgattaacacagggtgcacccgacgagcttataatagcacattccaaggaagtgaatttcttaacgcaatctttttgagggcatgactgtgtcacttgtctagagtctcacctcataccctcccctctccatctctatttgttcaggaagtttttcctctaaattatcctcctcgcactaaccacttcaacacccatccgcctcgcccgtcattctcacattagtctcagacaaaacaacatgtttagtcccttgactctggccatcctggcaatctgcatcgcagtgtcttcctctgtacgctctctacaacttcccggcatactaattgggaccgaatccctaactactgcctcccacagctcaccgtcggctgctacccggaagactaccagatcgtacagaatgacctcttcgacggcctctattccctcaaaaatgaccagatcagcaaccttcagcccggtacctgcgagcgcgttgtctgcaacagcaatgccgccgtttactggtgcaacgacgtacgttcccacactgttgttctcttattctggcagatcagaaaagttgaccctggtatacttatctgtgcagaatgaagatagacatgcggaggtcaaatccaagcaggtcggggatgctgcgtggaaaatcatccatgattgtggaataagcgcccatacccttatctacgccgctggcgttggtggtttacccgaccaagattagagtagtggtgattaaggatgatgagtgttttggaccaacactagcttattgtaatgggctctggcagtgctgtatttgttgttaggtggaagatctgattgtgattttagcactatttatggctttaagttgatttcaatttaaccattgcaacatactggtatgggccggtctaacacagtgtggaggcttggtgtcgcaccctttccagcagttttacaaattcagcttaatttttactttcttgttaggtgcgccctgccgttaatcggcaacgaatacatttttgggggaggtgcttttccaacttcgagacaagacttttctcgattggaagttgaagccactcttttaaggagattaccccaaccgtttttttatcaattaaggcggccggatttttttttacttgccaatatggctggttttttttagcttttggaatctaagctctaaatttcactctttttttttttttagttatgaaatggccttctttgcttaacgtttgccctctggaaagtattatttgtgtaactttgttcttcctttcccccttatctctattatta

SEQ ID NO: 8835 - DNA, 1527 bp, Emericella nidulans
gtattgcttctgggtgaaggtgcagagcaagacgattccgttgattccagctgttgatcgacatgttatcgaggtacgtggccttcctatatcacatccatggacaagcaggccaatgaacacgatgtagaaccgcaagaaaatgttctggaaacacctcatggacgagaaagacggtcttgggaaagaaacagtgttcgacttcaaatacattccaacgctaaagagaagaacaaggctgggggagcggaagaggtatttcttcaagaagccaggtgtagagatcctctcgtatctagggcttctctctgcatttgcaaccacagtcgggtttagtacagggctctatttggtcattaccggggctttcccagagactcgtgtagtaataccccgtctcctgcgggctctcagggatcggttggcgatgctacctgttggagcacttacagtgccggagcttgttaaggggttgcgaggaatattttcattgtgaaagggatttttttggacgtataagaccggtctatagataataaaaagactacatggtagtggtcgaaacctacgtttgcaaccaaccacatctacacgcaaaagtagctaaaccgtatagtcggccaaatcaagaccaaccgaggaccatgtctcaaagccacgagccagagctagctcttgacagtcatgccacgcatacgcccactcagaatctcgaggatagcgctcatcacgcttcgcccagtctggagcacgaaagcgttctacattgcggacgttacagagtcgaataccaatgtagggagcctctggtgggtgataccggaagttatgctcatgcatgtgcctcatcaaagtacctagcacgatggacctgcattctaaagtgcatcccggttcaattgatgcatcatccgagaggagatggtcccttcggtcatacaattcgtcaataactcgaccgattgcgtttattctcttatcattcagatcatctgggataccgtaagtctgtgtcccagccgagcgcaccatagagctcaccgataatcgtcgctggtataggcaggccaagcgacgagataaaataatcactttgctctattgcagcacgcgaataggcgctgaaggtgagggcatgccgaaaaaaataagcaatccagagccctagcattatatctctaaaacgaaaaggcgacgccggaggcttttttggaaggcatcggacccataagctgccaaagaaccgcacactctggcaatcatagtagtctgctatgactgcaatcttagcaagctgctcgattgttaccttccgaggcagtttcagcagctgggaatgcaagatgttaaggaccactagaaacgcatcgacatcccagttgtcaacgaccagaacgatggagcccttttctttgaattcccggcctctttccaactgccgtggagcattctgtcaaagactggcgagccgaacgcgaggtgccttgcatagacctgaatctggcgtgcgaaatcgcctctttgcgt

SEQ ID NO: 8836 - DNA, 982 bp, Emericella nidulans
  unsure (1)..(982): unsure at all n locations
cggtgttgggtgaaccttgaggaactttttgagctcctcatgagaaagatacgcttggcagacggggagccaatgagtcggtagacgcgagccgaagaggcagtcgtggccgcagacggagtgtctgttggtcggtttgcagacagagtcgtggacgtcattgcagatggtgcacggctattgttcgttgaagtattgttcttgaggattggtggaggcggcggggtagtgttgtcaaccagccattgtcggaagagcgagacagcaagccagtccaagtaggcgttctgaggattgacacgctcaccgcgggaagtggtgagcgtgaggcggagaagtttggattccacacgagccttgagatcctccaaatcctcgaacttgtcctcaataatgtccattaccaaagggggaagcggtcccctgcggagagctgatcgtccagccggccattggccgacaacgtgaatcagggcctcggagaagatgacacgacttcgtgcaaggtaccctagcttaagatagcttggcggatatttggcaatttgtttgaagagacgcgagccgaagcccagcaggtgatggtccacgcggggaccggtgacgggtaaggcatcatacatatccgccagggctagaagggccttgcattctgcatatgcagtagcgatgttgatggtgttcaataatggcgggtgattatagaataaccgaaacaggttgtcataatcacggagtatgggatccatcgctgtgtcattggccgtgttgtttgctgcagccgcggctaccgcactcgacctatgtggcagatggatagcggactgcaggccggccaagtttgccatagaacgagcaaatccagtatgattgctcgacggtttggtcattggcttggcatacggtccaaaatcgctaagaacgccaccagaagcgctgggaggctgttcgctntatnnccgatgcaacataatcatacact

SEQ ID NO: 8837 - DNA, 910 bp, Emericella nidulans
caaagaaataacgtccaaataatgcaatttaagatacaagttatgtcatggccataacggacaatgtagatccattccatcgccgtacaaaagaaatcaaacccgtatcaagtcatatccatgtacatgtcctagactccaggaccttggggcccagagggtccccagcaaccgacttaggttgttatttgatactgagatgttagctctgcccaaggcaaacccctatgaatcccaaacgcctccaccttccgagcgcagtgggtgtgaatagcaaacggcaaatatctgtcgaaagctctcttaacacacaacggatgcccgactgatgatcgagtatgtatatcgtcacggcatataaaaccaaaagcgcataccaagtatgcagtgtaggtagcatgaaattgctgaaacgcgagagtgatgttttctgtcgtcggcggcttcctatccaagcaattcgtgtcctctggtgagcgggaactggacgggatgggcaatagtctacctagcctcatcccaatcctgcaccttgacagtcagccctgggcttgggagcggatcccgcgccggttgctgcaaagaggccgcttgaacggcggcttgagaaggcttaggcggtccagttcctgatcgccgccttcgctcccgttcaagggcgcctggaagttcgctaccatgcccgctggggcggaatcgatggctcatattcacccaatccccgtttccatcttcctcttctccaagccagtagtttctaccgacgctaatcatggcgcgacccagcttcccttgccatccttggccttcagggctgtatggtgagaatggctcgcggtcaatgtcggcgacactcgccatgctggcgatagaagtgtttcggctgtgggtgggtagttgcgtgtgacga

SEQ ID NO: 8838 - DNA, 1207 bp, Emericella nidulans
aaaataataactagcgaggcttaggagttcaagcccctagaggtgctgtccagccccacataaattagaccaaagttattgtctaaagatctcacaaatttggcattgatcagcaaaatttaaattgtcccttggacaatacggcccacaataatccctgatccctcctctaaattctcgtacagaagtaagcttcccagcaatctacatatcagttaccagtcatcgaatttaaagaacgattgtgtactgcctgcaaccgccacccttatgcctgggagttttatatctacaacaaagtaacattcaccattaagtacgggcctagttctgcatctcgaacgtgaagtcgccatctattctccgctcatatcttgttggactaaagtacacctagtatgtctctcgggataaatccgaagccttcggatatatcccctgacacaaacccatcgcagttcttgaacttaacgaaacagccttttttgattgttctctagcctgctagtagaaatatgaataccttcatttcatggacatggctccgaagcacttcgaacaaccatcaatatcatttcttcccgttcaacaagattaggtagtctggaacgcaacgttgataatactttcatcatcataagctccatagctactagtttgatcgaccgtggcagaaacggaactgagcacaaccgaaacaggcccatgacaaaaatcaaaacgggcctgtctccctcttcccgaccgtattaagggcaagtagactttcgtgttcctgggcagcgtttccgtagaagattcgtacttgtcttgggcgaccggtcgctccgttcgctaggtaaaaagcacaagccccaaatcactgagaatcgtaaacctcaattgactgagaagtcaagtaactctactgaaacagagaagagcttctacctctaccactgccgaacgcatctttaacaaaatcccagtctccctgcggtcaacctgaaccttcaagacttacttgtggcgggccaggagaaaggtggccttgttccattgcaatacttccacacttgactgaggagcatcatcgggactctagctgtgcgtgtagggattgggatacgatagaggaggagaacttagtatgaatttggtgtaggcttgacggttcatatttgctaactttctggtctctgtaaagggtatttaagaattgtctctc

SEQ ID NO: 8839 - DNA, 1186 bp, Emericella nidulans
cctactagccaacccgacagtgcggcattgcgccgtggactctgtgccagttcaatttgctcctcgatagagtctggagagataatcaaatcgtggtatctggaccacttcatctcacatgtccgccatttactcccagcctccccatcccatttcacccacctgcaaagaacccttcaatcaccgcagctgaggtccgctgccctctgcatctcagcatcaaatctctccatcctcagcacccaggtccagagacgatgtattccaagcgattctcgaagatctgtatccagcccgctcgtcaaccagctccatcacgcccaagcaaggaaatatcatgagcagacgctgtcctactgccgcaaagtaacagcgcccaatatggagtcggaggcacccaccattcttactgcgcttactgtcctcgcatattatcaccatgcatctacagaccaccgccgcttccgtctcgcagtatgggacacagtccgctttgtctcaaaccaccgcgaagcgctcacgcgctcggcggacggtaaccaggcattacagatgtggtaccgtctttgtgtatctcataggttgggtaaaccacctgctatgctgcttgaaggcgagggaagaagtgtctacggacccaacctctatcccggctcattcgaggagctgtatctccattgtattgtgggtctgaacttggacgaccttatttatgatatcctgatcaagacgatcgagatccgctctaggattatggcgtttcgctgtgtagcaggccggtatggtctgtcagacgaggccagggaaattggcgaagtcgcccatgggcttctcgctcgttacctcggtagggaggacaacgtagtggaattggcagagacgcacagcggttacatgcgcggtgctcatctacgaggacttttccatatccagcgggagaggcttgcagtgtggacatcgcatctcagcgtgtcgaaggaccgatcgccaggcccagacagcccgatcccagcacgcatccgcacgcaccgcgacgcaatgaacgctctctactcgcttctctgcgaggtaatgttcgatgaggccgaggctgaaacgatcggcgacatacccaccttatcttcccagtcctatgcgcaaaaattcatccacattctctcaaccctagacttggccgcatccatca

SEQ ID NO: 8840 - DNA, 815 bp, Emericella nidulans
tagcagtccacacaccggatcatgctgatcaatgcgttcttcaatttcttcgatttcatcgcgacaatgaggtccgggagtgggccagcagcgggcgatgaatcgggactgtgtcgcttccaggcgttttcgctccagatgtacatctccatccagatacgccccatcctcccaatgtaaagaggtaactgttgctgatgcgcttccaggttccctgtggcagacgtactctggacgctcgcaatgacctgggacgtggtgctcgttgtcttttggcattatgagcctgaggcgctgcgcaggcttgagaagaggtacctcgccgttattacgttgctcacattcattccggcgcttgttttcctcttcattcgaagtgaagagaaagggccgttgtatgggagtgtaacggtgagtacagtcctcctgcgatttcgagggacatgccgagtaacggcagtttgccctagttctggtgttcgatctctccgaattgggtattgttccgcatcatcttctactatgctccaatatggtatgcttcgttctcttcgaaacggatatatcaactcagcgatgcaggttcctcatcctggtggtcttcgggctctatatcgccatcgcccacgagttattcaagctcagacacgaactgatgctcactcgggacgactgcctcgtcctatcttcctcggtatctccaagccacgaatccgttgtccggatatgtcatcatgatgggaaagctgttgacggtagactttgcctatcccactttacgtatcccactaacattgccagaaccagtccccgtt

SEQ ID NO: 8841 - DNA, 1426 bp, Emericella nidulans
tcttcggcctacacacagtcaggaccaagcagccggggctggggtcagggtaaaacagactctggtttttctgcgtcgggtttcttcgctgaccctctttgctgtagcctgaagacccattggcagcctctggtgggaattgagccaggtcttttctgagagcccgtggctagagtgaatatcgacgctcgatatattcttccgcaggatctgctatgcaacgcttgccaactgggtatggcgatgcgcttccccatttgatgggtagcaggcatccggcatagcctcgacgcacggatggccattgaacatattgagcctgccatactgcaggctacagaatcgatgttgtcgggctaccggccgacaatcgcttattcttttccttttcgatgaatctcctcaacctggctctttccaggtatagagtgctataagcaaataataagtttcatgtgccccagttcaaattttcagaccatttatctcaatctgtcaaaaatctagatattggtccaggaagaagctctaaacggtccttgcaggcaagcaaactgctaacgtggacactgaagtcaacagaacaaggacgctgaaggaataactaaccgcaattcggttatagggggaaatgagaaaagaagaagaaaggagcgaaaaaagggaaaggcaaattagagatatatagaagtgaaaatcaaagtgaaactatacaaaatcgctagacgatggaagcttgatcctcggcccggagcggaaaatctcgtcccggtcaggtgacatcacctcaaagcacctttgatcttgataagcacatcgacagtgtgcaagtaaagcacagcctgacagacgaagcgcagcttgacttttcgtctgttcacttgaactggacattctattcttttgcgcttgcgcaggttcgtcttagagtctgcaacttcgaatataacaaaggatttcgaaaggaccgagtttgcagaatttcgtcaggccctatgctcctgatgtagaagacgcccaagaatgctaggatttgctcctatgaagatacgatcaaattttatcttattgagattcagaggattactcgagaggaggatgacctgcgtgtatttgatcaggcataggctaaacatctgttacaccatggacaaacagtcatgctgaagtcctgcacatcgtggacatttactgggaaggcagctcttatgtatgaaactgactgggcccctctggatcatctgttgtaacatcgagtccgttcgtggataatcgctgtcgtgggctctatatgtatccacatccgcagcacctctatatatatatatatatcccaacgcagccatctcgggttcgacccagtgagatgaacgaaaaagaatacaacgtccagagtgagaagtcctcagggattatgagtatgagc

SEQ ID NO: 8842 - DNA, 1559 bp, Emericella nidulans
tggttaattctgtaaaaggctgagcgtatatcctcgaaccttacctcgcagatctcctgcggaactgttgcagcttcttcgcagtccccagcgctatgtacaggagcaggctatgtcgacaatcgccacaatcgcggactctgcagagaatgccttcgaggagtattatgacactctgatgccattactcttcaacgtgctgaagcaagagcagtccaaggaatatcgtctgctccgagcaaaggctatggaatgcgctactctaattgctcttgctgtcggtaaaaataaaatgggccaggatgctctagatttggtgcagctgcttggaaacatccagcagagcattgtcgacgcggatgaccctcaatcgcaatacctcctccactgctggggtcggatgtgccgggttctaggacaagactttgttccttacctccccggcgtgatgccgccacttttagccgttgctgcagccaaggctgacatccagctgctcgacgacgaggaccagatcgatcaggtggaacaggacgagggctgggagctcgtaccgctcaagggtaaaatcatcggcattaagaccagcgccttggaagataagaataccgctatcgaactcatcacgatttacgcgcagatcttggaggccgctttcgagccctatgtgctagagacgatggacaagatcgccgttcctgggcttgcgttcttcttccatgacccggtgcgagtttcttcggcgaaattgattccgcagctcctcaactcgtacaagaaggcacatggaatacagtcagctggctttgcaggcatgtgggttaaggttgcagagaagattatcgaggtactgagtgctgagcccactgttgacacgcttgccgagatgtatcagtgcttctatgagtccgtcgaggtggttggcaggaattctctaggcccacagcacctgcaggcgttcattcaatctgccaagtctacgctggaggacttcccatcgcgggtgaaagcgccggccgaaataagggcggtagcagatgatgggtgaaaagagaacccatacctccagtccgccatataagatgacccgaaccttcctaaggatttgaacaaggttttcccaccattttaagaaccaatggtcatcgttcctcctgggggggaccagtgttgccatttacctagcgttattacagagaagacccctccctacgcaatggggcttttttaagggccattgctcaatttgggaccgaaactgggggacaaatacatattccccccgttgtgggtggggtttaaaggattaccccgccctatttttttcggggtaatccgatcacaggttttttttttgggggctctccagcttttttaaatcggttggttttttttcccaaaaatggtttttaggtggatccccaacccaaggggcccatctgggtccctaagggatattatataccccgtccctcttttataaaaaacttaacttctcagaccattttttagtgtggatattaatacccgctgtgtgggggtgttgctctccatctact

SEQ ID NO: 8843 - DNA, 543 bp, Emericella nidulans
cctcggtctcacgctcaagggatccactgcatcagcgaagtattcgtgctgcattgcctgtgaagaggtaggtcgattcttgggatcccacataagacaccaggtcacaaagttactcagagccgctggccactgtggggctggcagaatgctttccattgaatggggtgccatctgttttaagggtcagccgaatttctatcttcggagcagaaagaagcatacctttgggaacgtaaagcctagcttctgcgcgacgcgagagccgtctttccactcaccaccaccaagcttagcaccagacttgctgtaccagttccctgggctgcccatgatctcacagacacgccaaacttggtcaacctcgttaccgccggggaaaaggggcttgagcgtcgcaatctccactgccatggcaccaacagcccacatatctacgggcgcagagtattcgcccgcacgtagaagaacctctggagcgcggtaccatcgtgtggaaacgtatgtggtgtaaggtaacttggaatgcgtctcacgagcgag

SEQ ID NO: 8844 - DNA, 597 bp, Emericella nidulans
tgggtacgtcccgatttttcctgactcttaactgtcactaataaagaatgcagccgcatcccccatggtttctacgaacaccaaatgcgcgcctacttcagtcaatttggcgacatcaccaagctccgcctaagccgtaaccgccacaccggcaaatcgaagcactacgccttcatcgagttcgcttctgaatctgtcgccaagattgtcgcggctacaatggacaactatctcatgtacggccatatcctgaagtgcaagtatgtccccagcgagcaactgcacccagagctgtggaagggtgcaaaccgccgcttcaaggcaacaccgtggaaccgaattgagcagaagcgtctgaataagggacggacccgtgagaactggacgaagaatatcgagaaggagcagaagaggcgtttggctaaggcggagaagttgaaggagttgggatatgagatagagctgccggaattgaagagtgtggatgaggttcctgtgcagaagcctgacgaagaagtcaaggcgatcgagggtgagcaggagccaaggctatcgaggcccccgtcgagccccagccgagcttgagaagagtgatga

SEQ ID NO: 8845 - DNA, 717 bp, Emericella nidulans
gtggcgtgccgtttttgaccttgagcaacagcctcatgatctttcgttctttgagttcctccactgacatcgttgattcatctccagtatccatcaactttccgaagtatgccatatcctctggcttgaaaaattggagatcgccaaccccaggaatctcggtaggaagctgcttgccgagggaacgggcactctccggttcctgcatcataaagccacctacgccagtggagctggcaatcggtgccggtgtcgccataagcttccttgcaggcgtccggattggagcatatccaggaggaggctcgaggatcttgtagccttccgacgggagcatcatgtcaagctcctcgtcggagagaggggcattgcggccagagatatcagttccaaaactggttggaatcataggcgcacctacttgggaaggatgcataggtgttgcaagtccttggttaccaacaggtgttgccgccgcaatcgctggtgcttgatcccatcgtgaacggcgcttgggggcttcgccaccaccaggagcaggtgtttggtcccatcgcgactttttagccttagcatcgtcagaagtaggagcagcaggcgtctcatccgtgggagccacgtcccagcgttgcttgcgcttgcggacagtggcaaccgacaccgttgatcctgcttccgcattctccttatcttcgagcttcagtaggaatcgtgtgt

SEQ ID NO: 8846 - DNA, 1312 bp, Emericella nidulans
  unsure (1)..(1312): unsure at all n locations
gttgtaccaatgtcggtccgtcggatcaaagtacgttttcactccaatacgaacacgttgctacatgggctagtccgatgagacgcatccagttgtcgaacctgtcaacgtgccagcatggtctgtcattatactgtgcagagctcgccaaacacaggagcagctcagagcatccccgggccgttgtcacttcccgagtcccgtacatcttttgatatgctggacttgactctgatgcaccactacacagccgtgacatctgtctcgctcttcggcgaggaacagaaggagctctggcaggcagaggttccgacgatggcgtgttcaagcccgctgctcatgcatgggttattagccactgctgccctacacatggcattcttctgtaaagactcgccgtccgcatttataaaccgcgcattgcatcaccatagtcttggactggaactgttcaatgctgagatctcgaccctttcggcggaaaatggcaagagccctctattgttcacgttcggtcttatcttggtgatctgggcgtacgcatctccaaccctcccaaatgccgtcaccaccaccgcagacgagtcagacctggacacacttctctcttctctggaccttgtccgcggcaataaaataatctttgaaatctccgccgagatcatactctcccaaccaattggccgcttcttgaaaccactcgaagaattcgcccgtccacgcgctctcccacagccgatacaggcagcgctgacagatctacgcaagaatgttgatgactttgtcgaatcaatggcaattgaccagctcgagcggtatctactagatacagtctctacctctgccaatgacatgcgccgacctcttggctggccagccctggccgaggcacccttctgggaacgcgttcgcaaacataggcccgccgcgctgctgatctttatgcactatgccataattttggcctactatgagccgcggacttggtggatgcaggggtggtctgaaaggctggttggcgctgtcaaccatgtgctggtcaagcaggacaagaaccggcctgactggggcttttgtgcggggagggtaatgggcctcgtgataaaggtgaaagagggagaatattagcattctttcttaccttctagtggattcgctagatactcgcaacggtagcctgagcgcaaccgacgcactgacgccgtgaagccttcatccgactcggtcgctccccggctaatcctaccgtgagcaaatttcagacggataacggngattggcaggctcgggtcagctaggttacactgttagg

SEQ ID NO: 8847 - DNA, 831 bp, Emericella nidulans
gagcctcactggttcttagcaccaagctcaatattagaatagggcaacctcatccatcaccgatccgtcagccgttcacctagcggcggagtggggccgcacgccggcagcctgacagtgccgctgactgttggcacgccgaacagggctgttaggatcgaccggcggtgcataggtcctgaagaaatggctacttctttgagggaatactcccaaagcgcgaaaagaggacttgtccctgttgtttaaaagtggcacgctgcccgaccagaaacgcagcgaccaagtgctcccaaaccggataatcaatccctccccctctaccgtcactatgcggattgtcaattgggtttttgcagccctgacaggcttctccgctatctcagtgtcccaggcctactggatcgatccggaatcatgttccaaaggtaagatggccggaatccttctcatccagcttcgatcctcgctgacaattttttttttctacgcacccaagaccaccaaaacctgatagtagaaggcatcgagagcgccatagagatgatgaacacgggagaacagcagctggtgaaccccagtaatgagatgagaaggcttctggaaaatctgtttggcaatcactccacggtgcatgtcgagaaacagagacgaaaaatccaaggtgcaatttctaccggcggctacgcaggatactcaggttgcattgaaaagctgactatcattatctccctgtctaggcgtctttttcaaaacaagagttggaatcaaagtccgcaacactgccttgacgaagcccgtactggatttttcgacgtgtagatctccatc

SEQ ID NO: 8848 - DNA, 1702 bp, Emericella nidulans
agttctggggaatccccattaaactcggtcggcacaaatatattatgggcgccatcggggtaggcataaaccccctttatggccggatcccctcgaaaattttgaataggtaactggtaatattgctgggaacgccgccggcacggactgcagttagtgtatgggcagctgttttaaggcgacgagagtatacttctctggatgagaggaggttcatacgctttggtcaaggccggatgacgccggttcagacagattcaagtgcaaaggcaaccaccacccaaaactcccgttcgggagtgcagacaagcacgtcaccaactctaatatcgtttaagctacaccggatcccgctgcctaccgctacgaagagcccgattttgaggggacgaaggtggctttcaaatgcttgaatgttggctcagccgcatcatatttgtccctttcgggaatcagtggtagagccagaattcagaagacactaaggacgttttttctgtctattctgcccgattcgtaaatgctgttgtcggaagggtgtagtgtctgcggatgtttgccgtacgcgtggtcgaacatatcgcgtactgcaacaaactccagtctggaaggacaagataaaagagatgatagagttcggattcgggggagagttggtcatcttgggctcagttatggttttaagccaatggttagggagaggggtgggataagaggagatgctgtcccgtcgacgcttgctgatattgtgtaaacagctaaaaagctgccgggagggtttcgaagaagaccagcaagaaaacagaaagcagttatggcagttcgctataaactacaacatctatacacttgtttgcagtagctggtaggttcgtgtccattatgagatctttaattcatggcctggaccgttgaacaaaacaacgtaggatggagaagcaaaggagtcgtcactaagagtcagttcactacagaacataagaaatgggatccatcctagtctatcagcgcgcctgctctctcaaaacgagtgtatatcctctcctagcacagccacctacctcctccctcgagcctgcaccaagctctctgtactactcccgctaacttcatgatcatgccatttaacctccgtctcagtcgtcaaaataatcttccccttcccctctatatcggtatcacgttttccagcccctgaagaatcaaccccgtcgcctgcctcaacggtcgtggcggtgttgcttccatctggtacatagtgcgtctcgaccgcgagagcgtatcaggccgtatccccagcgactactctttccggcgcgcgcatgattatcgtactgcctgctgtggctgcgcgtattgaagagcctcggcaaagacgcacgaagagcggtttcagggctggtgcgcagccggcaacgaaggcaagcccgacttccattgttgagaggcaaaagagcacagagtaggttctgtcagcagggatgtggcggtcgaagttttcaagaagaatgacgcggattatgcctgccaggacggttctgcagtaatcacttatcagtataccagagatccggatggaagaagaggaagggaagggaatgggctacatcaacccgaatgacagaatcccaatgagcatgatcttctgcttctttgctatatgcagaatggacccggtccccaaagttagttggtttaatcg

SEQ ID NO: 8849 - DNA, 474 bp, Emericella nidulans
  unsure (1)..(474): unsure at all n locations
ttggtgttatagcgtccgtcgtcatnaattggccgtgggagcatcccaacgtgaggcgtcggtatctgagagcaggtacacgacgtgatggacgttgtctgggtgttattctgcgaaccatagggagtaagtttaggangatgatctggacgacttgtgatatcgttgtttgcaaaatggtctccaggccacttatgcgggggattcgngaaatctccnagcaaatggtagaatgggttggagttgatctgtgtantgttatcttcaggtttagttgctgctgaggatctcgtaccggactatgatgacttangantatgaggtgttntggtgatatcggatacttgaagggaaagaaggttgagtattattatcgagatagngnttgtctgacttggcatgatntcctaccagcggagtcntgaactgccgtaaagctatgaaggtacgaaaatcctgaggatagttgccgtt

SEQ ID NO: 8850 - DNA, 987 bp, Emericella nidulans
atttgttcaatgtgacctggcaagctctcctgccccttttctggtcgcacacattatcgacaatccaagtatgcgccctcgaaagtctgttgagttaactcgcactcgcactggtaatgttgctccggtatagttggtgaaggtggcagtaacggcaggctgcaaagctgctcgcatttcggctcaaatccacatcaaaatgtctatgaagaccccgtaggcaaaaagtgccgagcatagactggatatggtgcctcgccatgttggatgcgtagcacggcataatgagaaagcgtccctagatagctgaggtgagtgaatactctacaattatggcgtccagattaattcacatactgtcgactgttgtcaagcgtccattggagctgttgcgatgaggtcgagtgacttttgcctaaggctatgtcagttgctagagtcatacatcacactgactggcgtcggaacggaacacgtactttgatggtctagataaattgagaacttgaagtccgagtcttctcttggttcccttgacaagtcttaacatcgtttttgcggcaaaatctctgcccggtatagtcattagtacggttgcagcttcaatcagaaactaaacaggtcaaacataagcgaagatctcgcaatttccgcagtgcaaatgtcgcttcataatgaagccggcagaaattgcacttcatgacggcaccttgggcgttcacagactttagaaaggtgtgatatctgagcatcgtcatcatcgttggtcaggtaattacaatacccaaagtgttgaagggaaacactctcgcttggcggcttcatcctcgaactgttgttagaagatatccaagagcagtgctcctcctctcttctacatgcaccgccttgtagagcatacattagaaagaaggtcttgtcaccgcatcctcatatcgctttcgaactgatatttttcctagggattactgagtgatagaagctggg

SEQ ID NO: 8851 - DNA, 272 bp, Emericella nidulans
  unsure (1)..(272): unsure at all n locations
ttgttggagtaggtcgaccggtgtagcattgggtgtgcatggtgtgtgctgttgaaggtggcggaangacgagggcgagtgtctacgtcaaggaggttgacgnggcgatgntggtttgaggcgattgctgctcggctgggaagcgggttgagcatgattatttggcgcgccgcttgagacgtagagagacgatgaaattgcctttgttaatgttcagggtgatatgcgaactgaacgtcaccgggaaccgcaggccgagatagattgagggt

SEQ ID NO: 8852 - DNA, 391 bp, Emericella nidulans
  unsure (1)..(391): unsure at all n locations
tagttgcgcttaagcgtgagtttaagtactgtcggacgcgcggggttgcggctattcaggcgagtttcgtgcgtcgagcacgaccgcagtatctgggtgccgatggcggcgtagtggaggtaggcagatgtctcccaatgagggccagacaagcttggcgaatgggacgagtgaatggctacggatggtccagacacaagacgtacggtacgacgaagcgtgaacgcgtagtacggcacaattagtcacaagacggactggtctaccagcgtcctgtcgggcactcgatggtgctctcgagatatttcagggttcttacagtagaggaacctgcactgttggagngtcnacttgaatgttgaaaccggtntcatatctgtgagacccggat

SEQ ID NO: 8853 - DNA, 1432 bp, Emericella nidulans
cgcagcatgcatgagggtctgggaatgcgagtcaaccttggatcaatagatatcgcgccgtgcgttgaggtcagaggtagtaccaattgtgcgaatttgaaaggctccgtgatactgtttgcacaccaaggagctagggtcgacctgtttgaagggcggaaagtggagctgaggacccccctgctgaatggacttgggatcccactattgttcgaatttcatgagagtagaaaagaagacttccctgattcctatattgaaaatgccatggggccgataagctttttgtggacgaagtacgaagccagattgtgagaatggatagcaacagaacacaagcaccaggcaagcccagaaacgacattgcaatgaagaaaggttaaaagtatacgagagtccagatgcggtggtcgattgccctgccaacgcccaaaatgcgcctgcagcccggaaattgaggccgaagtgcgcttaaggaagcggcttccaggccgatggactgaacgtcgtcttcccgttgctaaacagctctaccagcgctgctggctttggccgttactcgtttccttgatagtatcatataccccgtgttagcctaggctctgcggttcaaatacttctcttcgcgcagccagtctttccgcaaccatgacgtcttccccagggctcagcgaggaagaacccaaacaaacgacgccgccaccagcaccaccaccacaacagtcacaaaggctagtagcagacgaaaagaaacagtcaagcccagatcaggagccgatagttctcgcggtctccgtccaggaaaagccgcccgacgtggactctccttcgccactcgaacccgaacacccccaacaaacactcgaagaatacgatccctctgtcggcgcgaagccctgctcccctttctaccgccatgcaacaccctcctccaagctcgctcgacttgccccacaacggaaacggtcgaagagcatccccgtcggcgtcgggagcccaatcgacgaccttgagggccaacgcccgccgtggcaacggctctacgacgtagaagagggacagactgagggcagagactcaagaacgaagctaaaactctgggcgcagaagaagaaatactgcgactgtctgagcggactgagcaatgggcagcgcatggccgtaaaaatagcaatcgcggttttgctggtggggagtatggtgggcgtcgcgctgggaatcacggcagccgtgggaggaggagtttggaggggagaaaaccatactgagcaaatcggccgattgggttagcccagttctacttttcgtgcctggagcggctctgaacggttgaaaagcttttatacgatggggctccacaggggccatggataggcatacgcttaacgcctatatggtggcccaaaaccttctaagggactttaaggggcgt

SEQ ID NO: 8854 - DNA, 1427 bp, Emericella nidulans
atttaatagagagatgagaatatgagaggataaggaaaaataaagaagcaagggacgaaaataaaagaaagaggggggatggtatatataagtgagaatatttgggaaacagagaatagaaggagaaaggagagagagtagcgagagagtaaagaattttgagaataacaaagacaaggagagtaagaaaaaaataaggggcggattaataaaaatagagcgtagattaccaaatacaaggaataatcgcgatgagaaaaaaatgatttggaatctaaaaggcccggaataaatgtaaacacggcgagtgggcacttagatatgaacaatagaagggactagatccaaaaaggggttgttagaaatatgcccaggcccatagagtacacaataaatagcgtgttgtcgaaaaatacaaagaggggcattgatattaagtgtgggatagttttacaaaagactcaagctggtaccagaacgttctacctaaagctcgctagctggctgtcgggcaccgagatatccaagctgtagaatagaagtaagcgcgtcggtctagactttgcaagattcaggtaaaccggtcctccaccggggaactgcggcgtatgtctgccgttcacaaatccacccccaccgttcatagaccgcgcgcgcagctcagcggcgcctatctgcgcccagtcctcttcgtccgtgatatcttcctcgccccagtctccgtccggaatctcgtcgtctggagcaggtgaagaagagcagtagtcgcggtcgattccgtccagagacatcttatctgcctcatgctccagcatgtcttcgcgcccaccaaactccatttcagtatacgagaagacagcggagccgcccacgctggagctatacgggtgcaggctatcccgcctcggaatctgcacccctcgctggaaagtatccgacagactggaaggtggcgacatttcatgacgggatgaatcgcgcgacggttcgccgcggcgccgagcatcccaacgaccccatccgaccttttcatagacgacgtcgctcttatcgtcgcttcctcgaccctcaagcgcggcgacgaccaatcgcctggcttttgcgggggggatccccgagaagccaggaaccgaggtcgtcaggtagcccatcacatggcggattgccagggggccgtgctggagcaagatctcagggagatggtacttggccagcatagccggtgtgatcgccccggcaacctcaaggctggtggcagtcgcatcgcgctgatgcgggttcgcgtggtcggcagcgtcgccgaggtcgatatccgagtcaacgtgtgatgtcgcaagagggggcgacagaagagagccggcatcacgcgcccggaagccgtgaggaggaagggtaggggagatcgagttcggcggcgtagggagcat

SEQ ID NO: 8855 - DNA, 1327 bp, Emericella nidulans
  unsure (1)..(1327): unsure at all n locations
tttgactgactactgcccaccatcacaatgcgccatttcgatgcgtggatcctccgcgatctttactctatcttccattactactcaacgggccaccgctggaaagaaacaatccgggacctgattcaagcccgccagatttgcgcaccgctctcactcaataatgcctcctctacaccgtcttctcccgtcgaccctttctccaaaacccatccaatggacccccaaacagcaagcgccttcatcacgaaactgccccttgaaatccggctcatgatctacgagtacgcctttggcgaccaggttgtccatcttgtccaggtgaaggataagattcggcatgtacgctgcaggaataccacctccagtttggataagaatcgcncgctgttgccccgttacgccggcgagatggcgcacgaacggtcttgctgcttctgcttctttttcttcttctgcagcgtctgcctcatcagcagataatgctagcagcaatatgctctatccacatacccacccgtcgttgccatcaaatctaagcaactcgtccacggccctcctccgtacttgtcggtccatctacgccgaagcatcatcaattctctacaagaactcgaccttcgacgtggacgacctgacgacattcatcgctttcagtctgtccatctcgtccgagcatctcgcgacgatcaagaagttgacgatccaatggacgccagtctggcagcccatggcaggcgaggaacataagagctcgatctactcgcacacacataatgaccgactctggactttgttctggaatcgagttgcagctttagccggattagaggagttggctcttagtgttgatctcgggtcgtttgcggctgccaatgctggtgcgaacactggcccaggcaatggaattggaaatggcggaggagggctgattggagggagcaggcttcgtctctccatcgccgagccctgggtggcgcccttgctgtgcgtcaggggcctggcgtccttcgagctaggaatcacagcgaaatgcgatgccgctgcgaagcactttctcgagggcagtttggttcgcgatgccgtgacactaagggagcatttgcgcgcggttatgtgttcgccacgggaggcagagttgcctcttttacctggggtagaggtgcaggacctgtcaatgcaaatggagttactaagacggtgtgctgctgagatggagatggaaagagaggagcaacgagggattaggccgaggttggctattactgctgcttgataacgatgatgaccggtattcatgcattgaatttgtgaactcttagtttct

SEQ ID NO: 8856 - DNA, 105 bp, Emericella nidulans
caggaggtacggtggaacatacgcaatgagagagcacgaaacgagtaaggctcgagattatgtgcattagtaagagtatcactgactacttgaacatatatatgt

SEQ ID NO: 8857 - DNA, 345 bp, Emericella nidulans
  unsure (1)..(345): unsure at all n locations
aatgccgttgtctaacatctcgaattgtagtaaacactttgttgctcgatgtacggatcctgatggtcgacttgctagtattctgattctgaggagatcgcgacttattgagcacgcggatctcacggtttgccgaaatgtgccgnaatgcggatgtgcatagcaagcatttgtgttaggagtcgcataggatccctttgtggacggaggaaggtaggtacttcaatttgcttcttgaggagctagtacggtgataaggctttcaacctgcatttatagccaagtgtggagtatctggactaggtctggcagtaagactatggatgtgtttttgataggagaaga

SEQ ID NO: 8858 - DNA, 549 bp, Emericella nidulans
cgttaagagtcacggagaagttctctgtgactgcacgtagctccgtcaggatattcgtctgaaattcacgacgttcgctccgaacaaattcgagcagtcgctggcgaacggcatccatctgctctagagtggtcccgtacttgataacgacgggaacagcttccgcgagtgctccggatctgcgctggttgagaacgaataaagtattcagatagctgttcggcgcttggacaatgtgaccttgcatcttcttaaattcggtgtatagaagcgagatttgtttgacgtagtaatcatcacccaggccagcttcaccggagttaccgtagatggtaacacggtcaccaacatcgaaaggatgcttgacaaatacgaagacgacagactggaggaactcctgagcagtggctgaaaaaagccaagacagagcaagaatactggagccggctgaggtaaggacaccggcagcggaggtcgagatgagggtcaaaaatacgatgatagcgatgacggcaacaaagaactcgaagacattgccaagcctagaaa

SEQ ID NO: 8859 - DNA, 626 bp, Emericella nidulans
aagcgagactcgtccagccgccgccaatcatgactgcacccacattatctccaagtcttgaagtccatatggagtcgatggagagtactttgcttttgcctgattccctggtttcggcctctcaaacctcgaccaacttattcaacgttcacccctcactgaacgctcggacagatcgtctcgcctcattgtggacactggaatgcccatccagccactggtgactgcacagtgtacccaaaggttatgcaaggtcagagcagcgccactcagacggccattccaccccagcttcaagagctccaggttgcttcccctggagaacggcccgaagcccagtctggcggtgtaacgttcatagcgccaagactaagcctggggaattgacggtgttattcgacgagggagatctggagaagacgaggtttgtgcgaggccgagtcctgcgggcgactgggaatctggtcaatgtgactgttggataggcttatagagtttggatatgtaagtatctgaatactcagcgtatgtatgcttggttcatccaaagcgaatgagagagagaggaaaaaggatggaggaaaagtacatcatgggtggatggactattgagggagaaaaagaaa

SEQ ID NO: 8860 - DNA, 1577 bp, Emericella nidulans
cgcaaatgcgttgcgcttgcatgtgccatcagattcagtttcaaggaatgtttggatgagctctggcgcatctgggatgagggactccgaatgttggaagatagacgaaatggcccatacggcgctctttctgacatacgcgtgtcggtggtccaagcatgaacgtgcggaagaaaggagaggttcaatgagttctggttctcggagcttgcagaggaatcgcagggtgttgccccgcacgtattcgttgggatgctgaagatcgttacgaatgccattgctgtaggaaaagtgaccaatcagagaaatggacaagagataaatagcggccatatcagtccttaccacaccaggatcatttcctgcttcagcttgccatttgagtcgtgtttcgggcaaatctcgtagtagaagtatagtagtttcttaagaggtttgctcttggacggcatgacgaagcgaataatatgcattagcaactgtggcatcgggtctccattgagcatgattgtgataatcctcctcatagtgtccaacttggtctcatcggtacccttttccaactgcaacttcagctcctgctgggagggctgatcagcagcattgtccatgtggaccaagctgtacgcgttttccaaaaacgacgccatgatgtagaaagttcaatgagcggccgagcgaaggagagcaaggagaaggagagctgagagcggcctgttagtacggggaaccaggtgttgttttgggccctttagggagaaggagacctggaggacgagagatggagacgaaccaggaaaacactccccagtaacacagcggacggaagttagtggtctcaagcaatttacccccttcgcctacctgggaatcattagcgcaaatgttggcaatcttggatactcgacttaatgatgttcaacctggccatttgcgccggcctgtaagctgttcggagggtgtggtttactaaacccatctggtctaccgcattacttgacgttgatttcttgccgtatgttttttggcccgtgacttcgtctggacctgctgtatactattttataataataatgttttgtcaaatcatacagatttactctctgtttatgataagccttttgtgtaatgctaagtttcttctcttttttaggtttctactttattacttttgctcgtctgccttattaattggtttgttcgtccactttcatatttactgttcatatatgcctactgttatcgttcttcgtttgtctttcttctttacttccatatcttttatattaccacctttgttattacttatttaatcttatttctcttcacgtactcttcctgtattatactactctcattccgtccttcttctccttctctcctttcttatatcaatatcactatgtcatatacctattcacacttttcacacatctattataattatctactattactatctttcactcattttctctcttatcaactttcactatcttcattctctttcttcacctatacatcttatattatctctaacatactatattatattccttctcttttatcttaattac

SEQ ID NO: 8861 - DNA, 973 bp, Emericella nidulans
atatggacggaaaagggaacggtaacggtccagaaaccatcccaacaacagtctttacatccctgcttcaatccgacctccctccgcaagaaaagacctttgagcgcatgaccagtgaaggcatttccctcttcgctgccggcaccgcgacagtcagctgggctctcaccgtggcgacataccaccttctcacgaagcccgcaatcctccaaaggctcactgctgaagtttcagacctcgtcaacagcagtagctgtaccgagaaggtggaatggtcggccctcgagcgcctcccgtatctcggtgctgtaatccaagaagcgctgcgactgtcttacggggtcgccagtcggacggctcgcgttgccacaggcgaggatcttgtctaccgcggtgaatgggcacatagggaggtgcaatatattattccaagaggctcagcgattggcatgtctgctgtgcttgcacatcacgatgaggctgttttccccgattcgcatctttttcttccagagcggtggctggatgagaagaaccagcgactaaaggaacttgaccgggcgcttctggccttttccaagggaagcaggggttgtcttgggatcaagtaggtgttccctttctgccagggctgaggtcgaagtccgggtcggcttcaattttgctaacggctgcagtctcgcctactgtgagctttacctcctgctcgcactgctggttgtgcgtgtgtttccgcgcatgaggctatatggaacaactgaggctgatgtggcgtatgaccatgactttttcaatccgtttccggtatgggagagcaagggggtaagggtggttgtttgaataggactccaactgagcagcacagaccgtatactgtcatctcccgggctagccctgttcacaaaaaagattagccagccggagattagatgaagaacgatgttttgcactgacaacgaagcagccctcaaaa

SEQ ID NO: 8862 - DNA, 1304 bp, Emericella nidulans
acaccctttacaaatttgatgaaacgacaattttcgaaggtctttattgaaacggcatgcttgtccccgctataagccatttttgatgctttccttacggctgacggccataatccaacttctcccacttcatcgccgccgcgcacaccaggcagagcgcacccgacgccacgaccaagtagaactcccttgcaagaactgttgaaacggcttcaattccgcgcctgaccacctcgggatccctcgattgccagaccaccgaggaaacacccgccagtgcctcgcgcagatcgctctccgagtatccccgatcgccaatcgccttgtctagcaaagagaagccgacattatggaagattgcgccggcaatgacgaggactatcgtaatcgagcccatctgagacatgttgaatagcagcgcgctgtcaacgcggtcctgcgggctaccgtcgcggttgatgacattagaaataccaatgccatgctggaaggaacagcctagcccgacgccgatcagagcccccaatcccatgatctgggactctgaagtggatgccgacattgtggctgccagtgccgctccgccagcggtcatggtgaggccggagacatagtagatgagattgtagcgccccagacgggggaggacggtacctccgacaaggaagacagtgatgatgaagacaagaatgaatggcaaaatacggactgtctgctccatggcatcgtgaccgcgggagaaggcgaagaagagcggcgtgtagtatagcgtgacggcgtaggaggcgcccgcgcagccggacgccacgaacagtgggactaggtcgaggcgcttgagaaggtgtaggggcaacgagcgctcctcgggcgtggtgaaaatgcagaaacattgctggacaatccaggcgatggtgacgaccccaaagacgatccagactgcaatcgtggcaccggaatcccagctccagattgggccggagaactgcaaggctacggcaaagagcacggtggaggcggcgtttagaaggacgccgacagggtctatcttgcggatgcgttgaagaacagggatgtcgggcccaaagtactggcttgggaagcacacgatggtcaagaccagactcaatccgacccagggcaagttcatgtagaaggcccatcgccaggtagtgtttgggttcgacgccagagcagacccaataggccctccaacgaccagcccggcggcccagatggcgcctagcaggccaaaaatttggggctgctcagccggagtggcgaacactgagacaaacgtcatgtta

SEQ ID NO: 8863 - DNA, 876 bp, Emericella nidulans
gtctctctagttattccgctctgtttcatctccgacacgcttcgacacgctctcctagctgtcgccgcgaaccagctttgcctgttagggtgcaaccagttcagacagaaggcgtgccagcataaggataatgccttgcgcggtcttcgacgtgagatctctactggtctgcaggatgaaggaaccgtggccacagtgcttatgctttgtttccaggacgtaaggggctcggagatctcctgttggttttatgtcccggccagactaatgcctgctagatatcagacggatgctcaccttcatggataacgcatctacgcggtggcctgcatctcataaagtacaagggcagtccaagttcaccgagtctctggaactttttccgcatgtactttgtggcgcacgacatcatgagtcgtacggcttctgatgactgggataacaaatggcatggcgacgactcagcccagctgtggtcggaacatgatgatctggaagaggtacgaagactggccgtaccactgtcctatgctgacctcgtctagatcgatgtgctaatgggctgctcacgcagtctcatgaccctgatccataagacctctgtcctcgcagctacaagagccaaggtacctcggcgtatctgattgtgagacaataaaccagaatatctgacgtggatgcccctacagattctcaaaaaccgtcctctaacgccatccgaggttgaagaccacgcaaggatcacagtcaaccttcatgactctcttttcaccctgaaccaaagactcgcttcccactctggcgatcgaacagacctcgaagccatcgcacatattaaacgcctggctgccattctctacctaactgaacgcctcg

SEQ ID NO: 8864 - DNA, 569 bp, Emericella nidulans
ttgcattcgtaatccacattagagacgccgtcgcctaacacggaatcggcatggagtcttatgaggtaagacaaacttcttggagtatcgcaaatattacctgttcatctttgagtccctcatctttatttatttcttactcttttaccaatgtctcttttatctctctccctctcctaataatcatttcttatctatctaacatatatactatcatctaaattcctacctctactctacctctaattcactttcatctccacctcttctgatctcttcttatatatctactcattatcaattctaatcattattttctttttcattttacatctacgccactcttaccttttcctatcactctttcacacatcttttcattcccactcttcttttatcactcacctcccggccatctttccaactttgctcccttccctccattatccattaccatcttttacctttacttgtacttctcctcaatttcatccattctatctctatatccaatttcaaactggtcctacattttgactccatctgtttatgcaacaatattcaattct

SEQ ID NO: 8865 - DNA, 914 bp, Emericella nidulans
tcagccattacggtcctctccacagcggtcgatacgtcgtcgccagattttagggagaacgaacgacaaatgcaagaagtactaaaccgcatgaactcgcttcatagtaccatatctcagggtggtccgcagaaagcaaaggataagcacgttgctcgtgggaagatgcttcctcgagaccgcgtctcagccctcatcgacccgggcacgtcttttctggagctttctcaattagcgggtcatgaagtgtacccgggagaagatgttcccgcgggaggcatcattactggaatcggaacggttgaaggggtaacttgcatgattgtggcgaacgacagcaccgtcaagggtggcacttactacccagttactgtgaagaagcatcttcgcgcgcaagctatagcccaagagaacaagcttccatgtatctatctggtggattcggggggtgcaaaccttccacaccaagctgacgtctttccggacaaggagcactttggccgcatattctttaaccaagcgcgaatgagctcgcagggtatcccgcaaatctcggtcgttatgggaccatgtaccgccggaggtgcctatgtgcctgctatgagtgacgagaccattattgttgagaatcaaggcactatcttcctcgcagggcctccccttgtcaaggctgctactggcgaggttgtttcagccgaagacttaggaggcggtcaactccacagcacaatctcaggtgtgacggactatttagctgttgatgatgcccatgccattgtcctcgcccgccgctccatctccaacctgaactaccccaaagccaagcagcccctagagagcaacgatgatatcaaggagcccctctatgatccagccgaactgaacggtattgttggcacgaatctccgccgcca

SEQ ID NO: 8866 - DNA, 859 bp, Emericella nidulans
catattttatgtttttgcattggattattatcagcatcagcatcagcatcagcatcagcaccacgctgacattacgattgaggatccgagcatagcccactggagttaatgatcagactatcgataccaaaaccacgcctccccattgctcttgtactcagtcccgccgaggcctccatctatatccaacgctgtgcacatggtataaccatgctcctcgaagcactgcatgaggtccagcaagatcagtcggcactgcactgcgcccttggcgccggtctttgtccacgggctccccttgaacttgagctcgaagtttcccgagacgaagtctttgttgcatttctcgatacggtcgccaaaagaggccagtaataaggttgtaagctcggcaggcgcattaagcaggtgcaagagatcggctgagtcgaacgagacgcagagccatgagcgtgattccgggtgttgccgatggaagactaggctgtctagtcgtcgacaatcagtacacatcctagaccagcgaatttcgatagataaggagacggaaacgcaccaccctgcccataactctgagaatcgccccgacccattttacccaccttaccagccggaagcacaacccagccctccttcgcgaacgcgttcaaaagacccataatcgtcaccctgatggcggccttttcgccgtcaaagctgtatccgagtggatttcccttcagtttgaattgcacactctcgtcgaaattctgcgtcttctggattcctttggccataacctggtaatcacttcggacgcgatcactattagatggtcaggaaacctaatgaagcggagtttgccgagtcgccgagtgag

SEQ ID NO: 8867 - DNA, 536 bp, Emericella nidulans
ctattctctggtcatcttgcaagattcgaagccattagggtcaaacggcacatgtgacgctgacttgtattcgactatattgaaccctcttcgctagtttgctccattttcccgtaacttgcttttagtctcttgttgcttacattcactgtctttgccatattaatctacttcttctctctttgttcttttaccttattttttttatctttcttaacctcttattctttttatcttctatttctacaccttatttcttctcttttccctccttttctatttttctttttctttctctcaatttttcctttctttctaaccttcatcatccactttttccttttcttttcttctaatctctatcttctttcttatttactatcctcatttaacttatccttcttcatcccacatttttttatctcacattacatttccttcttctctcttataactttcatatttcttacaattcacttccctcccctatctcatatcaatttctatccctcttttcttctcacttctttcctctt

SEQ ID NO: 8868 - DNA, 708 bp, Emericella nidulans
ttgaagattggttactataaggccgtacctcattgctgggtatctgccagatcttgcgattgtttccgttgattctcttcttagtcttgtcatcatcccaggagaaggagaggctcctcagggccaatgggagagtgagcaacgcggtcacgtcttctgctctgcacgttgatttgatctttgtggcaatgtgaaggtgctagatataagattgatttgttttcccgttgttcggacacttgaatgggcgcaggtttgttgctgatccagtgctgcctgcagaacaccccctaaagatggatctaacgccgggatgtgggcatatatcgtcgacacacgcggaaggctggccaggagtagcgccatcaaaggctgtcggtctcgctcgtcgttagcaaagacggcatccagaatctgagatctaagcttgtccggcaattttgcacgctgaattgccatcttagctattattatctcgttcggtgagaatcgccgctgcctatcccggtcctggagcttatggtttcctttaatatagtatgtaggaggacctccctagttgtcgatgttgattgattgcactgccgctgcaagatcagggtccgtgatagccgtgtaaataaattttccataatccgctgtgactattccgcacgccattatatgtcaagtgagaatagacccggacaaatacttggtgtcatttgc

SEQ ID NO: 8869 - DNA, 1418 bp, Emericella nidulans
ttataataaactaggaggtagttaaacatttgtttttccttcaggagtcaggcttcatttcacttggtccccaagattcgcgtttggaccagctttcctctattcatttcatcctcccttttcttctcaaacttttcaagaaggagtcaaatcagcacgccgagggcccatatctctcatctgggccggaaactccacaattcagccattaccccgttttctcaactaacccaccggcaccgatttcaacaccacgtccgctcctcgcactcgggaaagtctcacaatcgcccatcaatctccgcaaagccaaatgagaagcgcatcactccagtgtcctcagcacccgccgtttcgctatcagacgacgtcaatccaccacccagcacccgccctgcggacctcgaaacacccgcacctctagccccatccgcctccgtcggcgagaaggcgcagcgtctcatcgcgtacggacgcgcatatctcgccttttacaaaacaggctgaagaacgtgtaccaaaactaccgcaattcattgcctattcgtcgctccctgggcatcccgtcgtacttgcttacgtcgccgccgccgaagttcttcattaaaagcagcagtgggcatagcaaacatgtcaaacccaagaccagccgctcaacattccagctcctcaatcgctcagcgtatgatgtccggcgcatgatcccctttgccctggtgctgatcatctgcggcgagttcacgccgcttctggtcatcgcgtttggaaacgccatcacgccgtttacatgtcggattcccaaacaaatcgataagtatcgcaggcagcgagcagaccggaagtcggcagcgctgagcgcatacacagaagcattgaatgggtctgtcaggactccgaaaccagggtcgaaggaggagctagatctgctttctgctttcgcgagcaagaagtttgcgaaggaggctagtgcacaggacgtcctgactgcgtgcgcggtgtttggtctgatcaagtcgcataataggccgagtttgctggtcgagccggtctatcgaaaaaggttggcgaaacataccgagtatctggcggttgatgataatttaattaagagctgtggtggggtgacgaagatggaaagttcagaggttaaaattgctgttgaggagcgcggagggtatgggctaatgacgggagcgagtgcgcgggagttgagaaggccgaaaggagatggttggagatgtggttgcagacgtcccagccggacaagtagctactagagatgagaggtgaaagccctcgactgcgtgatagacaaaatctcgaagatgtacgatatagacctgggcgtacatgaacaatgtaatatacatcatataagtctatccgcgcaacgatacctttcacgagaaatctacaat

SEQ ID NO: 8870 - DNA, 826 bp, Emericella nidulans
cgcggaagacataatgtgtttaaaattcgggctttacattgatatcccggggtaatccagctctggtgggtcgatttacaacttggctccacagcattacaaccgatatattcattataggtgattcatcaccccttcgaaagcttcgcaaacggaaattactaaaatacaatgtcaatgatgctcactacatctctgttcacgtcatctttctccgagggatacaacagtgtattcacatcattgactactactgcatcgaaagcaccatgacggcaaaccatgccatataatgaggctatcgccttcttagtatcttgtattcgcagaagaagaagaaaaagatacaatcaagatttgtcaagctaatcgcaagatgcaatacagcagaatgaccgcaaccagggaaaaccctaagtacaaaaatctgcgtgtggaagaatgcgatgtcctaagtaagggatccactacgaatcccagaatctgcggtatcaaactgaataactccacagtcatcggctcgggcccagtcggggcaacttacgcaagggagattctggaccccggctccggtgcttcgcctggaagaaaagctccaaaggttattatggtggaaactggggcgcagtatggaacgcctcaaggatttttgttgatccaatacacagatagctgacttgcatatctccttgggttagggagtctaaagtgcctggtgaacacaagaagaatgccgtggtatacagaaacacattgattcttttgtgaagtaagtgtccgatatacttctctacagtggagtttctgagactcacgacgtcaaggg

SEQ ID NO: 8871 - DNA, 1487 bp, Emericella nidulans
  unsure (1)..(1487): unsure at all n locations
agcgtcacaaactcaatacgatgatattgacgagctccaaatggcagtaccttggtactcatttccatcaaaccagttatgggctctgtgcacgacggtgagacggccactatcctggaaccatatcggattctgactgagggacggaagtgacagccgcactgagttactctacatggccaggaaccaaggtcgctggatcttagatgcgcaatgcttcaaactttgtagagtcacgcttggccggccgacagattcccggttgctcattgatccgatatgagccacagcttggtccaggcaggcagcaaggttgggaatgttcctttcttgaggtagtcgtgagggcattgtgagacagcgagcgggtggcattgtagtggcgaggagcagaaagttttcgcctgccggctcccgaggtcactgcgatcagttacccgggctagacatgaccagatgtgctcagccacgattttcactttaggcttatcagagcaagggaatgaacttgaggtcataagaaagtataccattcaatcaaagggtttgctaacggaatctaaacaactggcagtagaagtctcgtacacagaaaggcggcggggacgtcattagggattctaaaataaattactcaataagatagccttcggcgacacttttgatgtccttggagtatccggtgctctccccttcctctattaaggagatgttggtgacgtcgacctcgacgaacgggctggctttcgaaaatcgcaccgtcatagggaaagaattcgttctcgtcatcggcagtcgactcgagctcaaagctactagatgcgtggttctcatccacatttccaatattccagtcaagactgtctcccgagacctcgtaaacggcgtcgaagctagagacagctggctcagccgtgccgtatgggatggtaacgacgacatcccgaaggctgtcagagcccgtgagctcgtactcgacagtcactgtagtagagtcggagcctttgttgagccagactgtgaacgtgattgggagcacatcggcattgtcagagcctgagcccgcaacacgccaacggaggacgccgattgagttgttggcagggaatcttttagatgtatctttcagctggatgatagaagaattgctgaatgcagccttgtcgacattaggatgagtgcggaattgcgcgccatgcgtgggattggcgagaaggtcaagtctcagcttggtgaaagcagggtcgctaatacgaagctgaaggtcgcctttgacctcgaaggatttgagcgcaccatcacgtgtgagggaggcggagatggtttcggcgattgtgatatggatcgggtcacggtcggcagagagtgaaggacggacggaggacactctttccgcaacgggagtcgaagcctgaaaaagttacaagggggctcgactcttcagcctcagggccaaggtcgccgcggtctttccgaatntgtctgta

SEQ ID NO: 8872 - DNA, 971 bp, Emericella nidulans
  unsure (1)..(971): unsure at all n locations
tgaggctgtttccaaagaggttcgccgtcatcatcgaactcggcccattgaaagaagccacatcctttctttccgggcttataccccatataacacacccacatgtagcgacctctgctgtcatgcttgcgttggacacatttaagaacggcatgtgcattacaacgacagcgcgggacgtttcgcgggtgtaatgactctcgataccaccgatacgtaatattgatccgccgattgcccgataacgggtgcggtgagacggtttgcgcgggacaatcgcatgcttccattcctcctgcgtctctgcgtgcatgaccaaaagagaattgtgcggtagaggtatagaaatctgcccctgcgcatcagctcgtgcccccgcctcctcttcatcagagacaatccgccgcacccgaaactctcgctggacacccagactaatactccctataaccgcgcgaggcccgaggtaggtaagatgatcagtgtgataccccacactttccgccggcccatcataacaattgacaaacgccgcgttcggcacccattctttcggcgactgatacttcaatttcttacctccggggtagacatcgcggatccgtttccgtatttcctcattaacagcttcctggacgcgtttggagatcgcgcggaggtgcggggttgcttgccggatattggtgtgatacgtgccaccgtacgtatagtcattcgcgtgctgggcctcttcttctgccgtggagacgtagacgcatgtagaatgtgggctttcaacagtccggtcaaatagctgcatttgatagcgcgagaaatgttgcgactcctcgaggagttcgagaagaagcgcattcgcttcttctggtggaaggaaattgtggatgatagtgcacgaggtatgagctgcgacgtcttacgtgctgaacaagtatagagcccttncttttggactaccggttccgagacttctt

SEQ ID NO: 8873 - DNA, 1016 bp, Emericella nidulans
cgccatacataggattctgaaggaggatgattatactcagtgtatacgctcagtcaacgcggagctatcttggacacgatcaaggtcattatcgcccgccaactacaatggaaaacacaaaagggtgttttacccaagacggtgttaaatgtatctacttaaaaccacgacattcaatctattctaccgcatcaccaacgatgcagcactcaaacgccttgcgcttcctttgctttccaaccctgatgcatgaaataattttgcaggttcaatacaagcgccaacacccacgatgccgcagccaaggcacaaatggcggtcaggccatggaggtagagtggcttgtcctctgtgcgaaagatttgtgagccagatataccagcgcagttggcggccatgacgaccagcctatgaaaagttcatgttagttttactcgcttaggaaacttccaagagttggtgaaacgtacgccaatgccacactacgctcctgcggcgatctgcaatacactgacaaccagccgatgtttaagacgtgcatgctggcatacgaaacgttggcgaccgcaatgactccataccgatgccaccggccagaagtagctggggtgacgcgcaagcaagagtacgaaataacgttccaagtgatggaaataaggacaaagggaccgcggtgcccgaatttgtcactgttccctgcattagctcaatccctgcttagcaacactgatgtcgacatacctaagatacgaaagaactaatacccagagcattccacagtataccggcacagaagccaacgcattggcgcgcacagcgctgaacccaaacgacttgatcatgctgggtgtgtactgcgtcagtccttggaatccggacatggcaacgagcgtgatgaagaagtgctgaatgatgcgtggccggctgattgtattccagatgtcgcgtccggtgatcttaagatgcccagcacttttttgtgggtcgtcgatgagaacgcgcgaagtcgcaatgtg

SEQ ID NO: 8874 - DNA, 1072 bp, Emericella nidulans
caccactcaacggatctggttcgtctttgatgtcgtgatcgatccctgtcccatcgccagtctcatagcacgtccgccaacatcctgagaaaatactcttcatctccctccgcgtacggcgaatcgccccgctccgaatagttcgcaagtcgggcataagtcccggttcttcaccataaaggccatcagctctgacgggtctcctccaatgttaaaaaactccagatcctcgtcttcgactgtttcacggaatgagaggtgtgttgccagccggacgcggtggccatgcgacttgagctgtttcccgatcgcgaggaacggctgaatgtcgccccgagagccaacaacatgaataacgatgttcaatcgaagtgggcaatattcatcttctggattcggcctgaacgatgcggaggattgctggcggtgcaccgagtcgcgcgggtacgggtgttgttgtgtgtggcggacgatccgctgtaaccagggttggtgcggtgtgagactgatattgagacggccatcctctgcatccaaacaggtcagtatctcgagaaatgggcttttgtagaagtggttgggagaaacgtacccatcacccgcacgccagtatcatgatggccctcatacagcttgtgggccgcccgcccagaggaatagctggcgtgcgcccagtcctcagacgagatggtctttgccctgttctgagcttgaaccatactttattattgtaaggttgcgaagtgggaaaggtcacttccgcctggagaagttggcgtgttatccgtcgtgctggtcccatgatttcgcggtgatgtcatttgagatagaggtcagagaaaagatagaatgtgggcccacaaggctgttccaggttaagatctcggtaccttttcgtcctttcccactccaggagcatttgattgcccaggtacctcgggaacgtgtccatgccgtcgatcagagctcgatggattgatctcattgggctcttgatggctgcttgctgatggccaatgccagtcgcctactatgccgttgccggagacaatccactgcaagtcttacgaga

SEQ ID NO: 8875 - DNA, 1047 bp, Emericella nidulans
  unsure (1)..(1047): unsure at all n locations
tgcccctcttccgcagaaagagaaatcgaagccgtccatctcttctcctgcgttccagtcggatgagcatcttcctccttatcctccgtcgtcatcctcgtccgccgctcctcccttcgacagcgacgatagcagcggtaatcaccatcaccaccaccaacaccaccacttccccgtctccactccgccgcaatttccgccccatccccaatctcaatctcagtcacaccattccaacactttctcgcaaccgcaatcgcaaacacaatctccctattcttgggactctcgccaacctcctcctcgcaatccagcccggactggcttgcagcggtctcacacccaacgtctccgtacaccgccagacgtttccacgctccataactcccactccacgatcacggtagtcacaaacagccccagtccttcccctcacctcgcgccaccgcagtctttcgatggaatcgatgctgacgtctccgaccagtccgggccttcatctcctactgacaagctagacgatcaggaacctcgccggtctaaacggagtttcttttctttccattcgtcggcctcatcgacgtccgttcgggaccagcccagtttgttggaacgcaaccgatctgtgaagctacccacccgacgctctcagccgcaacaccagccccactaccaccagcagcagcagtcgccgcagctgccgcaacaatcgcgctcgtcgttggattggtctagagagtatgcggtagacgctcccgaggctgaatatcgaactccgtccatgccacagcagaactcagctcgtgcccctgatcccgcactcgcccctcacgcccgttcgccgcgtacgtcccctcttcctcggtccaatacagatccccgtctcgccgacgaactctatcgccagtcatctgtcgacaattccaggcacggtgcagaattgactccgggagcgaaccaattggacccccgcccgcttctgccaagtctttgagccgncattcgcgtaccaattccctatgagcgaaacgtcctcggtcacacagc

SEQ ID NO: 8876 - DNA, 555 bp, Emericella nidulans
acattcttaaacggatgaagagctagaacgatttagctgagctgcgtcggaacgtatctgctttttacccttgccttgaattagcaatccatgagccccttcgcaccggggaatatgtcgaacgaaatcttggttgcgtacacggatttgaatccttcttcgtgtgttatagtctacgcctgtatacttagtcgtaggcaaggctggagcaagtagagtgtgtcatggcagtaagcatggacatggccgtgcagtggtcagttaagtagccagtttagttctggaaaagtccacaaagcaatgtttacctcgatttcaccgttgaacacttgatccctcagtaaacttgcgatattgacgtcaaatctgctggagtagatttgaccaatcatatgccaaggctgaacaaggtaagatccataaaagcccagaagaagctttacctggcctatgcccatgtcaggagagcgagattcggcccattatcctattagcttgtgatatagcacaaccagtagtaattggtactaatgttgggacactttttagtttggg

SEQ ID NO: 8877 - DNA, 391 bp, Emericella nidulans
tcccattgtccaaccggacggcgcaaaacctcgaaccacacctcggcacgaactgcgcgggcccatacctcctcactcaactcctctcaccgatcctcgtctccacagcccagaagcactccacagcgcccaataccgtccgcgttgtttggagcagcagtatgctcgttgacgcgctggccccacgctcgggaatccggccgtccgatctcgatccccctagcccgaacatgaacctgaactacgcgcttagcaaaacggggaattggttccttgcggatcggcttgctaaacaattaggcgaaaggggcgttgtgagcatcacacagaacccctgggaacatctacacaccaatcttcgacaatgcaccgcggggtttttttggggaaa

SEQ ID NO: 8878 - DNA, 1238 bp, Emericella nidulans
tctacctcatagtctcctcaatccttgtatcatttttgcgccaaagctgtgcatgttacactattaaaagccaccaaatcacctctaaaggcagtgttcaatgttactagcactaataaaaacatcacaagaatgagtaaactaacatttgaggcatctctacaggtgagccactgggccgtctgaagttggaacttttcgcagatgtgacgccacggacagctgaaaatttccgtcagttctgcaccggagagagcaagaaccagcaaggccggcctcagggctacaaaggaagtaaattccatagagtagtaagtgccctctaactaaaaaacaaaattcttgcaaatcactgaatttcccttagattaaggacttcatgatccaaggaggtgatttcgtcaatggtgacggcacaggttcatgtaccatatatggcactccgaagttctcagatgagaattttactctccggcatgatcgtccaggtctgctaagtatggctgtaagcatgcctatatttctatcggggatcagcgacagttaacgccgcctagaattctgggccgaatacaaatggctgccagttcttcatcacaacaactgcaactccatttctgaacggcaaacatgttgtattcggtcaagttattgatgggatggacattgtgcgaatgatcgaaaacacccgcaccacaagggacaaaccaaaccaagatgttgtaatcatccagtgcggagagatgtagaggaaaacttttcattgatgcgcagtacagaaagtatctactctgttcaagcgagaagaaatcgcgagccataaccaaagagctataacttgaacttgctgaggtattccgaagccaagtctaccgcgtcatcaaccttctcgggattgataccgttgccaatcgacgtatgacctttgccccctgcgttgccaccaaccgctctagagacggcactggaccattcgctagcagacgcaccctggtcgctaattgcctataaacataatgtggcctgttagacaccatacagctgctcgctatagaataattcaggaacaacttactttagggacgtagcatccatgagttacacgaccatcttcaagactagaggcaagaacatagacacatttagtccgcgagtttcgttttcacgtaagtcaagcattcactaacggcctttgcatttgccgatattggaagctttgcaatgagccatgacttatt

SEQ ID NO: 8879 - DNA, 575 bp, Emericella nidulans
aaaaaaaaggtggtcggaaaaaaggggaagtttcgtagcaaggaaatatgttgtcttctttttttgggaattgtttttattcgattgaagactcggtcgcaacgatatgacggctgtggatctgcactgcagaattgccttctgtaccccagctctctccaaagtgtcggctacctggttggaatgcgctggagagggcgtgaatgagtgggagcgacaaacgcgggcgggaaggggagcgagcctcgggagacgcgaccagcacaagccaaacggtcaaaggtcggtcgcaggctaacccaactcaacactgctgctggacgaattgaaaaggcagagtgtaatctagatttaggcgagcatgaccgaccgggagtacgaatttgaggagcgaacagcggcaagagggcgttgtaagaggtcgactcttcctgtggccccagaaagcggacagggggcgacggtaacggccggaggggagacgaaagcgcgcggcaaccagagccccaaggaggagggtttatagacccaagggaggaggaagaagggaagaagagagaaaacgacgaagggaa

SEQ ID NO: 8880 - DNA, 729 bp, Emericella nidulans
agggcactcttactgtttcgttcctttcaaagagcaccactcttccgcccttgtctcctgtggcgaggtaattaccggtatggtcgaactcgacagtagaaataatatcggctgagagacagcatcaaagttagcttctgagaatagtaaagctataaggtcgggtttagctgtaccttctgtaatgtcttctacatcgcctttatcgccaaagcatctatgcgcagctatcagtacccactttggaacatgcagctacagaggacagcgccacgacttttatgaccatgctcgaatatcgtccccattccacccaacgccatttgtggataaacaacggaatcttattgatgaagctggtttggagcaacgaggagggaaactcactgtgtgaatttccaggtaggtgtacctgggtccctgtccaccattttctttcaaagcgacccttctcttggggaggtcgaacgcagtcaagaggcgaagttcaaatccaaagccgtggagctttgaagacaagagtacaagcggggttcgtggggaccggatcgtaacgaagacgagagtcgaaaattgatataattccggatatatcactcgcgagcgagaataaggacgaaatgaaccgatggtgctgaaggtgtaaaagcgagaaactccaacacgagtgagtctcgaggaagatagggattatagaacccaggtcgggagaaggaggcggaatgaggt

SEQ ID NO: 8881 - DNA, 1342 bp, Emericella nidulans
gcttccgacattgtagccggcaagcgtcgtctttatttcggtcatcatccggatcatactcatcaccgctttcaccatcggcgtccggatcgtagtcgaacaaaacgttgtcatcggccgcggcgctctcaaggccccttgctttcatttcttcgtccttttttcgagcctcggcggcttcttcaaccagcttttcgtatctcattttgtccttgcgcgatcgatagaggatacgatcacaccaacttggtcctctatgtttctcgctcgtgtcaaaccgcgccatgctgcctacatcgtacttgtacgtgggcagaaacgaaattgggccctcacgccagccctcatggaaagctttctgtttattctgttgcatgcgtaattggtcatgggggaataacgacgatatcgttgtttgtagagaagccggatcttgatgagggtctagctcttcatcggattcgctgggaagttcctctgatacaggcgagttactcgagctgttttcgtcgatgacaacgtgcggggaagaaggtgaaccgatcacgtcgcgtaacgcagcatgtcttctgtcatattcgttctctgtgtgccgtgcaagaacctgccgtacgtcatcgccagggatatcctccaggcgataattcaggtctccgaaccagaatgcgtaatcttcgtccccaattgtttcgcagggcgcatcccgaagagtatagtcagtatccaccgcgtcgaacttcgttcgagcgacgatttgagaggcatcccaattccgtcgatctaagctggccttgtctgacccggctgctagatgacagttgacgaagatgatacacgtagtctcacctactagcaggcgcgtcgcgacggctcccttgttgcccatgtatcccagcaagcccgtaccgacactagtggagcttaccgccgaaatgctatcggcaatggatggtgcagcatagatgagttgtaatagcccaataagctgaatttctgcaatcaatctgtagcctggtggtagtgcatcttcaacagctcttttccagcgattggccggggccggatcaacaaatggtctcacatcttccgcaggtgaggagacatcaacgatctcctgcaggcctaggacatagagaccaatctcgtccgggggtgtttcaaggagtggagcagcagccgcggagttcgtggatttcgaggacgagccgttttgcgaccccgataagggctgtcggcatactccttgcttttgcacaaaccacttcccgatatctctctccgtgccagcgatggcagccacattccaggaccctaccttcactttgatagaccggtggcgggt

SEQ ID NO: 8882 - DNA, 1059 bp, Emericella nidulans
gtagtaacaccaacatcattacaaacaacgtttttgcttatgcagatgcacatgaacaaccacattcccggcgcccctccacgacccccgagctctttgacacaggtttctacctcggccgcgtcgaactgccgacaacctgctcccgcgagctcataaacattccctttgcggagcgccagcgccaacgccaaaagagccagctccaccgcggcaccacacatctcctctcaatcacgacgcccgacggcgcggtcctatcgccgaatttcaatggtctccctgtcgacactggtgcgtttatccatgcattgggctcaccgtatattcaggaacctggccctgtagagctgagaccagagaagagggcattgaaggagcagaaggaaatacagaagcagaaacacaagcacaagctgctgccgctaaacctgcttcctccgctcccgctcccgccatcgccgtcgcgtccgcctctgacctcaagctcgctgtcttcggggctgtcgtcatcaccgacactgtctttatcggcctgagctggcgagggagtcgagagaggtgagggaggaggtcacggagatattcgaggggaagttagtgttggttggtttcgagcttggtaatttgtagattgggttggagaaatgaataagtaattggtcgacagttggaaaaagtaatgtgttgaagtgggaaaggtgagaaactgtgtttgtcttactgacactaatcaacagcgctattgaagttgggtggagtgaagttgctaggaaccctaatttcctcctgcttgagttcttgagccttcagatgcctttcactgcatggttctcattgcacacttgctcatggtctagagcaaacgcttcttgtacctggctagagcgaacgttgctgatttagttatatattcataataagatgggaagatggatagacgagtagcaatccaaactctctatgcattaaaacatccatatatctcataagatctaacccgagctttttgacccaattccaacctcccgcttgcttcatgttactgaagtcctagaa

SEQ ID NO: 8883 - DNA, 1000 bp, Emericella nidulans
gagcactggtacatgcatccgtcccttggcatagagggagcacagcctttgactacagcggtcatgatagatcacgaacgctgttcagagttccacactgccagcagatgcgtcatcgatctcaagaccaagggtttatctgccccaatctcaatcccaatctcgagaaacgatcaccctcaccggcacaaggacagccacagtctcccatacagccacaatgactgcaacagcaacggtgacggccgccaatgtcgacaccaatcaggagaaccaggtcaatgcctgcggtactggaggcgatgcgacgggagctgatggcgagttactgctcgtcccttgcacgccgcctgggtttgccacgatcacagtgacggtgacgacgaccgttacagaaagagagcctgctcagactattacggtcacagcatagcagtcccgatccctactcttgtatagctgtctcaatttgtccagcttaacgtgcgtgtatgtagcagtagtgttatacaggaatattatggactaataaattacctaacccgttattattcttcttcatacgtggattgcaagtagaaattgtattagccaacgtggatagacgggccgtcaatggttatatactggcaagttaccttgtctgatgcgtgatacggactgtagcttccaggaacctgtataagacacttcagtgcttctggtaaactacctagctgtatagcgcatgcatctttacttcagaaacttgctatacctctcaagctaggcatgatgagcatctggtatgtctaatgtggcgaactatggtagttgcgaagtacattctggcattagctaaatgacattcaggtctgcctaagttagtcaagtacatgctctcattggtattcttgaagtatgatgaatagaatttttttataaatcaatttttgatacatttctgtttgatccgagtcccaaacacggctaatcctgctctgtcgatcttggaatactc

SEQ ID NO: 8884 - DNA, 764 bp, Emericella nidulans
ggttcctctgtgtcagcgccaagctgagaaagcttcggctcctgttgtgagcaatattacaaatgcatccgtcgccagcaactcaacccgcttctcgtccattcccaacgaggatttctctcaagcaaccaaagctttatacgaaagagaacttgccaagggagtcagcgagaacgaggagattttcaccggtgaagagtcggtcagcacgggtgcacaaccccaatgggcaagcaagtaccggccgtgcaaaccccgatactttaaccgcgtccagatgggatatgaatggaacaagtataatcaaacccattacgaccacgataatcctccgccgaaggttgttcagggatacaaatttaacatcttctattccgacctcattgataaaacgaaagctcccacttattggatagaacgagagcatgtaatgaaacggtgtcagctatttgtctggtgcatagaggaagatacctgtcttattacgtaaatgctgtcccgtcttttaagactttcttttcccattgcttttttattgtatttcctattaacttttgttttttttaatctcatttaatgtttattttttccctttttcattcatttattctcatcttgatattatttcacttctttatattatttctaacttattaatttcatatcttcaatttttattattccttcttctaatattttttacatcattattcttctttcttaatttaacttatattcatcaatccctaactatttattactta

SEQ ID NO: 8885 - DNA, 373 bp, Emericella nidulans
agcataacgtctctggagactagtatgcataccttggaagtgcggcgcattattatgttagtatcggccccgaaatgccagtgacttgacacattgtctttctggccgccggtttgttgatcgcttctggtgtcgctagtaaacgtcaacaaagtaacggacagccaggtaggtaatatgaagttgacataggagacaataatgataaagagatgtgccatgctgcgttaggaacggccaaaaggatttagggaacatctcgacatgaaattaagcatataacaagaattgacgtagacagaacagccgaatgcatgaagtgcgtgtttgaatgattttatgactgagaggaagccaaccgcgccgatatatc

SEQ ID NO: 8886 - DNA, 2017 bp, Emericella nidulans
  unsure (1)..(2017): unsure at all n locations
gagaataaaataagtcaaaagaagataaattttgaaattgagtaatagtaacagggataccgttggctttattataatttgtcgccaacccctattcatctgtctcatttcattcacagaacaagccaggcggcaaaccgtgcgtttttcaagtctttctgctcaggctcaggggttcttttcctaggctctgccttgccggtgcctctacaaaaaacttctttcaagcatacttttctatcactttcaaaggactggctagccaacctgtgtttggtgtaaattcacggtcactgtctgtgggaagcggagggtcgccccagtggcgatgctactgtagggtagcagtcaatcaggctacgctttctggtaatgcccaggactaaaccgttgtaactgttagtggcgactctttcactctgtaacctgacattcaataatttagcatctgactgttgcaggaaatgggtgggagaagagcccactgacgaaaatcgtttatgcctcaggcacatatttggtttggcgggagagtatcgatgatatcagtgttctaagcagtatccaaatctgttttctgcctaatgaaaatatcccatatagttactgatgaaactaatgctctattcccacccatctagcccgcttgtttggagaaactccttgccttttgctctccggttgtacctcagtgcttgtgcacagattgggcgaacttgtactgtatgagtatcgccatgttccggaagtgagacgcaatatatcggggcatttcttggggtattcatctgtatcctgctcgcgaatagtttggcactcatcaggctcctcatctgaggaaacagcggcacttgcatgattcgaggaccagaatattgaacctcggcctcagagtcctgcaagtttgaagcagatacaggagtcctcaggcactatcgagaatgctgtggtgggccagcttgtttgaccccagggatccagagtggaccttttcaggctggccgtgatgccaatgtttgaatgtggctatgaacacacatccgcctctcatgaataaacatggcctgcaatacgcagatcccctatgcgatgcgccgcgaaggctacaacattatcaggcaatatcaggctagtttcttgcagtgtgatctttaccgaagcagctcactcagctcgccagggaagttgcacattcgaaccagatatgggagcatcttttgaaataagtcaagcactttgatatttcgcaccaacgggggaactgtagagaggggcaatttggagtgcgacggggatgtggggaattgaaaagcattctttggccatatgcttcaggaaagagcacctggaaacaggggacaaaccacttattatattcgcggggcccctgtgaaaattttggggggggtcacctgggcccccgtttgggggaagatttctttcaaaaagaggttcccaaaaaccccgaaaaacttttaacgggggaaaatattttctcacaaaaaagggttttaagggggttattttgcttttcccgcccccctcacaaagagggtgtgggggaaaataacgtggctccccctctttttggggtgggtggggcaccgtctttaaaccctaattaaaaaacatgcttgtgggacacaaattttttttataaaacaaacggaaatttttttttttttgggggaggaaaggggaccccccctttgttgaaataaaaaaacccgtgggggaggaaaaaaaaaaacacccggtcaggggatattttgggttttttattacaaacacaaatcttggggggaaataaaaaatattttcccccccccccgcgggtgntattatatatatttttcgaaaaggggccccaatccaaaaaacctttgttgtagtttggtccgaaaataagaaatattctntccntnnnannnnnnnnnaaaggacaaaaaatagagtacccaccttttagaattttttccacttacacaaaaaaaaaaattgatagatttttttattt

SEQ ID NO: 8887 - DNA, 911 bp, Emericella nidulans
cgtatatattaagcaaagtatgtcaatgtagatgaaaattgtaaggaactggcacagacctggcccttgaatctattcagacacagactgaagctcaagctcctcaattaagatccaccgtgtgggtcctaatccttcctagcaaacatcactgaatccaccaagcagtctttctcaccaactcagctgcgcctcttctcaagaggaaaaaaaggtctcctggatgttttcaatgaacaatggcttagatgtctgagtagctcgactcttgtcccggaaaatccgtgtcgaactgggcatttagagcgcagagtggtcgtcagccctagcagcggaatctcaggccagagcagaacagtgtcaggatcctcgattaaccctgttgtgttaatcgacatcgcctgacaatccaaatagaagccatgggccgtgctggggctgcggatcgctggccgttgatgacctttcgtttttgtgcctcagccggcgacggaccctttggataaatgacaaatcaatgaaacgctagcacatgctcaatcagcacgagcagggagaataatgacaacggggcgcagataccgctggtcttctttttttcagaagtattcagctggggtcaatcgctcgttaaggcctcccgggcaaatccagagcttggctgtgcactgcaaactcaacctgccatgacacgctatttgtgttgggtcaagttttcagtgtcgatccactgtcgggcttcagccgcatattaagcagcctcgactctctggttcatgagtccattggtaagtgtcgactcgctgtaccaatgaactggaaatctgatgaatccgccagttcatcaggcccaaggctgagggcggagacgcccgctagtttgtggcccctgaatcgatcgacagcccgtc

SEQ ID NO: 8888 - DNA, 574 bp, Emericella nidulans
acgggggtattttacaagtagagtgacctcatccaaacccttccaaatctatcatcttcctacaccattccatactcctaaccctaatccatccttcatcccactccttatacaaccaccttactcctatacataccatatcacttccacatccttcaatttcctcccctatatcccttcaatctatcaatcttaacctcctaattacatacatactaattacctttattcacatctactattcaaccctctaccttattccattaacccaaatgttacgccatcctttcactctcatacatcatctttcctttactactcactatatcttcttattaaacaccactacataatactaccaaacttatttccacttctcattatctatatcacattccataattcttcaccattctctcctctctacctcatcttttaacaatatatctcttttctcatctttcactaatctaccacaccctacactatctactatcacactactaataatcatctctttacatttctcatatcacatatctaccaaactctcttctgaatacatacacacact

SEQ ID NO: 8889 - DNA, 643 bp, Emericella nidulans
ggggggttatactaaaaattatgggcgtactcaaaagtgtaatttaaataaactaaactattataaattaaattttcacttattcttaataatctctaattatccttatacctttaatttatataaatataaacacctcattatactaattaatatacaaaattaaaaaaatatattttttaatttcattaaaattttattaaaatttctatgaacaaataataatactaaattcataaaataaatatttataaaccaaataatttataatattctaaatccatttataaaactacttatttattatttctatttttaatcataatatttatatatattcaacttaacaatataacatttaccaactacccttctatctatattaaatactaatcattatactcacatataataatcatagaatattaatataacaatttatactataatgtttttcaacttactatattaatattcattcattaaatttttcaacttaataataaaaaaatatataataataataatacacaatatctataacatttataaatctaatcaccataatttctcaaaccaaactttttatagttaaattatataatataatatatgacaaattattatatataatacacttcat

SEQ ID NO: 8890 - DNA, 554 bp, Emericella nidulans
ttggcggggtgagtgcagcagacgctgctctgcaccatgatcatcctcttcttgttatttttaacctccagacccttttttatctctattccttgacatcttctactccattccacattcttatttccttatctctattctctattcattcttcctctctctttttatatttttcttccctttcattttcccatctcctcctttactttcttatttcctctccttttttcttctccttactttcctttttttactcttttccttttattctaccattccctttttttccactttctcttatatcttatatcttcattctctttctactccacctcttcttccctcatttttctcttttcttcttcttctttatatatttcttaattctttattttcttattccttatctctgatattcttccatcttttctcttcttttccactcttctctttctattatgcactaattaaccaatcttctttcactcttattcttccttattattcttctccatctccactatctttgatctatttactactctatacatctt

SEQ ID NO: 8891 - DNA, 357 bp, Emericella nidulans
aagaggaggcgaaagggtgaagacagggtgggcgagagagagggcggggaacgtgagagacggaggagcggaccccagggcggcgaaggagaaggggaaaacgcaagagagcaaagcaacggagtggagggcaagagggagtgggatgaaggtgggaggaaagtccgaaggggggcaggaagccgcgggcaggagaggatgttgaggcagagcacggcgcggcggcaggcgggtagcggacacaagcgcagcgggggaaaggtgcggccgggccgaccgaacccggcagggggccgagtacgggggacgtcgccagcgagcagctccgtcccggagggccaagacgagatgggggac

SEQ ID NO: 8892 - DNA, 928 bp, Emericella nidulans
agactgcgagaggcgggagtgatctcaaagagccttaagcggcgtgaggccgttggcgaaggcgctgtgagaaagctcgaccatgttggctgtgacgccgaagacgatgatcttggtattcttcttggactcgtgggccaagagggaggagagggtcgtgaatgtttcggctacggagggcataaggacatagtactgaggcacgcgctcgtgggtgggcggttcgttcttgtccactgtcgaaatgctggtgtaccctggattcaagacaacgctgaccacatccttgacctttggtggtagagtggctgagaagcacataccttgccaaccggtgctctttgacgggatcagcttgaggatctgcttgacgtccgccaggaacccggtctcgagcatcgtgtccgcttcatccagaacgagggtctggatatccttgagcttctctgcagtctcagactcagagaggtaatccttcagccgcccaggtgtagctacaagaatggacgggtccccgttcatgaaccgcgagtgcgcggacgctcgcgcggtcccaccaacagcaatatgacattccagcggtcttgaaagctgtgaggtaagctcatcgcatgacttggcgatctgctgtgcgagctctctggttggcgtgatgatgaggatcgccacttgccctctcctgacctggctctggccttgtattaagcaatgcaaagcaggcagcaaaaaagccacagttttaccggtgcctgtttttgcctgcacgagacagtcctgcgccatgtgggaagctctgtgaggactcgctgctgcacgggcgacatgtactcgaagcccagcacgttgagggcttgaagcagcttctggtcgagtttgccggccatagagctgtatggctggaggccgtctgtagcgctctgcatgcttg

SEQ ID NO: 8893 - DNA, 1837 bp, Emericella nidulans
tgatcatatattcaagatttacaggaaatatgagtgagctgaagaacagtgcagcagcaagtagaaaacctgaagtacatcagagcgagaatgggcattttagctagactcattacagaacatttctcttgactgcagatgtccaggggatcgaaagtctgggctggtaatgtattgtaaccatactgctaaagtaggctttaacgactgaacaccgtaaggaacgagcggcttgcagggtagctcttaagcttctaggttattaagagtcagccttctgatcagacaatcatattctaagatccaggtttacatgatattatatttcatctattagttcttgttgaatttgcctttgtaggtcctggcactctgtcatgtataacaatggcgggtgtcgctttttagtaacctagtatgatgaaggcatgcgtaagtgcacaaagtctacaattctcccttcactaagtacagtattggatatactaaggatttactcagatagaggcccctttagaccggtatcttgctgaaagttggtcaaacgtccatgtaatagtacggaatacaaacccagcaaggaggctacagggcgttgtctaattaagtgcaaggatatacatgaaagagatatacaacaaggtagcccccttcagaagcaatcagctacccagtccggaaatacagtagaagagtcttcaaaggacctagtcagtaatcttcagcattggggataacgctgtcctaccatgacggctcgggcacattggacaaagagattcagatgtgacaaagctcataatttgtgcctacctaatttctcagctaacagttagtattgaaagtaacgctcagactatccaagcatctgagtgatcctacactcatattattggcaatcccgctctggttgtcttcgggatgacgtggtaagatttgcaggacaaaacagcttcgttcgaagatactgatgaactgaacaattaatagattcttgacattgcttgataagagtttagatatcctaagttgatggagactttgctggtataatatgctgtgtctgtacgttctcaagcttacaaggctgctgtagggtattgatggggacccaagaaaaagaaatttgaagatagctactgttttatttgtagatcttttttctcctgtaggttcagagcaaagagtacatgaatctagaagttctactacgaatctgttatgctagaatctggatatttatgcacatatggtctttgattagtgaatcagttcagaaagaggcctctagcgtgagagtcttattcagaatttctatgaatctgattgggttctgagattaatactggaattaagctgtgttgtgttaagtctgccctgaatacattcaacagagcatggcacgtctttgtctaacctgccactcctccagagaaacacctcgcatctttgttccttcaccacccatcactctttctacgcttcacgactttcttaatactttgaatatattgaatctgcatggttgtttcttgcccttattcagtgttcttcctttctcttcggagcaaagactagtgcatttcattgctccaagatagaacgccaatcccccagccgtcatggaaaacgcactctcacctatacagcgtgcctttaacgcattcctgttgagcatgccgcctcaacagctggatgacttggtcaagcatatacaggatgtcaaggcccaggaacagaaaccccagttttagaaccagatcccagccttgtgcaacacacccaaacgccattatacctttctacttttcagctcgaacacgccggatctttaaag

SEQ ID NO: 8894 - DNA, 830 bp, Emericella nidulans
agatcaggacatagaattcattggttgacaatcagctacagatatatatgcccctctgaatggtgtcaatatgtactaaaccgcccgacacctgaatcattcaatatgggttctatcaccgctttgtttggcctattgacaccatcggatgagcatagcttcgaagcgctcggggctcaacttctcgaggccatgtccacgtactcaaagtgtctgaaggatgagaatctctcggccccatcgctgtatccgatgtccggagaaaatacgagcgttgcgtgtttggaaggaatcgaagccaagcggagaatcatagagctttctcagagaatatgtgctgtaacaatggatccggagctgaatctcctcatcagctccctgcaggtgactgctcctccgttcacccgagagcatagagcttggaagctaaccaccagtcaccatagttccatttttgctcgtccctcaaagtggcgattgaccttcgcattgatgaatatgtcccaatagacggggtaatttcactcagcgagcttgcaaaactggcgggtgcggcggaaatgcttctaagtgcgggcttcacacattgcccagtgatgcttacaagctaatcctgaaggtcgcattatgcgtgttctcgtaaacaagcacgtcttcatgcaacctcaaccgggccactatgcccacacccggatgtctatgctgttgctgaagccaaagaccaaagacctactgtcccatcggtttgttgagccagcttggcggcatcaactgttacatattctaacacacggcaggttagatgatgtcttccgatccctttaatgagt

SEQ ID NO: 8895 - DNA, 1168 bp, Emericella nidulans
ggctacttttatcaaccacaattttgctctccagactgttgtggaggctaacaacgccaaggtcgacttcaaccaccccaatcccttctacaacgccgaagaggagaccgagcctcttgcctctaagggctataagtaccgccgcttcgatctctctctggagagcgatgaggagcctcttaacatgatcgtccgtactgaggttgacgccctggtcaagaaccccgtcaacggcgaggatcagcaattggtcgtcaaggctcttaacgagttcgacagcaaggcccagggctctggtggctccctggactggcgcagcaagctctactctcagcgcggtgcggtcgtcgctacagagatgaagaacaacagctgcaagcttgcccgctggacaacgcaagccattctcgcaaaggctgatggaatgaagcttggtttcgtgtctcgtgccaacccccgttcagccgccgctcacgtcgtcttgggtgttgcgggatacaagccccgcgaattcgctgctcagatgaacctcaatctcggcaacggttggggtatcgtgcgcacgatcgtcgatcgcatccgtgcccttgatgcggacgaggaggaggacaaggtcaccaagtacatcttggttaaggaccccaaccgtcctgtcctccgtctgtacagtgttcccgccaacgcgttcgaggaagacgatgaggctgctgaggaagagcaggaagcaaagggtgaagttgaggaggcatgaagtaatgaatgcgttcttttgcagagatttgagatatcatatgtttaagtgcctttcatgtgcatattcaaaagtactagatcacgagtcctatttgcaagattttgggtcgagcatcattttactactacgtatgttccgcattttcagcatcagatttagatttggaccgtaccgtaatgcagctttgaatatttgataggactagacagtcgggtcttagcccaatctattctcactcccctccccagttgtcatttaacagtcctctttagactactgacctataggttttaatacccttgtcaagaagccaagaccatgattcaaatcaaacgcattatcgctcccagtcaaccccagatacgatgccctgatcctaaagcaaggtctcgcgcaaagcatcgacgacgaagg

SEQ ID NO: 8896 - DNA, 1762 bp, Emericella nidulans
cagactaaacccagaaccgggaaaaggaacaaaaggacaatggcaacgaatccattgggacttccgacgaacaatgccagaaagaggtggaagagaagaagaaagaggttattgagctcaaggtaatttacactccaaactggtcccatcgttctctttgattgccttaataaactaaactgactgttcctaggacaaatatgtccggtctgttgcagacttcctgaacctccaggaacgcactaagcgggacatggagaacgcccgcaacttcgccattcaacgatttgccgtcgacctccttgagagtatcgacaattttgatcgtgctcttctagctgtcccaaaggagaagcttaatgctccgaagaccgaggagaacaaggacctcttggatctcgtcgatggtctgaagatgacccagaacatccttttgaacactctgcagaagcacggcctggaacgatttgaccccggagagcctggcgaggacggaaaaccccagaagttcgaccccaagatccacgaagctaccttcatgaccaaggtcgagggcaaggagaatggcgagatcatgtacacccagagcaagggtttcacactgaacggccgtgtcctgagggtgagtttgctgcgtattgactggaaacctttgaccgctaatcatttgtgcaggctgccaaggttggagttgtgaagaatgactaaacgctatcctccgctcggccgatacatacctctgtacactataaagtctttcacccactatgaaagggccccactatatcccctcacggcgctcacacctcaacctccacctttatgctcccggatggacgtctattctgtctatgaacgcatatgtatgatacacctttcgtacgattgggggcgtcaggactgtcttcttttggatgccttttctagattcatcacggcgttatgttgcttacaaccctccctcctctgtatactactattaatgttgactggtttggtcatgtcgtttcttttctcctaaaaatatgtcggcaatcattggcatgatatggcacaggatgatacgttttcaccttttctcatttcatccttcttggactagcacctgcagattccctgagatgtctcatataaatcggaatcagaatatgacattccaatgcagaatgttcaccagagacaaatatggccctaacgtaagtcgtcacaaccaggcgaatccaaattgaatcgcaaggcactagcccgtgtgagaacttgtgtggctggacgcaacactatttatcacacgggtactctgtaggcgaatccagattataccggctcaggacgatcgatcgctgtgtagtaggctaccagaaaagttgcagtctcgaatccagacactgttggcaaccataacagccagccgcagtacgctaggctaccggtattgaatgatccattaaaactaaaccttgggggcgatcacgttagctcacgcgaaatagtgcatcgttcgtccctacttgcggcattgtaccaagcttcagctacaatatacaaggcaccctcgtttccgtagccggcccgctgatgagtgataccctgcgccctgctccgtactcgtattttaaatccctggcttcaccgtctacaagcggtcgaccaacaagacaatcatggccgtggcgttggcgctcgcagcatggcggggtacagcctgaaggcaggctgatattgacttatagtctcagccgtaatgtaagcacaagatccagta

SEQ ID NO: 8897 - DNA, 418 bp, Emericella nidulans
ggccagttatgaaatacaaagcttggaaaaggcctttatcaggtcagcgacgcggcaatttgacttcaagaaagaacagtagcagaattttaaatcatccctttcaagatggcgtgaggacgcttccatattgtagactagcaattgcgagtgctactcgaacaattgtgtgccagctaacaaccacgcctatcagatatgtcaaggaaatgccacgggaacatccccaaactcgatcaccaattaacacaggacaccccccccccaggtactcagggtttgcatgccgggtacattagaaggacatttgacggactgcacttctagtcttcgtcttcgcatggagacgactaaagctagccttttcgcctccgatccggtatgaatggactagatggagtcgtatcgaagaccatgg

SEQ ID NO: 8898 - DNA, 1157 bp, Emericella nidulans
ataaagtcggcccacagcctggaccacagcttgcctagtcttcaattgtcgaagggtagggggagaatattaagtaaagaatccaaccccaggagggtggtgagagagcagagtcacgggcgactctcgtctgctatttcgagatgtgttgggtcatcctcccgaaggtctgcgcctcctctaaatgatagatgctgacgctcataggagtttcagatatcgcccccaacgtcgtatgttggctcgatagtttattggcgccggtgttacaaactaatggccagccacacgctggcccgttgccctaattttcagcgctcgtgcgattcgaagtcatcttcggcccctactgtcatgacatctcaccggttccgtcgctgaaaatttatggtctgtgcccccctactatcagacaacatggccgctcttctgtattttctgggcattgtggcatccctggttgcggctgcttgggttctacgaaggacaacatattcacccgaatcgcaagtgcagctagaagttccaacaaatccgagtccgataagcaagaagctcgcagaggcgctaccacatattgtacttttgcatcgtaataaggctttcttcaagtctatcaactcatactgggcccaacaggagcgtgaggttatgcaagcatgcatcgttcaaccacgagaggctagtgaggtagccaaggtcatcggaattctcaaacgggagtatgatgaacaagaggcgtcgctgactagtagatctggtgatgtcttgttcgctgtccgagggggcggtcagtctcctgttcctggaggtgcaagcgccaaaggaggcgattgatcgacctggctctgttccagaaggtgacggtctctgacgacagagaaagcgtggtcctcggagcaggggtccgttgggtcaatgcaccgcgggtctggacaagaagggtctcatagttgtaggaggcagaagctccgatgttgagatagccgagtttatactgggtggcgagcctaactgttgtcccctccagcgtgatctcagctgaccttttatataggcgggttatccttctttacgccatgcttcggtctggcctgttcgaatgtcctagcctacgaagttgttctcgcctcaggtaagattgttacggccaccgc

SEQ ID NO: 8899 - DNA, 936 bp, Emericella nidulans
  unsure (1)..(936): unsure at all n locations
cgattcctgacctcagacccggcagcgcccgttactctgagcacagtgctgaatcatcctacctctgattggtcaattcccagatcacgggtgtcgtcgggggcgcgaccaagaaaccagctctacaaattccctccaagtttttttcttccctttggccagtccgcttgacttgaattctgtctttcatcttctctgctacatacaactctttgtactataccacttacctctttacataaccctttctctctacctctttattttttatcactcacaatggctaagggcggtgacagctactctcctggtaagtagtttgaattcatctcttcgtttcggctaggcgctctctgctgggggtgatattcactccactgcgtgcattgtcgaagtgaacgaatatgtgagacacaggctgtgaatgatgtgttgggtctggtgagaacattgtccgatccaacacaagctcaaagttgcccacttctggatcgccatttgatcgccagcacaatacaatttctacttctatcgcgcgctggcaatcctcactttgcagcggatgctttattcttcatcgtcgtcgccacaatgacgagcttcgacgcttactgcttcacgaccactctcagcatgcgcgaagccgaactggaagagctggagaaagagaaagcggaccagaatgctaatcaattgttttttccaggcgactctacaagggtgctaagctctncgagacccgttgaagcagtgcacactgtcaagaacgccgcgccacaaggtcggcccaacctcacgtctcttcgccgtagactgtcagctgaggctaccctacaccgagcaacaagcaggcgcgtacctggacagactttggacaatcatgcagttaaagtttggccgtgtactttttccaacgtagtctgggacccaggttat

SEQ ID NO: 8900 - DNA, 122 bp, Emericella nidulans
aaacagcatgatggatatagagatgatgatatggggcatgtatgaaccttagggctagagattatgaacggcatcgacgttggaaagagagtacccgagattgtgtctcgagatgcacgaca

SEQ ID NO: 8901 - DNA, 624 bp, Emericella nidulans
gataggagtttatttaaaacctatggccttatttcaccgcgaatcatcttcattctatctctgtaatcatggctctcctaaccccaaacactcccatacccttcacctctcattatatctccataccaagccaacaaactctttacatctcatctcacataacctccaacttatctcaccactattacttccttttcttaccctattcttctcactcctttcctaatccatcttccacacccttcctccctcccactaatcacacaacactctcaaaaaattactcatctcataccctatcattaccactcacaccacccatccatctctattcttataccacttcaatccttcccatccttcaacctactctcaataccttacaattaatacttactaccactactacattattactcatcacacttaatatcttaatactatacctctcactcccatcatatatactatattttaacctaacactctcatctttcttactctctcaatatgtctcctaccttaccctcttataacaatactctccatcaaaatatactcttaattcaatcctccctctctatcaccactctatcctaatactaattacacttcttcttctcc

SEQ ID NO: 8902 - DNA, 1062 bp, Emericella nidulans
ctttcaggctcagttccacaagaccgtggtggcactgattcggagtaggtagttgataagtcaacaattgacatcatatcttcaattgcgaggacgttccacgcaattcgcagcttcgaaaatgtacagtttcgctgatcgacgatggacccatctgcccaccactctagacacgagctgttgagtgttgtgcgcagtgacacgacgcgtctaggtcgcgcccaacaataaatccttcggctcccgactcctggtcaggtaaaaactggcagatccccaatcacctccgtaattacagtagaataacccaggagatgaataggcgaggatgaggaagatgaagtgaagccagaagccaaaagcgacctgcgcgagacgtgcatgggcaataaactcactgatggacaatcaactaccatttgatcatcagcaaggccgatcacagcaaaccccttgacaagaatgtacccaccgatgttcgagatccgggctcaacgtgtacgtttatgacttctgggtacggtgtgtgggaagcctttcttaatcccgtcagttgactttatcgagcaaagtacaactggaaagtacagtggatgtccgccagacacccttcaaaatgtttgttctcaccctgtccaaccacagccttgctaatcagaacgatcgtaggcttgatgcagattcggtgaagtcaacttccgttttcttgctcagatgttccttccatgctgaccaccttcagatccaaatcttctgaagctggacaagtcaatgactccggcaacgtaatagtcttttatctttgcttgtcgaccagctgcgagagtaattcaaggcgggcgacaaatagctcaacctctcctatttcgatcattttctgacatatgcggaaagaccgccattaaccgaaggtccttccaagactgacgagcttgttaaggccattaaatgaaccggctgacgcaattaagcgctttgtccttctgctggccgtggtgttggccaggcgtccagactttatgccagaaagccgttctctctcatcacagatgtaactatggg

SEQ ID NO: 8903 - DNA, 604 bp, Emericella nidulans
  unsure (1)..(604): unsure at all n locations
atttctcatgagaatgcagctctgccaatatgctccacgaccgcagactctgtcgacctcttttccctttcttctttactttccctctttatcacttcttacctatacattcaccttcttactatcattcttcatcctctcactttatcacttcttcacttcctcatctatatcttctaccatttcatcttatcactttatctcactctcttctaactctctccacttcacttctttatatccatcctatctcccatatcctctccaccatctcttttttctcttatctatcccttctacataattctccttccttctatccctaacatctcattctttatcctctacattacctatctatattcctatatctcatctatctaacactctctacctatacatcactttactctctaacactctctataccattctctctctcttctctcactctaattcattcattatcctcatgataaccttctaccttcacacttaatctccaatctctttatccactccctatctccttctatctcctatatattctacatacttatntcatcttacctctttctccatcttccatcttcactcattctat

SEQ ID NO: 8904 - DNA, 873 bp, Emericella nidulans
actcgtcactgccaagacgtcatcactttaaaatttcaaaggtgctaagtacgccagagagctggtcaagaggaaaccgatctgacggccgagatgcttcagaacggatcatggaagaccgccactttcaagccctacaacttcaaggctatgggcgctcctaccccctctggagccttccatcctttaaacaaagtccgacaggagttccggaatatcttcttcgagatgggttttgaggagatgccgacgaaccgtttcgtggagactggcttttggaacttcgacgcactctttgtgcctcaacagcaccccgctcgtgatctccaagataccttctatatctccgaccctctcaccgctgaccctcctcgtgaagatcccgagtatgacccccaccgcccaaagaccgtgcttaaacccgcgggcgaggaaaagaagctggactacaaagaatattgggagaatgtccgccaggttcatgagaatggaaagtacgggtcaattggttatcgctacccatggagccccgaggaagcgctgcgccttgttcttcgcacacacaccacgtccatctccacgtacatgctgcacaagcttgccgccaatccgcgacctgcgagatatttcagtatcgaccgtgtcttccgtaatgaggcagtcgacgccacccacttggctgagttccaccaaatcgaaggtgtcattgccgactttgacctcaccctaggtggtctcatcggcttcatggaggttttcttcgccaagatgggtattcacaagctccgcttcaaacctgcctacaacccctacactgaacctagtatggaaattttcggctatcaccccgggctaggcaagtgagtgaaatta

SEQ ID NO: 8905 - DNA, 1798 bp, Emericella nidulans
aaaaccggtatgtcggatgaaaaaccagggacgacaggttccttattcactctggcagcgctatacttcggaatgcctcggtaagccgtctaccaaatccacggaaagagaacagtcaaagagatcagcgcgtgtactctacagagactctgcagcaatcttcagacgagtcacttgccggtgtcgacaacagagctcactgcatcgttcggttgggaatcaaggcaaattttcgaacagcaagatgtccaagagctatcacgaaaactgatgcagagacttgaggagaaaatgaaaggaactccagcggaaaaggcccttcccgaatgattagtagggaaatcaaaaacatacatttcatgtgtcaatgttgactatgagtcttcacgggtgcaagatttctgggatatccagctcaacgtgaggaacaacaagactcttgatgacagtttccgcgactatattcaggtggaaagacttgaaggagacaacaaatatgatgcaggggcgccgtacggcttgcaggatgccgacaagggcgaaatattcgagagcttcccgcccgtgctgcacttacacctgaaacgttttgaatacgacattcagcgagacgccatgatgaagattaatgatcgccacgcattcccaatggagtttgatgccgctccctatctgtccaaggacgccgatagatccgaatcgtgggtctatcaattacatggtgttttggtccacagcggtgatctgaacgcgggccactactttgccttcttgaaacctacgaaagatgggttctggtaccgttttgatgacgaccgagtaacccgagcgacagagaaggaagtgctcgaagagaactatggtggtgagtatgagttgcccaacggtgcagtcggagtaagacaaccctacacccgaggactgtcaaccaaacggtcgacgaacgcatacatgttggtctatgtccgcaaatccagggtggatgatgttcttgttcccataacaaaagacgatgtgccatcccacattggtatgcacaagctcctgtgtctttagtatttgctgttaatgtgcctatagaaaaacgccttgtggaggagcgtgccgagatcgcccgtcggagaaaggagaaagaggaggcgcacttgtacacgacggttggggtgctgtctgaggagaccttcaggtgccatcatggttttgacctgactagctacgatccaccggttgtggaggaggcacttccaaaacagtaccggattttgaagactacgactgttggcgaatttgccgaaaagatcgcggaagagaaagggctcaacccgctccaacttcgattctgggtcatggtcaatcgccagaataagacaatgcggccggatcaggtcatccaggatcccgaaatgaccatggatgaggcgtacagcagatatgccaccaagggacacgtgttccgagtatggctagaggtcgcacaaccatctcccgatggaaccgtttcatggccggatagctcaacctcggtgcttattttcttgaagaactttgacgtaccaacccaaaccctgacaggagtcggtgcaacatacgtgcgcaagagtcagaaggttggggagctcgggtcgacaatactcgatctgatgaactggccggcccggaccgagtttgtcctttatgaggagattaaacacaccatgatcgatctcatgaagccccagcaaacgtttcagcagtcagagatccaagatggggacattatcacatccaaaaggtgttcaggagtcagaatgcccgagac

SEQ ID NO: 8906 - DNA, 462 bp, Emericella nidulans
aaggatcgtggtattacaagagatcttaaatggggtgttcccgttcccttggatggatttgataacaaggtgctttacgtgtggtttgaagcgtgcattggttatccatcaattactgcaaactatacgcctgactgggaactctggtggcgcaatcctgaggatgtccagctttatcagttcttgggcaaagacaacgtgccctttcacagcgtgattttccccggatgtcagctgggaaccaaggagaaatggactatgctccaccatttgaataccgccgagtacttgaactacgagggtggcaagttcagtaaatctcgcggaattggtgtctttggcaacaacgccaaagagactggcgtcgccccgacgtgtggcgttactatcttttaaagaaccgtccagagacaggagacaccagttcgagtggagatcatttgtcgatacaacaacagtgag

SEQ ID NO: 8907 - DNA, 733 bp, Emericella nidulans
cgggagaagaagtgcaaaaagtgggcacaagaaacgttagagaccatgtcgcagcggtcgccgacctccctcaaggttgctctgcgccaaatgcgtgtgggccaggcatggggcatccgcgagacgttccagcgtgagtacgagattgctgcacgattcatgcagcaccccgacttcgtcgagggcgtcaaggcacgtctcatgtcgaagccgccccgccaggcgtcgtggcagcctgcaactcttgccgaggtctctgagaaggacgtggatgagtttttcaagatcccgcaaggcaaggagcgtatccaacttttgagccaggagaactggcgctcttacccacactcctatggtctcccttctgaaaaggccatcgagaaattcattcgggaagccgacccgaagtcaagggcttcgaagggcgaggttatcgagcatttcgtgaaggagtttgaacacaaggaaggcgtcaaggagaaggttgccgaggtgctggctagaaagaccactaaatccgccgagggcctcatttggcaaggtgagggtgctgagacggatggtcagtagacggcgtcttctgtttaaactgcttatatgtatttatatcatttagggtatgacaatggtcttcattaataggttcttcattcaataggaaagagcaaacagcaatatgtgctctgtagttaagggaaattgatccgctccccactttaccgaatgggctgac

SEQ ID NO: 8908 - DNA, 1755 bp, Emericella nidulans
  unsure (1)..(1755): unsure at all n locations
ctggttacgatacatctccgtggcagcggactcagtcgtgtagagcttatattgagcacatcctgcttgatacattctcgatgtacgcattcctgtcccctttcgaaagcacataccacgcgaatctcttctgccaggtcgccggctgcgccgttgacaagagcggccgaacaatcttcgtccagagtcccgacgtcgcactttctccagttttcgagtactgctcgcgcgcaggcaagttaaacaacaagtccgcttcgataagggtgcacgacggcttatgcaaaaatacgatttccttcgacccatgaccgtagacgtactcgatatcaaactccttgttgaattcatcggatatgggccatgtgtgttccttgttcgagttggattgtcgcaagatgtacttgatcggggtgtctttgtgctcaggtacggattggcgcttctcccataggccctcgggagcaatgatgtccgcgtcggggaaggcttttttccatgccgttaaatggatgtggtgttcaaggtcgagggctgcaatgtacttgactcgtccgccgaggccggaaatcgtttcgcggaccgcgggagttaggttaactggggaaaagacggctatggagccggaagtcatccggactgttgttcatcagttaagatgcagattgctactgatgagcatcgactaacccagcgtccctcgtccaccgaatttgaagcgtccaaatcgcgcaaagggcaagctcatggttatgacatctgaagtaacgttgcggatcaccatgacctcgtccgggttcgagggaaagagttgaggggccattattgatgtttactttcccctcctgcgatggggtttatctggaggtctgctgttgcgcgggaacctgggataatttgtatatctcgccgcggggttcgagtctttaacctgactaacagaaagtcgctgatgccaataaagggcctcggttcaggagagcgcgagtatgaataattcttgtttgaaattgcatgtggacaaattgcatggcacgaagtcttgtaagttagtaatctttgaagatgacaattctcgatctggagtctggaccccgaggttaacgtgcttggtgatccgctgacgtcaatggcttgggctgaagacggcaccactccagatgtgcacgacttatggtggctcgctccaccggtggagaacgggccacaaatatagtacatatgcaaattgaactgataagtatgattataactgaagcctagttgagttacgagaattgttatggcaaaaaaaatttattccaacgaaaggggtatatcgcgtacgtctaccgtactgcgtccaacgccttgacaccgagaagcccgaaggagtagtctgaagcagtagaaaagcccagcctgccactttagctataccatccttgtgctgtatcgttctcctcttcctcgcgatggggtattatgcattctttgatgttatacgcatcgatcatatccttccacgtatcgaagtcgagactgaacaccgactggtgcttctggacacctcgtctttgcgcttcgctgggagcaagaggctttgttggatctagtgttcatgagttagacaattgaggtccctggttataacaagcagatggtatagaagtcatacgcaatgttggcaagcttctgctatcggttgagatccaactgtgccgtctctaaccaggaagctgagnatagacagattttcactgattgaccgaatga

SEQ ID NO: 8909 - DNA, 978 bp, Emericella nidulans
gccagcaccatgcctcttcgcgcaaaagtgacgaacccaggtttcgcggcgacttctaatgtatgtatatctcctccaaatcttcgtcatgggctgacaacaggcagatgtcgaccgcatccaacccagatatccccaaagctcaacacggagacgagcccgacgatgtcctcttcaattccctattcggagtgcgactggtggagctcaacaggccaaagaagcttaactcgttgaacggctcgatggtcaggaagattcttccacgcctcaaggttagacacggaactacaacatctggtagaagcgtcgttgctaagctcgttaggaatgggaaaaatctcaacttgccaacatcatcatggtcgctggggccggcacgaaggctctctgtgccggcggtgacgtggctgctcttgcactacagaacgaaaagggccccgagggacaacaggcatcgacagacttcttcggtctcgaatacaagctcgaccatgtcatcgcaacctactcgaaacccttcatctccgtcatggacggcattaccatgggcggaggcgttggactaagtgttcacgcgccattccgcatcgcgaccgaacgcactgtcttcgccatgcccgaaacgaccatcggcttcttccccgacgtcggcggctcttttttcctcccccgtctcgacggcgagattggcacctatctggccctaacatcggcacgcctgaccggtgttcaggcgctgtatgctggcattgctacacactactttgactctagcgttttgggcaatctgacacagcgtctgtcggaattggtcttccgcgacagtgctactctccaggagcggctagacctgatcaaccgcacaatggccgagttcgcgacaggtcttcctgaggaaccccaactggctggccagctgcgtagcgcaattgaccgatcttccgccacgatacggtggagcagattatgaaggcc

SEQ ID NO: 8910 - DNA, 1397 bp, Emericella nidulans
tgtctgagtgggtatcgtcgaattaaagacagataggttgtcatagtttttagtaaaaatgaacagaaaggaacttactccctacttgttgccgtgtataggtgtaaagtcaatatgacctgaagaggaaatatgtagggtttgggtcgcgttcaatcgcgctggtcacgggccatcacggcctcaggctccacgtgccccacaaaaaaaaatcgagctgagtccactttttgtttctccgcttggggagtctttcgaggtcgacgttgctctcttccgacttttcatcatctattctccaggatttcaagcaccttgagcaaccgctccatatcacgtacaggagttgatttcttggtttcctgagtgtgatggacaggccgatgacgctctcggtgcatctttcttccccgaacacttagccttttgtagcctctgcattgtcgtgtgcttggtttccattttccttgattgtcctttggagccacttgaaggagcgttttgcatgacgcagtcactgtcactgcatttgtttctcaagagttaaatctgaataactgttttgatacccatggtctccctcgccagtgcctcgcgcggcccagcgacgggaccacacacaccgtctaagatgatagcagcatcatcaccagcgtccatattgaaaacatctaagacaccgacatcagctgccggattgaaacacagaatggaggaaatggatctatccctttccccatcttcctctatcgcctctgatgcggacggacagcccagcccacgaaaaaagacccgagtacagttcgatgaagacgtggaaatgcgggaaatctcatacaatgctgaaacacaaggagggagtcaatggacatcggataagagcgcagccgtcgcgcgagaggaggcacggcgggcgattcaacgggatgctactggaggcgatagcgaagcctcggaccgcgtcaagggggtctttgccattaaccctcggcggctggacgcgaacggcatgccgccatcaaatgtacctacacacactacactggaacatcatcttatgggtcttatcgccaaacgtggccgccctggatcgcagctgcaatgggctagttcagccccgttggacacgagtggctcggcgcgactggctacataagctataattcggtttttgggaaacctgcagttgccagggagcctttgggtccggactaagatgtggcaactccagggcgggttcctgggaccagggggttccgttttcgacgtcttcctgatttcccccgtttcttggtagcccttgttgactttccctggaggctttctatatatttccaatctctttcgtttaaaaggacctcctcccatttcataatctctttttccctctttttttc

SEQ ID NO: 8911 - DNA, 1435 bp, Emericella nidulans
gttcgactgggtttggattcggttagcgcacattcgtctgcactttagctttgccatcagagcaacatcaaattgaaacagcgggagacctgcttcttctgctcaaggccgtgcccctgtagcttagccatcacctgatcccctgatcacctggttggcacggcaaggtcaattgcagcacagtgcctgcaggcaacaagccttactgggcatatgagagagtaacatgcaggatatcttgggtgacggatcttacacccaaagcggcatctgccgcgaccgcaggagggcatccacggcactgaatgtcgaaaggaggattaatctacagcttaatcaatcgttcatttacacaggtgatagttagtggatggtccggaatcggcgaaccgtggaattaacagtggagagctctacagctgtggcggatccaaggatcccacccgaccaggtacaggagtaaaggaaaacaaatcgaataataataataataatccaagggcttaattattattattcctactacggaggacttgcccaaagcccctgataccgagatgagctggcagatgaagggtttcaataattactcagagtatattgggtctgattcgaaagagctgatctgtgcttgcagataatctgatacgacggcagcaaacaatcctatggtgacatttgtgctgctgcgatcagttttcctttgtactggccgggcttatcggctgaaacacggaccatgagctccctaaaatctggaaattgccttacgacgatcgtctccaaggccgcgactcttggtcgtcttggtcgcgtatctctccagctttccgcgttagtgtgcggcgcaggccttgatggtctgatggtctctctgatggtctttgatggtctccgatggtctctgatggccggcttggctttatgtcactgtcagacaccggccgaagccaggacgcggtgtttggatcctacgcgtgcgaggcgatcccgtccagcgtacgaacaacacaaatcctcaaaacacctagtcttcggagaatatccctggtgacgcctgaagaagcctgtgatgatcaagagcctgcctaggtggacggtttgaggcaaccagtggagcccgctgtgtgactggacttccatcacgcgctaaagagggaactcccatcgtgtcgagtatcgaacgtctcttatattaggggccattattattgatatggggttcgcgataattattggcacgcctctttcttagcccagcggacattttctcttttctccttttcgcatccttcggcgtggtttcagatccattcttgttgcttgctccccttttcttcccattgattggcgtggattttcccgtgcacaacgacactggatacgttgaagtcactttttgacatacggccaatgacgccctgattcgagtaga

SEQ ID NO: 8912 - DNA, 790 bp, Emericella nidulans
  unsure (1)..(790): unsure at all n locations
aggtcgccgatgggtttgagcggaggatgtcgagatgtgagcggagttctgcgaggatgtgcgttgcaagggaggcgaaaggaactgttggtgagggagaggggaggtgtaggatgtagagatttgctgaggtaatgggttgcggtgctgttggaagccggtgttggatcgttatgttggaggcctggggtatgctattggtggtatgcgtatgggtgtggttgtggctagaggccggtgttgtactggccgtgcttgcagtgagtgcgcgaaggtcgtcgtgtttgtggctaccgccgggagttggggggcggatgggattggggtgtgctggtgaccaggcagttgggcctgctggggatgcgatttggactgtgatgttgatggatgggtagaggtttgcaagggttgttgcgcggtcgagggagcgggcgctgacctataatttgggcaattggttagacaatcgtatggatgatctcaaaatgaagatggattggatgaagtacctcaacgacagatatacttcctcttcgaaaatggtccagcctcgacaacagatccgtcactcgatcgtcggtatcactggtcccatactgaagaaaagcaggccactggcgttgaagctttggccgttgctcagacgtactggcgaatgtcgctgggtatttaagctagggtggacgcgtcttcgtcggaccaaacttttgccaatcgttgcgttgcataagcttctgctagccncctaggattggtgcaggcaaaacattccacggtaaaataaacgttt

SEQ ID NO: 8913 - DNA, 1804 bp, Emericella nidulans
agtcaagccggagcaacaagctcagcatcaagtaccgcagcaaatcgcacagaatcaagcgatcaaaacgcaggctgtatctccttccaaggccgccaaagggccagcccccaagcagacaccaccaacggcgaagagaaagttacaaaatgaagaaatggccattggtcaggcttctcctatccagaactcgaatcagcctgcgatttcccaaaccttgccggtgacagcaccttccaggccggccatgccgtttacccgagagcagttagcagcaatgacgccgcaacagcggatgcaaatagaggctcatctccgtcgacagcaaggtcaagcacgtggtacaatcagtagagctgctgcacagaaggcgtggagtaatttacccgagagtattcgacagttgtataatgagctcggcaagaatgccccagaggacaagccagttgctgttacgccggagcaaagggccgcaatgaatcaacaacttcgggattgtacagactatctgggaaggatggatgcgctagttcagttcattgcgaaagtccccgggcaagagaaaaatctgcgaagcttgctaggaatggtatgttctcatcgctccttctttgtttataatcaatgtactgacattcaccagcgtattcaactgatgcgccaatttaagcccagtccggattgggcattgaacgatcaattcacgatcactccggaatatttgatcggcactactaattacatcaagaaactgttccatcatatgatcgcgcgcgtcaaccaacagcaaaaccaagggcccgggcagcgggtcggcatgtctcagggacctaatccacaacagacaaatcagaacatgcccccgctcaacgcgagcaatcttcagcagcttcagcaacaagaagaggcccttcagcgggcccgcagagcgtcaagtcaaaccgctccatcaggggctatcccggcagcgccattcggggcgccctccccacagggcgttccccatgcttatggacccgggagtataccaccccaggaacttaagcttcctcccccaaagcggagaaagcaatcgcatccgagtactacccctgtctctggtacgtcaggggccaaggcacaagcgaacaaacaggcggcacgatagccaggccaatcaatggcgctttcaagtgttcggttcccgagtgtcaatatcactaccaagggtttggcagccagggagatcttgacaagcacgttgaagaaagtcataaggctgaggaacccatcgagaatgccctccaattcgcgcttcaatgcttcagtactctggttaaggatgaacaaaagcctgattctcagggtttgacgaagggattcggcttcgctacggcactgccagcgaacgaggaagtgaaggccgagggagcgacacctgtttccggggcgacacctatgggacgagtctcgagccaggtggccgcgaagcctgcttctccagcgtccagtcagcagctaactccagttcgcggagcgaccaaaggttctggctcgatgtctgttaaacctacactgagcgaagatggcaagagagattcgaggaaaacggcggagcaggacccagcatccatggcaaaagatttgtgggcagacagcgccatttcttttgacgcaattcgtgatgcatttggcaatgtgagtgatgatcatgatttggaccttggtgtgatggacgaattcctcaacgctgagatgtttaacggtacccaggatacgccggactcagtggaaaccggcgtcgttacccagactcccaaggacg

SEQ ID NO: 8914 - DNA, 547 bp, Emericella nidulans
aactgcgcctttagtttcacaaggaggccagaggattaccggacaaggcagagttcatgctaggtaatagcctactatactctagtaaactctctctatagtctacatattccctttaaatatttctttctgttgacctctcacacatccttctatcaatccttattactcattatcatactttaaactctcatttcgttatcccttttactttacttttaccttttctcactttttctatttcatactataacatatgtttctttttccattcccttcccttgttatgtccattctttactcctcccatcgatacttaccttttcttcacttccacttcatctctaactccttactatacattcttcactctccttacttactacatcacatacacttcccctattatctctccttcccctttttctcaactcttctaatctcactccttcttatctttcctattctcacttctcttcctttccacttctaacattatactacatatctctctttctatactatccctatctttcttctcaactct

SEQ ID NO: 8915 - DNA, 1194 bp, Emericella nidulans
gagtcaagggcactgttatcgctccatgttgatttttcgcagtcagatacaagctggagcggagacctcgagaaacctggaagaatacctctgcttccagttcccaaccgtcccaagcccgaacaacgcccgagcagcggcaaagacccgctggaagctctgcagcccgcagaaaataagctgatagccaccatgaccttgcttctggaagcctggacaaaccatagtaccgggcccccgtggcggccggctgcccaaatccatccactcatgtcagatggatatcgaccggtaggctgaactctgggtcttgatattgagaaagtttgaatgtcgcaagtggtggtggcgctctttgactttacgccaacctaggttcagtacgcggctgcatggcgaagtctatgccaaatgacaatgaaatacctgatctcggtagctcagttcaaggtagtaagtttgacctaacattactgtcagggttgagcgcataagaacactggctacgacatgccgttcccgctactccatagcaagcgatcatggcagtccccgcaaagaacattcgatagcttcttagcattgcaaaagcccggtcgaatccttcacgcaataatacgtctgttgaacgagcgttgtcctgagaaattgtattatgtacgtatgtggctgttcaatgtacccatatcacgttgggttcataatgcgcagaacacgcgtcagtcaagcgttcttcactcaagcgctcggttcgccttcttcttgtttatcgactatacttcaaactctcacccttatgaaaggctttctcgcaataatcgtctagtcattgaggcactccgagagtcacgacaagtctagtttagatggagtgcgcgacagaccatctactgcacgcagacacttggcgaatgatgaagccaaaatcttcttattcaggatgaaagctcgtagttttgaagcaagttgggagtcgcaaagggtgaaaaagtttaaaaagacgccccaagcgaacgttaccttgttggaataacacagacaaagccggggattaagggatttgaagattgaaaaattcgtaacgttcagatgccgttccccccaatttttttttttttatagggggggccccccaaaaaaattttttttttttttccttcggtacctatatattttttttattatattatattt

SEQ ID NO: 8916 - DNA, 1414 bp, Emericella nidulans
atctccttgaatctcctcggcatcgactctcgaagcttacaactggaatgtagacgcaggccccgcaaacctgcgtcgatcattctggaatggaggcgaagcgcgggtttcggatatgctttccgcgctgaagtagtatgcggtctaggttagtgatcaacaatctccggttcaaatggggatgcggtatgcactctgtgactgatacagccggacagtgtattccattccacaaagcccggtgcatgaactcagagacaaccctattccaggcctagcaaagcaaaaatgtaggttggctatccagctttggcatgaaaagtataacgtaaaaagaattccttcgtcgactggttcgggatttgcatcgagcctgctgcagacactcacggcagttgaagactggattttcggccaatggttgtgagcgggaaaggatccgtgagactccaatgttttctttgcgcgtgggatcgcagatgcactgtgtttctagttcgattaagtcaattgaaacttgtgtgcactgcggttgtccactcggcgatcctctccacaatttccctaccccgcagtcccccggcatcttcgcagttggacccttggttagcctgtgtttccagaacacggtgggactgttacgtttgcccttgaatctttgacaaagttattcatccatcgccagatgcggcgcatattcgttaatccatctcgcatgcttcgcttagagcgttcttcatggatgggagatcggtgcaaagataccccacatcagtgtacacaatatgcaaggccgactcatagtggaatcatcgtgtttgaggtaacccttgcggaagtgataagcattcctgatggagtattgatggtctcccgtgcgagttcaacgaatagtcttcggacctctttcagctgagaataccgttccgaatcgccttcgactctagaattcattcagtatttcagagaggagatacggtgttatcagtatccccttcgaacagaaagctcgtctgcaaacaaacggaaacatccatctgcatggtagtgtcatcagctccagcagctccggctgctaaatttgtctagtcacccatggtgatgacatagccggacagaagaggtcaagtgaggagacttccgttcgggtctggacgcagccgtccatgggccgactaagcacctgatactgttaccaatctgtcgccagtacagtggcgctctggttacccaataaatgcctctagaccaggctgcatacagcactgcatgcgcgtatgcaataaagtggctcttaatagggattgatataggacaaccaatcgtgataggataacaggaatgtaggacaaaaggcttcaactactacgggcgagacgcgagatcgaatgaatgtggatactcgcattttttt

SEQ ID NO: 8917 - DNA, 165 bp, Emericella nidulans
ctaaacaattgtaagggcccgagtcaactggtatagtgtaacattccggcgtgtcggtcatcttctggactacgcgaccggcgttatcgctataacggcagaggttcggccggaagtcggtgtaaagacattaggataagagggccagatcgagatcggacagta

SEQ ID NO: 8918 - DNA, 944 bp, Emericella nidulans
actggatgaatgattgttgaaggccagaaagaagaaatatatcagcgcgagcccggtagttcatatggaacctggatacgtgcctttgcctccatctcgtgtgtctgctgtccatccatttcatgcatcggtgccccctctccagctatctcatgacccatgacaaccaccgattccatctggctcgggtccttcttgtagtcgggctcgggcacgggggtgctccttctccgccgcatgaagaagaaccagcccaaaagtgcgagtatggccaatcctcccacagcagacccgacgctgataccggcaatggcgcccgtactcaagccgccgtcgacaccctgctcggaatcgggatcgccggttccagtcagattggcaagaagattcggattcgcactcgcacttgaactcgcagtagagctcgaaatcgaactcgacgtcgaggagctggggtcgcagctcccgaactcagactggcatccatcaccgcagtagctggaattccctccacagtatcccatgcgcgagcagcagtcgccgtattcgctgcccaggcaagtgacattgctcgtcaaggtcgctccgcacgatcccgttgtactgaccgtctgcacgctggcgtcattgcaggtcccgaattcgagctggcatccttcgccgcagtaggctgtggtcgagccgcagtagcccttggacgagcagcagttgccaaacgtagagttgagacaggtcgcgttggtctctgaattggagccgcagttgccgtcggtgctggttctggatttgttcatcttgacagctgtgcggtttgatcgagcagtgattaatggattcagcggcgaatggattcgagagttagcgggtcgttactcgtcaacgtgtaagcgtgagacaaaacaggccagagcctgggccagcgagaggaaatcgccagaaaaaaa

SEQ ID NO: 8919 - DNA, 1425 bp, Emericella nidulans
gctgcccaagccaaggaggcaaaagaagcaacgacttcagaacatccaacgcaaggcgaaaaggacaatgttgccgacgcggagacggagccagtgcccgagccgaaatacccataccgccaccgcgatccctttgacgcgctcctagaaccgttctactacaataagtctctgaccgatcctatcagcactgccaaggataaatggaacttgttgcctgccttcttgaaggtcaagggcttggtgaaacagcacattgattcatacaactacctcgttgaagtgcagctaaagaaaatcgtcgagtcgagcaacacgattcgtagcgacgtcgaccataacttctacataaagtttactgatatctaccttggtttccctcgccgagcagacgagcctcaggatgtccgtaccgaatttgaggaatcaaccgtgacaccgcacgagtgccgactgcgcgatacgacgtatgccgcaccgattcaggtggactttgaatacatccgtggccgtcaaagggttaggaggaaaggtgtatctattggtaggatgccggtcatgctgcgcagttcaaaatgtgtgctgggcaacaagactccggcgcagatgacggtgctcaatgagtgcccgcttgatcctggtggttatttcatcgtcaatggaacggagaaggtgattctcgttcaggaacagttgagcaagaacagaatcatcgtcgagacggatccgaaaaaggagatagttcaggcatcggtcacaaggtaagagtccgaggcttcagtggggtttggcatcttactaagaatgcttgtagttcatccaatgagcgcaagtctaagagttatattattttaaagaaggacaggttatacgtcaaacacaacgtgctcagcgaagatattcccatcgttatccttctcaaagccatgggcatccataccgacaaggaaatgatgctcctggttgctggcgtcgacaaggtctaccaggaggacttcgctattaactttgagaaagctatcaaggttggcgtatttacgcagcagcaagcacttgattggattggttctcggatcaagatcaatcgaaagcagatgtcttaccgccggacacacgttcagaggccgtcgaggctattgcgtccgtcatcatttcccacattgaagtcaaagacatgaacttccggcctaaggccatttacgttgctaacatggcccgccgtgtgctcatggcgaagaatgacgcggcgctggtcgacgaccgtgattaccttgggaataagagactagagttggccggacagctattagccttgctctttgaagatctcttcaagaagttctgctttgatattaaaatgaacattgataaggtcctaaacaagcgcaatcgagttaggcgtcaatgccggctgagagccagcgc

SEQ ID NO: 8920 - DNA, 1311 bp, Emericella nidulans
taagatggcgacagagaatgagacaactgaaaatctccaagaagtgtagaaagcacaatgccgctgttatcagacatgattcacgagctattgggcctcatcatttagttatgtggagatatacataacatccatcggctcagcaaagaccaattcgcatttgtagcaccaggacgactgtgaatctcctgatcatattcgatcgggtgtaggcgactgacaattcgtgtcttgattattcacaccgacgcagactccacagcatccctgatttagttcccactgcagctagtgcgtcaccagcagcaatgacactctgctagagcagagtaatgacgacccatgttatctcgttggtgagggttgatgaatgagtcgtcgttcaatacactcacccaacgataccctgaagtcgacttcgattagggttcgggcgcggggaggatctcgcccaaagtcatcgggttaatcctctcagaggaactgtgatttgcttgaagcaatgtaagtcaaatccttagaagtgacagggccagggcagctgtcagatgcctggactttgcaacatgcgtgctcatttggatcctggagaatgccagtgggactttcttcgggcatcaatcccatcaatcccaatgagaagacaaactgaatgctactcgcactcaaggtggactggtaagtcaggagaaagatgaaactggcatctctgtgagttaacgaaaagatagtgcaacctggataggcgaggtctggcgtttgtatcagagtgcgtaatggggcctgggacggcgtactcttccctatgtagaacggcggtattgaattaataccgtactggtactgtacggtagtggttttcaaacacttatctatctccgcttgtctccccgcagagaatctgcaagcacagaactcatctcaaattcttgcagggaatattcaattacaatatctgccatttatttcgcacagcgataatgcgctgtccataataacttctagagtacttaaagagatctatgcgcgccgccaaccgcaatgaagctctccattcttcgcaggtcgaagagcacgatatccgcctcctccgtctacggcctcgaccatgcagttctcaacattcccgtccccccaccaaccatgtggatgaatctcggttattggaaggttcctcccctctgcctattaaaccttctatatatcttttcaaaaactcgtagccacggccaaacaaacctgaccgccaacaggacacaactgatttccctcaccgttgcgtgcgctcctagatcaagttttgataacagc

SEQ ID NO: 8921 - DNA, 1223 bp, Emericella nidulans
  unsure (1)..(1223): unsure at all n locations
cgctatcggcgcggaatgtagttgcctccagccatggcgcgacgaacccagagtatcaagctgttcgcgacaatgtctgggctctttttccatgcggcggctagtagacttacatactgaccgataatatcccgaacaaacaccacccctgcccatataacgattattattggttcttggattcctcaggctatccgccatgtgcagggcttcacttatattagaacagctcgtgttggacaaggtctaacggccaaggcacacttactgcacctaatgatctccgtttcccttttggagttgtgcgctggaccctcgacaatatcctggctaaaatccttgctagaaggatgagtggctggtcgttagctcagtctcgtattcgacgacttggattctattccttcagcactcttcagacgtcttatctattatgagcaggtagtttaaggttcagatacgattcaacaccaacttagtaaatagaaagtcggtctttcgagctcgtcatttcacctacaatcgctcatgaaaccacttcttcggccgaccaaggtgccctgtaaaacaactaaatcaggccatctctacgcttagattgaactaacgattgaactactgcacaagctacttgattagcttagtgcccagtggctgctgacatacaaacttgcacgaaaatcttaatggtaaaagcgacattcagttttgtaatcttaagaattttttcaattgtcaacgtaaagaaggcctatactagcaggtccacaggtgagacaatcacaaagaaaccaccaccttctgggctgaagttccctgcgcctgcagatcgaccgcggcctggacactctctaatcccttcccagccacgagggcgacaggggcagggatgaacgatccagccttgagggccttgggtaggtagtcctcgtagattgccttgcccacctgattatccttgatcgtagtaccgaagacgctcttgaccgtcacgccctcaggggcctggaacccacccttgaccgtggacacaaacttgaccccctgggacttggagaccacctcgactgtaagcggggtggcggcgaacccgatgcaatccatcgcgccggcgacggtcttgccctgaagcgccgccacgagatcctgtgcaactgtcgcactgtggtagtcgaagattnggctggcgacgagttccttgacgtagtcaagttcttgggcga

SEQ ID NO: 8922 - DNA, 1191 bp, Emericella nidulans
gatctattccggaagcaagaaaggtcaagagttgccttcaggagttggaagtcaagaagcttggaacacatgaagggttatggccaaaccttacacctgaactgggtatataagagttctaagcaagctattaaaggctacagcaaacaagtagagctaatatatctatatattgattgatggttgtaagccgctttacaaagcaggtgcccaatgaaagaaactgctgatggtatgcaagactaatgcttcaatttacgcttctagaataatggtatcttaggaatcgagctgcaacaagtatatctagtgaaaaacttatgagtgctgctacataacgctgcgcggttatgtatgaaaagtttctaggctggttgtggtatcaacagatgcttctgcacatcacacttctttgacttgaacctacaagtactacacaacttgagcaattgcctcaatctcgaccctcatgccttccaacgccagttcagacaccccaacacatgtcagcacgggcttatgatccggcatccacttccgaagattttcaaccaggaagccagtagcctgttcgttttttatctcagtggtaaaaatgcggactcggtacacttgagaccagcccttgccgcctgcgtccttcagtgctaagtcgacattggcaaatgcttgctctgtctctcttgataggtcggagtgaacctggagtgtctcggggtcccagccgcctatatctctgagtcaattgcgggctagtatattacatggagatacaacataccttggccagatatttcgattcgatcaccgatacgtacagcttggttatatgatagagcctcgcgcatgtgctctccgaatcctttgtaactgaagtactgaagatgggacatagtgccagtaattagatttaaggtatagaaaagccaaatgatgcttgatttgctgttcatgacaacatagtgctccttacttatagtcggtcccaagaccgccaaggaaacgctgcttacttgatttgtaatacaacgctgagattagttagttttctggttcatgggtgtactctggatgaatcatagctctatagcaacgtccaaggtgtcatcaaaacacccatatggaagaatactgcccagtagcttccatcatccccggcttggcagtaatctcactaggagattggactta

SEQ ID NO: 8923 - DNA, 1084 bp, Emericella nidulans
aagctgagttgtttagttgattactaccagtgcagacgtgtaggaagcttacccatgctgtgcaaggtcccagatgaaggacttaagagatgcctcatcaaagccttgacccatccagttgaatgaagggctgaggttgtagacgagtttcttgccaggtagggcagcccgtacttcgcctgcgagcttcgcagatttttcaacgttggggtcaccagttacgacccagaggaggtcagcgtaagggccaaactcctttgcgcgtttggttgcagctgggaaaccggctcgatagtgatagaaaccttccctagtgcgggggatgtcgcaggaccaaacaaccggggtcttggtgtagtcgttggccaactcccgtcgacgggtgatggacaggtctggattctccttgacacgctttttgtatgcgtcacgagcggcttgaggagcaccttcggcctccaggtgcgcatcgacagctgtcggaggttagatatacctggaggtgctgaggttgatatacgtaccctcatcaaatgtcactagcttgtgccttttaacccagtccagttcaaaggcatcaatctccgaaggagcggctccctccctctccatggcttgcagggtctctgcgagaggttccgactcttcggtgactccgagaatgaattcgtggtctcgcacatcaatggcgctgctaaggagcttgccactctcggagtcagtccgagcaataacaaggttctcaacacccatcatatcccactggaatcgcgtcgcaacaaggcggttgatgtgctctccgatcggaaccaagactttacccgccagatggccgcacttctttccgccgtgcatctggtcctcaaagtgaacagctgcggcaccgttctcagcgaaaagcttggccagcttcaggactgcggtcaagccaccgtgtcttggaacgttagtagagacaagctaagctctagatgatcaacctacccggtgtcaccgtctgcaataatcggtcgcatatagtcaatgtaaggagtagactttcgctgctcaggggtcatcttccgccgcgcatcccagtgtttgc

SEQ ID NO: 8924 - DNA, 860 bp, Emericella nidulans
gagttctttgattttgttgtcgattgcctgcatgaagatctcaacgtaaattggcagcggacacagcttaggcccctgactttcgaggaggaaatgcagcgggaaaggatgccagtggccaaggtctccaagatagaatgggatcggtattgtcaccgagaggaatcatttatctcatcgttgtttgcggggcaacatgcaagccggcttcggtgtacaacttgcaagcgaacatcaaccacatatgaagctttctacagtatcagtgtggagatcccggcatccggaaagggcgatatctaccaatgcctccgtagctactgccaggaggaaatgttaagcggcgacgaggtctggaagtgtccctattgcaaatgtgagcgtgtcgcgaccaaacaaatcattatcactcgcgcacctcagatcctggtggttcatttcaaacgcttctctgcctccaagacacagagtgcccgtaaaatcccacccccatcgactttcaccttcacggtcttcgcatggacgacttcgtcttctcgcagcctaagcagacatccaacggcgatggccccagttcaggtccacaggatccaacttccgccacagaaccaccctttacatacgacgcatacggtgttttacgccatttgggctcgtccatggggagcgggcattatatatcactagtgcgtgatgcgtcacgtcaatgctggcgcaaatttgatgacggccgcgcaacagattttataccgcgtgatctgcctttcaaagaccggttgcagaacgaacaagcgtataaagagttctacgagcgcgttccagcgaaatagcgtcactccttttcgcggtcattcccatac

SEQ ID NO: 8925 - DNA, 511 bp, Emericella nidulans
acgaacttgccgttctttacgttcgcgaaaggcgcgttggctggaaaatcactagttagcacccaataaagtccggtaacttgtaatgttaagaggaggcagtagagagtacatacgcagcccgattctgcgctttgcgcttactctgcgccggcgtaattccgattccgtccttgtccttctcctcgctgctactgcgcacagcaagaaactcgtcgtgaccctcgatagaacccggataatgactgccagcgatatgttcgccgctcgagacggagtgtttcgtgtacgattctggcggagactgaggggggggtcctctctactctttgcgatctcttcgacttatacattctgtttatttctcttatatatcatatcttcatctacgtatcttcatcttctttcttttataatcttttactttctcatcaatatctcttctacttttttcttttaattaaatcttctttctccattcgtcctttcataacatgtatcatcttatctg

SEQ ID NO: 8926 - DNA, 535 bp, Emericella nidulans
cgtgggaccggccagtgggatagcccattactccgttcagtctagagtcgcagtcgggaatcagaatccagacggatcgatggcccaagcactaggaatcttgattcctgaatcctggattctgagccactgtttgaccattctttggtgacggctccaccgtttcccaagggacaatcagaatcttatgtcttttttattgcatattgtgcgggtcttggaatgatttgatcgtctgccgatgcaagcgaaaagaaatatcgaccgaggtgcagctgattcgtgatatggaccgagccatgcaggtgtagacggagtacacctgtcctaccaggaccgccatccctgtccgatatcccatgcatcatgcgagcctcagaatcggggcatcgcgatgtgaagaaagttctactcagaatacccttgaatagccgatgcgaattgtattttgtctgagacttgctcttgtcttaaggtgtccaatgtcctggctgaaatctgggatctgatttgatcgaggaattagggacgaggg

SEQ ID NO: 8927 - DNA, 527 bp, Emericella nidulans
agtgatgccaaggccctcatgatgcccgtggtgccgctcgacattttaaagttgagggatgctctgctgcagtagggctccgcttgcgaggacgcactcagagctgcagagctagcgtcattacagcccgataggcacagcgctggcgttataacccttcccaagacatggtctcttgcgtttacctcccgcgaagtgatgatatttggccgccgtggcttggaagaccgagagtcctacacgcatgtgcacattgggacgccaccatgccttcagtatgagcgatatctgccgacgaagcgcacggcatagctagagcttgttatcacccccgtctgaccgaggatactgacccttcatctatgatgaacgccccatctcactaagaggtaatttgatgcaactgcggaatcccgctattagatgcatgacctccgggctcccatagatgctcaccccatacttttgtccaatagcgccctatctttttctctgcattttttagctgtgctaacgtgtggttttct

SEQ ID NO: 8928 - DNA, 899 bp, Emericella nidulans
aagcaacttttatgcggtctggtgttacaccgctatactcgaagttgagccactcaatgacagcgaatagaagtgagtattactataaatctatacatacagaccccgccgacgttttcaccgtgcggcttattacagcatcatatattaatatctcaatgactgatagactggctgagccgcggcgggaggcctcgtagtctcgtcaagctcaatagcttcatccaccacactccactgcacagacctgagaatctgcagcccactgctgctgggcccctcctcattatgtgcatcactgacgagtctcgcccggtcgccgccggcgtggctatgcttataactgtatgagaaattccggttcgtattcccctcggagtccgttgataccccagttcccgacttggatttgtacgctgaccgcgcataccgatctgtatacgatatcccgtccttgtcctcgtatactgcgacgatgaacttaaatgaagaggtgatttgacatacaatactgagtgaaaggtagatctctgttgtcgttgtggtgtacgcgccgaggagggtcgggtactgcgaggagagttggtgcttgaggtagtatagccggagggcggaaaggggaatcagtctatcaggggttgcgttagattatctgagcagatggagggggaaagacagcgcgaggtacttacacaatgcggcagcccagagccaggaagaccatgagcttcttcctcgaagctatctgcacagtgctgacggcccacccagagtacgctacgagcagcacttcagtcacaacgtcaagcgctgtcacggcttgccagtgagcgaactgcatcctggattagacctatcccaatagatagaagggaatataagaaaaagacgggggactc

SEQ ID NO: 8929 - DNA, 424 bp, Emericella nidulans
atggcattttccaaagagccgcgctgattttaggcgatgaaagaatcttctactgatacaccagataaatgccgcgctcatgtctggcgcttgggtgcacgattctcaatagtggccgcgagctggtgattagatgatccatatccagggtataatacctagccgctttacaagcggcgaactacagggctatgctgcggattgttcagccctcggttcctgacaaatagaagctaagttgcccaagcataatcactgagtaaccagaaatggggcaatgattacttgggagggaagctatctccaaattatagatagggcaccccctagatattggtagtgtaaccccgatgtgtttgaccccaggtcggcttctctcctgtctgggtgcggtgggtataagaaatctccaccagtccgaaca

SEQ ID NO: 8930 - DNA, 575 bp, Emericella nidulans
ctggcaacatgatgaaccaggacagcgcattatcctgtgaatatactgctaggctgaaggcagtctagaaagactcttactatcgagctcggcgtcttctccttcggaatccgtctggttacagataattgcagataattgccgtgtcttgccgacaaagattaggaacttaattgttgattaatcagaaattctaagcctcttgcctgatggactagtttacccacaactgagcttttttctagatttatattcagctaattattttcttgaagctttggtaaaatcacgctgtaagtgatagcttacggcgatcactagaggggtgtcaacaacgtcacccgttgcaagctactttcgaacttacgttagatcctccgatacaagatgtgattacgagccaggtatcgccgcgcgttctttgctactgtatggttgtttaccattatcctacactcagttgtataatgaaccaaggttggcagatgctctggccctgcgcaatcccaccgcggtcataaactacatacccacggccatgtagcgagcactgcggaggagaaaaagggattata

SEQ ID NO: 8931 - DNA, 1697 bp, Emericella nidulans
gctcgcgacacgcgtgacggagtggaatagaactgcccgtttgggttgaagtgcgatattcgggaacaccacaagatcaacagcttcatccatcatccgctttctaagaccttgcacctgataaccccacatccatcctcagcaacaaccaaatggggatatgtgcatggcggaaagtttccctgctccatcgcctttcgtccgcctaataactcatggtttgatcagacgtaactaaaagagtcttgacgagacgagcccacctagtaccgacgagccgaggcggagcagattatatcccgtcaaattgatggagagctacagaatgtatactctttctacgaagcaacaccgctgcctctatatacggttctttgtcgcacctccaaggacaaaggccccaagctagccgtgtaacaggcatataccagtcgcaggtcgacgttggaagcgaagtagaccgctcgtcatctacccctcttggtgagggctacccctcagatgtctgaaagagatatcttggcaatcagcgtaaagctctctcggcctgccgccacaatctgtagctcgacgagagttggttgccaatcccagcggcccttgaaccgcttctaatcagagcgaggatcccagctgcccttgtaaaatgatgtgcggggatcaggatccgattcggtgcgccatcgtcaatgcacagcctcaatttacctttatccgtgaggttgacaaagatcctttcctttggttcaaactgtatcacgatcaataatctcgttcaaatagtctgagctccgcatacagactcaacgatggtaaggagctatcattagtcggattgtttttgagtccgctttctcttgagactggcgcgataatccttctttccgtaacccgtgggccgtggttgagtgcgggataggagatgcagttactaattccccatacacaacgcaccaattcccccaaacccagggttggctctgaggcacaattttttgacaggacataccccccttccggagtcctagcagtgcggagcttcccggggaggaatcgcgtgccacctatattagtggtattgtccgttatttgtacctggaaagtggtggaagtagggattcaagatgagattattaatgtgtagaactgaggggcgccacttgtgaccggagtattgccgttcccactgctaaagactcgtggctgatggcccggttccatcaatcatactctgtaattcattcatatcagcgtatcacaccacctcactgacggcaaactgactgttatttgataagaattgaggaagagcaccgcgtcgatcattcctgttgctctgccacttttccatgtgtggcaccggggtcgacttcagctccgggaacgcagctgctggacggtattggtggacgttaccatactctttaaattgggaccgcctcggggtatgagcaagccaccagtttaaccaagttttaggactcaacaaggtcaggcgggaattatgggtaaggaaattaaaagggcccatcctgaggccttggagggaaaaactgctttttttttttttatttttgtccatttagggaccataggtggtatcaaccttcaaagcattatattgttgtttgattggttctattatccgctattatatattttgtttattattttcaaaagttataataaattattaa

SEQ ID NO: 8932 - DNA, 761 bp, Emericella nidulans
agattgctctgtgtagcatcctaaacgctgtaagttggatcagcccatccgcggccctctcctccatcgagtttctccgcacagccccattgcttttacacacactcctctccagcaacaacaatgtcacgtactcgctctccagccctccgacaatggagccctctggatcgctcaactctcctcttcacaacgcctggccgttcctcaattttactcaccatcggcgagcattcttcctgcaaacccaacaaccgcaatccttctctccctcgtcctcgacctttccacaccacttgcccccatagcgcacgcatccagcgccctctaccagaagaagaatcgatgcaagactctcccgcgcaaagcccgcatttccgggccgccagctcctcaatgattcccctaaagggcaaccgacgcaaaacgaggcagtcaatgcccgcctggaattcctcaaagtgcgcggactcagtctggcaagtgagatgctacacgacggggtcatcgataagtctgtcacaccggggaagttcaagcgcattgggacggccctgatcatgaatgcgagttccatatctccttccagggatgccatcaccggcattgccgaaggtatgtgatatgataatggcaccgttgctatctttgttcgccgccctacttgtctacctcgtactctgtaccttttttgctgattagtttttgacctgtaatctaggcgaaggagtacacgtggatgtcgtttatgatatcggccg

SEQ ID NO: 8933 - DNA, 1314 bp, Emericella nidulans
gcgctcgcacaaacttcgccacatgcccatcatcatgctgctcattaacaatcgcaaacaattccttccaggacatagtccccgttctctcccccctgtaggttctcacaaattcgaaatcaagctcgggtacaccgcagagagcataccacatcagatccagccggcccttccactcgactaaccttactctatcccgcatggaaatccagtcctgacgcccgagaatagagaagaagatactgcttgttacgcagtgcatgaagaaaaagtcaatctttggctcatacccgtccttcgtcctctgcgacgcaccagccaagtaagcacagaggtttagcatctcggcagtctttctcgcgagcgtttcctcggtgactttaaaccgcgacgcaatgtctattatttcatcagctgcattgacgagaatagactttctcatcttcatcgtcccaatgaggccctggacgcgtccggcttcgacaagtttgggtgtgtccctgattttctgtaaaaggttcacgagagtctctccctcttcgtttcgcccagcagctcgcttttcggccgtgaggaaaaagtaatcggtcccaaaagagtcgtgcgcggccgcctgcgccaatgcctcagcgatgatccccggctgttcgaactcgactccaagcccgagatgaataattgagtgaaaggcgccgtcgtacataagcgggaggatcttctcagcaatgggcgagcgcgagaagacgtactctatcacgacgtccttccatgagtctcgtcggtcgatctccgcttcgaagaaacgtaggaagtttgtatactggtcaatctgtgtaatttgggactcgaagtaggagttgtcagataacctttccacgatagaagggacgagaggcggcatggcgcgctgagtagggaggtcatcgtcgtaggcggtttggagttgctctggggttgcacccagcactagccgagtgagaaggttatggaccaggtggttgtggccgtttagattgcggaaaaagatgtgcagcgtgtcgtggttcttttgtaggaggtgatttgtcagagtgagagtctgggaggggggagtttgggcgtagatgttctggccgagtttggttgagagaatattgatcgaagaggacatttttgacgccgtattcgtgctttcttgttgacttggtatggtagatggttgggttttgctgactggtttaatgtcctgagcccaaagatatatactgcacagctagcttcggataacgagacctcgaagcccgatgaccgagcagccatattcacatattgtcg

SEQ ID NO: 8934 - DNA, 1024 bp, Emericella nidulans
gccgttcagaatacatctattgacaggaagtcggtttaataacaggggaactatacaccagagtaagtgacttctccaagaaccagtgcagtaaatcatcggtagccaggggggcttttatatgtagtcccacgaattagtcctgattaaggtcagttttgacgaccttgggcggtggttgtccgcttaagctggtccaaggcaaagaataactagtacaacaggaaaaacgaaagaagactaagttttaagcggcgcaaacgttgttagatggcgcaatattcgccggctgaacaacctattgttgaggaacttgttcgaattcgaaaaattgcgctaggacgatagccatggtcgacgcaagcgcgcggttggcgaaagtaacatcaggagtcgaatcctgccagcagttgacacggactatttgcctgttggtgctaggggcacccacggatctgagagtttcacagccaatcgacactgttggatacccataacagctccaatggagttagcttctcgcagaccatggcacatataattagcatattaaatcaattttgaggataggttgagggttgaagtctagcgtttatatagagtggggagaatgaaggagagtatcaggaaccttagtagtagtatgagggcccagtcagtggcgataattgctttgtcacgcgtgtttgatcggtttggttcctgcgcgctgcgatcaatgccgccagaaaaaagtcatgctcacagaccgctggtcggttgtcatcacctcatctgagactcctcgagtccctgcgcttgaagcctcttgaattggtcctcttactccaaaatctctcgctggctgcttatcgactttcggcgttccaaggaccctcaattatcgcccaaccgcgattcatccgcccacgttatgcctgtcgttccttcgattacctgaacaaccagcttgcatcgatcgccttgttgctagctccatgcgaacacctcagcttctacttgacattagggcgccgttacgaag

SEQ ID NO: 8935 - DNA, 1094 bp, Emericella nidulans
ggatggccggaagtgccgtccgcgcattttaaggagacatttgctagcagacacgcatagacggtgaagagattcggctcggtgtccgaaccacatggtacaatgctgtccatgcaggtgcaggtatacatcccgatcccctcccattgggatgtgggctgatctcgtccccgcctcttccacatcacaccatcccagctgccaagtatatattccctttccccgtatcgccaatcaaatagtcagctaaactacatgattttgcgactcatcgcgagaagcaaaatgtcgacctgcgcaatgccccagcccctcgcccacccatctggcatcatagtggttggcacaggtctcgcgggcctctccaccgcaacgcagttaacaacgcacaatgtcccggttatcctccttgagcgcgctgaacggccgggcgggaatagcatcaaagcgtcatcagggattaatggtgctgggaccaagttccagactgttcccgatagcgctgaggagttttatgacgatacggtgcgctcagccgggaaaccctttgcaacggctgcaaatgtagagagagaacgaagggaaagactcatccacactgttacaaggaactcaaagggtgcagtcgattggctttctgacgaaataggcgtggacctaagcaaagtcgcacaactgggtggacacagcaaaccgcggacgcatcggggagagaaggggaaaccgcctggggcggcaattattgggtcattattggacaaactaaagtccaatccattcgtggacatgcgtatgaaatcccgcgtgacaaaggtgctgaaggaggcgcaggaagtcgtcggcgttgagtacatcgatagcgacgagaagacccagagtctccggggacccgttatctttgcaagtggtggctttgcaggcgacgtgcgcggcatggtcgcgcagtatcgccctgacctggctgggttaccatcaacgaacgaagcagggaaggctcgcagccactcctgcttgagtcgagcggggttgattgatatgaccacattcaaattatccacgggctcctgatgccaaaacacgttgcggtgaaaagt

SEQ ID NO: 8936 - DNA, 985 bp, Emericella nidulans
tattctgctcaccgtgtgagcatagaaggacgatgcacaaggaggggaaggctacctttgctctcaccgaacgtgaaaatagacacgataagcccaattgaaccagggagaactactggcagtaccccccgagaatcaaatatgggacctaaccatcaaccttatcagcgctcttactccagtaatcaaacaatactgaacagtagaaatataggttcgttaccaatctgcgccgctccaaagtacaaaaagaacgcatacgtcccaaacacccaaccaatcttgctttctgagtattccaggagttggtgttttgatgtccaggcgtggaggacaccgaatgtattcaggaggcccattgaagggaccattgcacaccaggagcccagaacgacgagccaggctgacagaccgccgtcggggtatttttcatctccaattccattgtccgcctctgtctcctggatcctggagggggctttttggaggatagggggttgaagctgcgtgaaatggtcaccaactcctcctactgctcctgcctccaagaaagagagatattggcttgtatttgccattcgctgccgtggtagttcaattggtgaaaaacggtgtgaaggggatttggggctttgataagaatttgctaagtgggtgggtccggtctccaattcttgtggtagaaacttgaaattctccaatttgggcttctcgaacggaagcggatatcggatttcaatcaggtggtttagcacgatgggtataccccaatcggtcaatacgactaaaataaatgcattatcttgtcagaaatgttagctgagggtcgatgatctggattccgcatccatagcagaaggccatcgtcaactcccaaaccttccttacaatcttaggcctacgtagggatccgtaacagcagctggtactgatctctgatagattgttcgctataaaaccccacgcagacatagtacctccacca

SEQ ID NO: 8937 - DNA, 1227 bp, Emericella nidulans
actcacgcgtaggaactatatggttaccccttgccatcatatcttccacagcgcctgtcttgagagctggatgaagcttcgtctgcagtgccctatatgtcgcgagtctattcctcctgtttagaccagttattcgtctagtttagcattcattaatggtagattgtatactgatagatgtgatttggacctcttaacatataggatgatgtattaggaaaggctagatagaatcaaatatactttttacctccggaactactatgaattgatgggcataatatcgtctagacgctcttcaaccattcaggacactaaattaatcttactaccttgctttgtgacctcatttatactgaaactgaatggccaagcccacgatgggctcgagtttgtcgacttaccttcgtcggcggctcactggtgctacttgagcaaacctagagtaccccaaaaccattaccgcggcagccagccttgtgaactactatgtaaccttgaggaaatcattctaaatcagaactttgttaggaattccttgacgcagaactaagcggctgaaagtttacctagagcgcggaaaatggggctgcgcatttcatatcttagccacacattccgatctttatattcgacccggggcgatgaagccctacgtagttagctgagttcacctacataagcatacaaagagacgcctcatcttctcttgtgagcacataaagcaacaatcgtgaagcctttcgtatcctaatttcgctttatgttgaaccttcaagcgcacaccgccgatgagggttgggcttggtctaacgaggattccattacccgaacaagtacaaacgtccaatatatccctttcagggaatcaaaaacaacaagtagcagggacgatcagagcagctcgctcccatccaattctaagcctgatcgattcattccactaatacgtctaacaatcccgtgggcaaagacagtttactcctcatcaatagtggccttgtaagccttaaggtcgagcagcccatccacctcggaggcatcgctgacttcgatctcggcaatccatgcctcaccctccgggctctcgttgatgaatttggccttgtcactgaggacctcgttgcccttcgtcacagttccacacacgggagagagcacgtctgaagcagaaatgacggactcgacggcgccaacgggctcgccggcaccaacctcagatgctcg

SEQ ID NO: 8938 - DNA, 1320 bp, Emericella nidulans
cacgcatccccatcgtcggtatattgcttcctgaatacatcagaaatcagcttcgaagctccgagtttttcgtgtcttctttatcttcacatcagccaactatcaaaatgccgttaagcgtaattgttgttggcgcaggctcggcggattgggggccggtatagccctaaaccgggcagggcaccgcgtgcaggcaagtggctattgagccaaatatcctgcgatccgctcttggaagtcgtttgctaaacgcttgagcaggtatttgagaagtctggtttccttaacgaggtcggtgcggccattcacgtagcacccaatgccactcgtatcctgaaggcatggggatgcaagttggattggcttcaacctgttcactgcgagacattgcaaatctgggatgcgaaaggaaatcacatacgcacgcccatcgtaagttgcgtcggcgaattgttgatttggtcttgtaagatcatgaactgacgagtatggcaggttacgagggagcatcagcgtactctgaatgtgcatgatgaatgggtactgacccatagggtggatttgcacaatgtcctgcgtgccattgccgcccaagagattgacggccgcaaggtcaatatccgattatcgtcacccgtgttgtcggtggcaagtatcccagcttccctcggtttcttcccaagactttctgtctggccataagtgactaacacttggcgaatcatacaggatgcggaggcaggtgaggttgttctagaggatggcaccaaatacactgccgacctgatcgtaggcgctgacggcatccatgtaagcgtctcttgcgcgatgtactgtcacgcatgagactaatgctttttgattgactctttcagtctcgttcggtccacggcattgtgggagccgacaggggcagcgtgagtaccggacagaattgttaccgatttttggtacccgtccacaaaatgcgagataacccactcacggccgatctcctcgcgagaattggtctcaacggggttcatgtctttgcgacccaggaccggcgtcttgtgatgtacccttgccgcagaggcgagttactcaacgtgggtggaatcttcccgtctgcgtcgaagacgcaggccgagaatgatgccgtatggcacaacgcagggagtctcagccagctgctggaaacattccacgagtttggcgaggagctacaagaaatgtgccgcatggcagaggacgtgaagctgtggagtctggcatctcgtaatccggcgcgtattttctttcgcggcaagctcgctgtgattggcgatgccgcgcatccca

SEQ ID NO: 8939 - DNA, 1124 bp, Emericella nidulans
tcaaaccaattgactacttctatcccgagcgcgacctagtccccgagcagcttgtcagcgaagatattatttcacgtttagcagacaagtttgaggataaggttcgattatcacgagaggattacgacgccgtgaagcggacgttggataaggatacggctttccttgcgtcggcgaacattgtcgactattctctgttcttggtgcgctttcccgcttcatctaatcctgggcggattgggaggaagacacagtggcgtgtaggggtgtcttctgcggatgggaagtggaagtaccggagtgtgatcttagacttcttttgggccaagcatacgctgcatgcacaggcaatgacaggtgcggtgcaggcgtttaatataatcggccggcagggtccaatgagcattacaaccacggcagaggaatatcgcgaaaaattcttgaccatggtggatgagatgatggaggtatatgcgccgcaagattaatgactataacgaatttgttatttagctttttttttctgacaatctctatacaatagttctaataattatcaagcgagatacttaatcaaaacactttggacatttcccatttcccgtactagcataacagtgtcgttatatgtgatgacatggtcgcgtcttgggttggcgccgattatcgtacctctatccgttccaatgctatacctttttcaaggcttctgcaatcggatacgcatgtttagcatatactgccataaatagtgatgatgtgagcttaaaagcagaagacctggtcctccagcttgctgacgggacgggccttggtgtagccgagagattcggtggccttcttcatggcgctgaccataggaggaggaccacagaggaggatcttgatgtcgctggcgggagcagggagacgttcctagaatagcaaatcagcgagtgcgacaggttaccagaaaggtaaactaaccttaatcatgtcaggagtcacgaagccaacaccaccagtccatccctcaggcgggttgttgagaacgtagtagatgcggaatccatcatcctcagcagcaagcttctcaagctcgtccttgagaaggatatcatcggggttgacgttggcgaagataa

SEQ ID NO: 8940 - DNA, 928 bp, Emericella nidulans
gaatgcatataaagaataaaaaaacaatccggtatacgaaacgacaacagagtcctagaatagaaaaagaccacaacgaatagcaatgtcctcaacgcacaattacacccactcctactccaactcccaatatcactcgcaatcctactccgcccgtcattcgatggtcccctctggcagctcatcatccatgtccgccgccaaaagtcgccaatacgcccagctggagtcaaaactcgccgaactgaacgcgaatcttgcaaacacgaagagtttactggagattacagctgtacaggcgcgagatatgcggtttcttggtgggtatgtgggtgcgctttttatgggcgctgccaatgtgcttggtgaagagggagttaaaaaggcggggcaggcggagcaggcgcagcagcgggagggtagtgaggacaggtagagcggatggttatctactattgactggattggtagaggtagagggaagtgagtatgaatgtagagaggtgcagaggggatgagtttagggtggtgaagtaagattttactgcccttttatttgtctattggatgggttatatatctctaactattatttaggtctttgcaggaaccagctcagctcaattctccacgacaaatcctccaccgaggatgatcgccggctcttcgatgttatggtgctcgtaactatacgcttgtcagcatgcgctttgcaccgcactttccacgcgacaagcacaaatagtgtgcgttgggcgtgtcactcttacggtcgcacgtacctcaatgtgcctacaccaccagcctccagaatcagcgccgtctccgttaacggtcggcccgtccagcgcatcgcaaacgcacggaggatgtgcccgtgcgcaacgataagcacgtcgccgctctccttattaccctcgaaacacgg

SEQ ID NO: 8941 - DNA, 296 bp, Emericella nidulans
tcccaccagttgaagagaggcaatgcaccttgatcccaatttgcgccgatactcctggaataaataacatcgcttttgctgcacatttggcctggcagtaatgatgagcacccactggaactcgtccagcgcagtccttaccgcgcaaatataccggtcctcaagccaatgcattgggttcccatcccgtcagccaccaacgcctttgcgacttgtggctacgtcggtatgggaaatgaagccggtagttgactcttcagcacgtcctgtgaccctttaccctgaagcaaacagag

SEQ ID NO: 8942 - DNA, 1813 bp, Emericella nidulans
ttcactgccatagacgatgatggatgatgcgtcgccagggtctatcgcagaaaatattccgtaggataggaaatatccagaacataaaggaaagaggaagaagaaaagaagaaacaaacgacgtgggatacgtaggctgcataagcccaataagtactgtgactgactggacggttaatgctctggtaagcagcaggcatcggcccagtcaggcctttttcctcatcaaccatcaatccaacggctgggtcgggaaggcatggttggaacagcaactaaaggctggaccggcagccaatggaacgaggaggtttcaaggcacaaactactgaaggctgcagaagcaggaggaggggaaaaagaaacgaggctagagtgaggagtatgacggagacgatgggtcatggcatcatagcgcagccccagtcttgatctcttgatcgataagcggctccgttagactatttctattgaagtactcctcacactcctcaaagaataacagagaatactgctaatggagtacaaactaaagacctattatttacctatctatttaaccatatccttgttgacttctgtaacagatcctactttcttttttgttttaattaaatgtaaagtccatctaacacccgacgctttaccgtccccgacggatccgacgagccagacccagcccatccattcctccaccaagaaaatattgttagtagatgcacagatttttaccgcacagacgagtcgggaaccaaagaccaaagggctgaatcataatattattgatgaacaaggcgtctttcccagtccgatttcctgcccgcccaggcaaccctacaaggggcatccatccatccagcctctcattatcgaatgtatcaagtcgcgaaatgtgatacctcagtcagtcgcctcagcccagcctcttgcacccgcaaatcagctagcctctggcttgtctcttctagctttgtcccaagaaaaaggaaaaaacgagaagaagatgatgaagaaatagagggaatcaaaataacaatcaacaatgattcttcgttctttcctttctcgtatgcaagtaattgattctctagattcgcttcccacagtgatcttgatcgtcgcctaatatcccttcaggccgaaaggcaatctggactcctactcgaaccggcaagattggcagcgggacgaccgggcaataataacttttagtctaccctggagtacagtgatctggctttggtcctgaccctgcagacttttatcggaaatgaaagacccctgctgtgcctcgccgtaggctggagacggtggaccagtgtgcctgaagggtgctagtgtccccaccatatcagtacatatacttgcatcgaggatctgttaattatctgcatgtcgatttgttgttgagacctcttcacctatttttttattttttatttattttttttctttcactctttttaggaagtagttcacttccttggccgtttgttctcgcaatatattcccgatccttggacccttcatatggtagatcagtactccgtactgtccagtagtcacttcgatctggattgctcaaatctgctagcctgcgcatcacccgtctcaggcatcatttaatgaattgggaggtgtgatctatctaattcagctgccgggtgattcgaccatgtgttgtgcgctacgagcccgctacgagccccgtccatactatatgcaaaggctcggcctgcttagggggtccggcggcgagatcgtgaggttgaagcgttcctctctaaagacacgaggcaatatacggaaagtt

SEQ ID NO: 8943 - DNA, 1121 bp, Emericella nidulans
tcgaagagaaaaacgtctggcgtaccttgatgatgtgaagagccttgtcaaccgaggcctttgtgtcaaaggagaagcgggcgtcgacctcagtcgagacctttccgggaataatgtcgaggatcttcttgccaaactcgaccaggaggtagtcgagggtggcgtcaacctggtcgtccacagaaccgccctgcttcttacccttctcaacggcggcgtcgatcaggctggcgtactcgggcttcttggaggcagccaggatgagagaagggttggtggtggcatcctggggcttgtacttgtcgatggtggcgaagtcaccggagtcgcaaacgacaacctatattgaatcgaaatcgttagcaatggcgactcctcgtagatgtcgaattcagtaacccagagaggggtagcttacggtgccagttgccttgagctgttcaagagaagaagacatggcgaatatggtataaagagatgaacaaagatcaatctagttcaaagcaatagatggaggaagaataggagaagaggaagattccgatggaacgatagttcttaaatgaacctaaattgaagagacgtggcggcgatggatgtttttgcggttcaccttgaagtcacccagacattggtggggctcgagtggctaatgacgctatcagggagttccggtccggaggggtaaagccatgactaaggctttgatattattatgattgttatggctggaaaggcataacaaaacatttgcacgccaacccgtctaggcgattctttgataatgtttttatgctgaaaattgatctcatcccctccaatctactcaccgaatacctactcgtgcccttcatcagggtctctcgacaccacacccatatttaatttgttcatagatctccccggagctatggtctactctcttcccaacacggcccagagtgctccggcaacgtacagccgatccacttcaccccgtctcccacctgtacttccacacattcagcgatccagggcctgttttattcaccgaatcaccggaagcaggagccgtgacaggctctggtggtgcatcgcgtgattaggctcatctccacatggcgcattttacgggctcgtat

SEQ ID NO: 8944 - DNA, 1520 bp, Emericella nidulans
aaggatcaagcggaccaccacagcgccatgttcagaaattgttacagagcatctccatatcatactcctcttcaccgttgccgacgagttgttcccagtcaagtttctggctgcaattgaaggatatctggacttggcttgggattatgtcgtccccacgaaattcgatgcatgaccgatcgcatacatcatgattttgtagtggagacgcttggcttgatggagatgcgaagtcctctgcagggtcaggatccatatcgagcatttcctggtttgggtttatttcactgcggtcgccgaatgatagtggtactgatgatgtgcgtgtatagggcggcgttggagtcagcttatctatcggtaccgagcactcggtatggaaatcttcaagaatcattattgagtgggattcttcctcagctttctcagcatcaatatcaagataaagttcgttgtcgtttgagcagatatccgattggaaatctaggtcgttattagcgtcaacgggaccattgccgatatataccagttcttctgtcattgtttcagacaagagagtctcatcccaggctctatcattcccgtctgtaccgagcatgtgatctgagcagggcgtcgagtgtttcagggtaggggagctatagagtcgcttctgcgcgacagcccataaccgcgttttgatcatacttcttgtgctatcaccgcctgtagatgctggggagcgcaggtccgaggcaaatactgtctcgcctacggcgagcttgtcccgaagaatctggtcattgctgcgcttcaacattgaagccaaggattttgcgatggatggcattaatcgtgaccgatgatcgattgcctaagccaagaaagatgttgcaggattcaccttatattaatccgacactaacccacctcgcgatatacgagcttgaatatcaagggcgcaactctagataagctcctgaagacgtcgggccctgcccggttctttctgcgcctcaagtgagattttccaagatcattggtttcgtcccttttggaacagacgcgaaccctatgaagaccttttggggtcgagggttagaaaatcacaccttccctaattccctcaagatttcagggcccgtgtgttctctctacagtttatttattcggctgttgccctgttacccctactatcccagcatttacttgattggctcgaaaccccctgtgcccttaggaccgccatatgtattacctccgccccagggtctacctccctttatcgggaaatggccaaccttaattggaaccactcactttccataaatttatccagaattattggttggccacatattgataaatctaccaccacccgccctataaacgccttttagttactctctttactcctaccactacggccacatcgctttctcaccatcgtccatgacctgttgacattgtacttccatatatactccgccttctgtacgtacacttattattcattaataccaccggacgacatcagttcc

SEQ ID NO: 8945 - DNA, 1121 bp, Emericella nidulans
taccttctagacagcttcctagtgctggtcgtgaaaattataaaacacagtttattatagtttattgcatcaaattatgtccctttatatttttgttttaatgtatatatatatttgctttaccgagctcacacttattctacctatcttactgcaattccggtctcaccatttgaacacaacgaccagcatcaggaagtgtccggttgtggtcaaggtgtagatcacttgcagcccggtgccaaataagaagtgacgtcaaactccccattacccttgagcatgacgcagatatgagtatgcagtccatggcacttactcaaatccctgccaccggctaaaccttccagaactcgtgtataggcattgcagaacgcaccccgtccttgcgccctcatccaatttgtcagaccagtcgcgacagcctgatcattcatttgtgccttgcgaatggggatgtaaaacttgatatcaggaagggaggcgccaggggcgatgtcgaagtagtattggtaaccagcgacgaaggcgggccgttgattcgccatgtcggaggattcagctaggtcctgcacagttggggacaagacctgctctgggaaggggatatcggcatcgtcgggaagatcaggcgggaagggcatgatggctttaacaagttcgtggattgcgcggagcttcgactccagagtcacggtcgataggcggccgcccagggttagaacttcgcggatcgagttatagcttgtccggggcgtggcgaagtataatttgagtcgggaagagcacgggatgatgttgtcaacggccagcatgaaagggctcaggtgcggcccttccgggctgttgttcaaaaactcggtcacggcatcaagggcacaactcggtccgagggctgcaatggctgagtggtaatctgacaagggggcgaatccttgctgtccgagcttccgcgggctcatatacgtcttggtcgtgatgccattgcggccgaattcgaagcaaaccaacatggtggagcggaggggcatccccgtttcgctctcggattcctttatgtacttgagcttgtcatgatcatagaatgtagagaggaagtggctagcccaggacacatctag

SEQ ID NO: 8946 - DNA, 1236 bp, Emericella nidulans
aggagtcttgttgcgcatataccacagctccggggtgggggtgaggccgaaactgaccccacggcccctgctagatacaagggcctcttcctcggggtacaggaaccgctggatggtgcgatggtccatgactctctcctcatcatcggtcgggccctctttctcggccttcggccagcggaacccatacagcatggagtggcgctcgcagcgagggcactctctccgggttagataggagttttgttgcacgaaccaagcgttgcaagtgtggcagtctacccagcgggcatacgagtgcgctagtagttttggcgttttggcgtaatctgcaggaactcgattcagttttgactccggctcaatggtcaaatagaccctcttggttctgggttttctaggtttcttcacgtgctccagagcttctgatccgtcttctaacttggtagaacttgagatatcgcttacacagctatcagcgcgcaccgtagtgtctaattgtgccgttacagtagtggtgggttcgcaagaaggttccacctcaagtttgatatcagtttcagggattgtcgtagataaaggcgcctcggccgctattgaactttctgccggcgccgcagttgttaccgcagatttggttggcctcgtattgagtgatacggcttcatcgaacactgaagttgcagcagtggatgccgatgatcgctgtgattcttgaggggttatggaggtaagagattcagaatcggtccccgaagattccacattatctccggctgaactgctctttccggaatcgccggcctcttgcgccgacaaggccagattcgacgatggaacacgaggctcggactcaattgagatagcaatatcttcggtaagagacaactgagaccgcagtttggaaccacgtggtgtgaactttccccgcttcctaggagttgaagagggggagctgtccgaatcgatatctgattgggccttgcgtttcctcggcgtaaggtggtcttcactagcctttggttctggcgtagacggtttgctttgtggcccaggagctaggttctgtgaccatccgttgcggggaacgcgttcacaactgaggcatagacattcgcagttgtcaatcccaaaatagtcttcaccgtacgaaaccgtaatttcctcgccgatatagatgtctcgagtggcgacgacctgcatcccttccgaacctcgagtcaccagacgcccgtt

SEQ ID NO: 8947 - DNA, 900 bp, Emericella nidulans
ggaacgggctggtaccgaggtttgactgcttatagtgaggtatactggcacgcttggcctaagcaaacgtatcattgatggcagtgtgaatttggtaggcgcgtacaattactcacagcatacaagtcggaggcaaataacgtaccacctagtgagcgtaaggagagatctaactcacatcaatggggacgcgctcactgtctgcttgccaatggctagacctcgctggggagatgaactaatgaatgggcctaatcgcgaatagagggaggttgcttattgagggctgtttcatttgctaggttactgactcgctgttcttggtcgattttgttgagactagcggtattaagtcactgaaaggcggttttaccgtgatccacaaaatcaagggataactcatgaaataacatttctaccaaaagccggccaaaggacaggtactctaaaagggcccagtgctggatttttcaatattttcatcccttgacgggtttcaaaattcgggcttatagtaaaggggtgaaccctgcagaattataagaacccagttttacccggaaggtgctttccgtttcttacaaccctccctaaagtaactgcctctttttcctggtagggggtctttcatttctggcgaagaaaaagtggtgaggatttttaaatggttgggagaaccctttatattccttcttaaagtaatttgttttaaacggagacatattcccttaaaccctacatttcaaagggttagtagtaaaacttaggttattttcatagaaattttatctttatcacttttttaatattatttattccatctttattgtataatataatatactaacctatctaaaatttatatattattttcttttctaaaaatcactctacaattta

SEQ ID NO: 8948 - DNA, 428 bp, Emericella nidulans
cgaggtctgcctccttcgacctcagccagtacaacagagtcaccggctagactctcgctctcaaccctgcacaacatttgtgccaaagacacaacgcacgtcgcggcacgtaaattcgtagtaacagctagccatccccttccatcgtataatctccctcaatgtttaaataggccgtctttaggataaagagcaatactttcaacatgtcccgctactaacgacctcccatgccatggaccatgtgtcaatttttctcactattttcgccccgtctagtagacctgtactctgatattcaatccaacgagactagacccctcgatgcactcagcccatggtcatctcattcctgctcttgaaaggatatcattcggactgggtccagatctactcatcagtccataagtcgacagattccggtataa

SEQ ID NO: 8949 - DNA, 956 bp, Emericella nidulans
  unsure (1)..(956): unsure at all n locations
gtcggcccgcttggtggcatcgcgaactttaccaccgtgcctggagccacggccacgcagacggatctgtatgccaccgagacggcttccagaccgactcctgtggccgagggaacaacgactaagtgtggcaaatactatcttgtgcagccagtgaatgcccnctgcttcccctcgaacatccagacctccttcggacaagacagaatgtgttaacgcgcaatgcagggcgactactgcgagataattgcactcactcaaacagtctcgctggagatgttcctagccatgaacccccagatcgacgacgcatgcagcaacctgctctccggcttcaactactgcgtacagccgacgcgcaactgggctgcgaccacgacctcgcctgttataccgccgccaacatccactccgccgggcacgacgacggagtgttatgaatggtacgtcatccagtcaggagactactgtggtaaagtgcaggaccagttcggtatcacttttgcgcagtttcaggcctggaacccggccctcgcggatgactgctctaacctccttctcgatgtggcgtactgtgtcaacggtgctgttccgtcggcccctgcagcagcagcagcatctcgccggaccctggacgccagggcagagggatgcgtgtatgccgaagggtgtaagtctgacaggccggtgcgaggcttatccggttttgtgaggccgcgcggtcctgtccagactcaaatgccggaagttggtggcggcgtggctataggttggcctggggtgaactcgcctaagctacggcagcagatggggttgggggtttgattgggaatctgagaactggaatggggagttacgggctgtgcggctgccctagtaagagacgaagtagttagatatgtagtgatcagtttgttcgttgtggcttccgttgcaccagactagttcctgcctgt

SEQ ID NO: 8950 - DNA, 127 bp, Emericella nidulans
tgaagtgagggaggagaatggatcagtagactatgatagttgacagatacttttgggcaaacgtgtaagactccctcagcgtcatggctgacttcatgagcactcttgatttaggtggtgtccttcc

SEQ ID NO: 8951 - DNA, 500 bp, Emericella nidulans
aaaggtcatcatcattcccatcttggattatggacgagggcaggaacctcgtctcgcgagcctctattcgggcaagcatgtcgtttagacgcaggtcaaccgctccactgaggattagcgcaccaacagactttagagtggtagcagggacaagctcaactctgccgactcgtgccctctcaacagccccagctcaaaggccgtaccgtcccctagagctgagtttccaagacccagcaaacaggctacctgaactcccccgcttcagtgacttcaacttcgacttcggacttgacaacgaccaaccacaggcagcagctatcgctcggccgccgaaagcattctcctttatgacggatgcttcctatcaaagtcgaccacaaacgttcatctctcatactcgccagccgtcgtcctcattcagtgtgcctcgaaagcccgtggggtctgggtctcgtcggtcgtcacttgcgactctcgaattgctcatggagaggaag

SEQ ID NO: 8952 - DNA, 942 bp, Emericella nidulans
gagtcggcttcaacatcagcaaagtccagatggtacggtgatgacagttcgttgaagtccacagcagttattagacgcccggtggtagaattgtggaaggccatccatccactaactctgtcagtcgtctgaagccttgatcgtgatttgtagaagatggatcatctagtgagcagatgtccttgatgatatctcgtgctttcagtaacggccgaacggcggggtgaaccaacggaagactacttgtcatggagtcaatgagcagactgtaccgcggaagacgttggacaggctccatgagtaatgagcgcagtttctgttccccggtttcatacacgcgtttggagaaactagaattcttgtccctcatgaacaggttcaacgtctgagtgaaggcgttatgagcacgcatatagtctccgtagggctgtgagaacttgggaaaccactcaagaagcgcattggcaaaagcaacagcgccgattgcgtctcgttcttcgtccactgttcgttgcgagaccgaagacgacatctcagtatcttcagtgatatcggcaattgcatccctttccgtttcctccaggacactgcgaatgacttccaaaaaacccatgttgacatcataaatctcgttaaggcacggagggaacagagtagccaaatcagactcgttgggactggtacttgagggcccctttccctgtgctcttgcgcggaattcctctgccacctcgcacacaagagaataaagcttgctcacgtatctttcctccgtatccacaacttcacacattgtcaagcgtagagactgcttctgactctgagagaaaaacttagatcgactgacattggttggttgcgacggggctcgcttcagcctggatgttggcaaaaacatcggcgctccagccgtcgtatgagaggtgaatatgtccataacga

SEQ ID NO: 8953 - DNA, 900 bp, Emericella nidulans
tctccagaaaggacgtatatactgatccttggccccattccatacccgatgataaataaacttgaggccaagcgcacaatcgggagaagggcaattgagcacctgcatgaatctttgaattcttccagagaatatagaagtggtcacagttaccatgaaagtgagaagaccaatctgtattacaatatttgtcagcttagtagctcttgtcactgatacccaggtaaagtttcccacgtggtcacagcgtgttggagctcttcaccatcaggaattaaagccactttcagccggaagataagatgcaggcgccaagtatcaactaggtactgccgcagccgctcttacgccgacaggccacatgaccctctgggaccttctgggtcgacaccgacgttaatgccgctacactcaataaggaaggtttctcggccgtagcggcccacttggtgccacggagccgatcaagcaaagtaccggatcaaagttgtttggagttgcagcacgattgttagagtgctccaggggtaactagtagagccatgtatacgaacaactgaggacaaagctgggtagcgtgctcaaaaagtaacagtctagagttgtaaaacctcgtagggtattcgtctcgaaacaagccctcgggtcttatcacttcttaacatgacgactccagtcaacagtgtatgaacataacggacagtgtttaaccttctcaaaggataggggtcgactttcccagaactctgtaagctccaagactggcaccactgggataacgatatgttgtcataattattttacgatcttggctatgtacaaggttcagcgacgcctgaggttccctcgggtttttgcttgaaattgtcattcttcaagtcatcgatatgtccaaagacg

SEQ ID NO: 8954 - DNA, 137 bp, Emericella nidulans
atctatctctccaatatatcaccttcttctttatattggttagtgttatttactgtttcattgtatgttcgtctccgagccatgctccttctagaagatgccaacttggatcttcaatatgagttatccggtgtcat

SEQ ID NO: 8955 - DNA, 1293 bp, Emericella nidulans
tataagcgtgtcgaatccgattcgcctaactttcccgcatgcagcagcatctgtatctcgcatcgcacaacatcacaagaacaatttggttcactgggccatttgtatctctattgtattgaacagtgacagtcgtcaaagactagtatgcaaagtcagaagcgctaaaaaatcataaacatctatctctatcaaaatctgaaacaaacatgcctatcaatcaaattccagaagccaagtaccaacctattattagaaagttttatttaacttcaagataactattgtagttatataattctacttagaaaatactagcttaaggcttgccttaatagaacgtgcttgctggaaggtggcttgggcaattcatagcaaaccttggatgaagagcgtctacatcagaagaacagtttcaagatgacatggatttagtgaaggttgagatcccttcctggctcataaatataccagaaaacaaaatcgtgtaccttcatcatcccatttcaacaatccccaacgacgcattgtacgacggcagaacggccggatctctctccgcagcgatctgcatgggtgccttcagtctaaagggctctgaggcaccctgtacagtgagctgaaaaccaaggctatacactctcgtaatcaggcaagaatgaaatgttggaataaaacttttgtccttgggcagcgtcaccggtaccagcagtgtccccgtatagctgccagtctggtccttggtccagcgtactgcggcgaagaaggaatcgacgagagcgggagctcggcgtcgcgaaaattgaccgggcggttaaagaagtctctctttctaggaacagggtgggcggtgctgtctagctttgtggtgtatatcgttgttgccgtgatgtgggcgcggagggatttgagctggggaggtggaatagttgagtcactactcgaaggcgagtatacgaggaacagccgtactgctttgctgatcaagctgattgggtctcgtaaaggatggtaaaagcagtcgggctgttctaatgtaatggctagccggccgatcaccggggacttggatttggaactaccgcaatggatggcctgttcatgatttagactgtactcattgctgagaccgtccatgggcagtaaatccggaagaggcaaatcgccaacagccggcttgattcgcactttcacccccttttcttctatcatctgcagggctccaaaagccggatcaagtcgctcaagcttggcattgatggcgtatatctccctgcatgcaaccagcgcaag

SEQ ID NO: 8956 - DNA, 1596 bp, Emericella nidulans
atcatctggactttggtttgatcttcttcccatcggccccattttagacggcggaatccttcctgtttggaaattacggcgactgtcttcggtatgaccgagtcaacgtccgtttcctgagtaaatggaatattgacgatttcagtgacgattcgagacatgacacaaatggattatctgcttctgttactgcgtgatgtttggtgttgaagaatgataagttggttattatgcggggtatttgcaaagggcattgcggcggtggagtgggctgcccactttttcccacaagatacctagacatccaattgagctgatcagaaaatcttcaagcaaagtcgtcatctgcttttaaaagatgcccggagtatctgacggtttggcgctgactctccctggggtctcctcgttgaagtgaggaagcgtgtgctaaagggtccttgttagggctagtacagtgtagatatatattcccaactgcacctgaaggttagcttgaaaccaagcagatttctgaagtctcgcttctagtgagtcctgataaccatctgcggtcctctagtgctgaagatggttgcttacaagggtaccaatggctgttctgatactactacgcataacatacatatatactgtgaaaacctgcaggatcttactaaaaacaggtagtgtggcttggccttcgctcaatataccaaacattaataatcttaataacgcaattcttagagtttcagcaacattatagcctatactgcatactctcgtgctctataataggcttgctgagcatgagtcaaagagttccgactcccgaccggatagctcctaaactggactatagcagttcttctgcaaaaggccaagctcatgtcactgtgctctatttggcttggcggctcctcttttcttcatgggtgagtcaggttgcctagattaatagcaggacggccttcaaggctgttttctctgcgtctctttcttccaatctgctgaggctatctttcccatcatggaccttgtccttactcagaggccgggtatccgcaaccactcactttctttggatattcaagttacaccaccaggaaatcagaatcaatcgtctgcttcaacgttcgcctcgtatgcaacgggcgaaaatattgagggagtcatctcgatcacgtcacagcgcgatctcggtttcgactatctacatatcgcgtttgttggtaagttttcaaaaagaatggagattttcagatggctaagacagaacaggagaggaaagtacaaccatccccagttgcactcccgacaaggcacagcatcggtttctaaagcttgttcaatatattgacgactcgagtcttccgagtcccaaggtctttaaagctgggcgtaaatatgagttctcgttcagtttcgaagtcccagactatcttccttcatcttcctgccgccattccgccaaccccctagtcaaggcggctcatctccacccgcctccaagctgcggcgatgccagtatagctgggtttggcggtaaactgcgaaatgaaaatgcgccggcagcatgcaaggtcatatactccatcaatgcgaagcttcccg

SEQ ID NO: 8957 - DNA, 1176 bp, Emericella nidulans
acagcttaggcaagacgataagaaagttaataaaaagtggcaaaattgacgtggttatctcgcaagtctgaatccgactcttgagccagccactcttaagccctatcctcgggtgctcagcctagcccgaaatataccatgaccgcgcaaatcgaagactagatcctaccctccaggcctactattctcagaatgaagcgagtagatctaataccattctcgggatctcggcgcgttagcgtacaccagtttggcctatacaaaatgcatgtatgccgattgccggtactcgggaacccgacgtgacactgataccgatgttgatggggacccgcacctcagaaccaagaggatagagctgatacgacggtgatagtgacgaaggataaaacactcgagaggaaagtggatgttgttcggtctgttccagactctgctgagcacccaaaaagccacgatctgcatcatttgccaagttaggattcaggaacccgagaagaacccgccaaatgcaaccttcccgccttttctggctgccggtgaccgggagatttgataacgaaatcctgccttccagcccaacatcaaaatcttgacccaagaccaacttggccaaggataaggagttgaggccagccggcgggcctcgaaaaacctgaacgccaagtggagtttacggatgagtccgtcgcaggaatccgataagcgcgggtaaatagccctatccactcatttcgcgtttcttttctttttcctactaggaagcggctctctttatcgcaatcgcataattttgggagttgtgactggcgggcttgactggcgggctcagctggcgggctcagctgcaaacccgaaactgaattttcaaatgcccaccacgatttatcactcagagcactagtctcaaaaatctccagcgagtgggttcggcattgcattcctcatagagacgccgcgcctgcagagcctgagttatttcttgccggtgctggtgaggtgagtgaaagttcggcatgccgagcgcgaccggcaatccgtgctccggaggcgatctagacccggttcgtcttgcgtacgatttttgcatggatgtgggacagatgctgcaggttttgagcttgggcgttgatatcgtaatgttatgcgtgtcttatatgctgcgcctgcagcctg

SEQ ID NO: 8958 - DNA, 331 bp, Emericella nidulans
gtaagtagtgtacaaacgtctttcgtaagtctgggtttgggtttggggatagggttagtaccggtatggaagcagtgggggaaatttaaagttttgggcttggagcacgatggatgaaggtgaaagtaagggggtattttctaggaagtttaagggtgtcagcttttactttgatctctcctcttcaggatcgtcttctcgaaccccgagtggcaagcctggagcccatgttgtaggtaagagctctgaagatgggactctggaacttggagggctaggatttgcagatagaagcccgactgatggcaggcagaacttgaaagacaatgtg

SEQ ID NO: 8959 - DNA, 1063 bp, Emericella nidulans
ctctcgttcctgtttttgcgttccgcttcttcatttgctggcagaaggaccgagaccagccgtagtatgtctcgccttcaaggatgtcaccggtaatttcgtcgcgaattactgtctgaccgagctcgtcaatgtccacaatttcgccgtccttttgttgggggcagcccgggttatagatccgatctacatctgcgaggaacgccttcagtgctgttacgagcttctcatctgcgggaccagccaagaactgcagcggcttgatcatgtccggccggagagggacagttgagtttgggatgatatgggggatgagattcccggcaggaaggtcgtagtacggggtcgacggatcaccatgggtggacggcattacatacggtgcgtctcgatgcttgcgattcggctctgtactttctgtgccgggtgtagccgacgatgtaatcggtccagacacagcagaattggcgacgacctctcggagctttcccacgtagtcggctccaaagtatccatgctcctgccatatacccaataactcacctagccgcctgtgatgtttcgggttcttctcgcgatcgtagcacgcggcataactcaacaattccaccatatgcggctgcaacgatccactcagtgtcgagaacgccgcgctcgacgaattatgatatttcgtgtgatggaacaggtcgttgagcaggtacagcatgtgcagtcttttcctcttgaccgacggggtttgcgcttgggccacttgtttgtcttgcgtctccttctgtttcccgtctgtagcggaactgttgtccagagatcccgataatgcaacaaaatacttcgccaacaaagtcatccgattcgacgacgcgaccacatagttcaggagccatgacttgcatctctattcgtgtcgagcagcagatttagtacttatttcgcgggatcggcgggcagggcacgcagagcagagcagatcaaacctggatgtttgcgggtgagcagtgcgacagtgctcggtcgagagtagtatgcagagtggtgatctcgcacgggagacggacgttgg

SEQ ID NO: 8960 - DNA, 1230 bp, Emericella nidulans
cctcccatctagcaatacacatatctattttagattcacaatggcaaggttcttctgagtctgcacgaattttaaattttttttttttcttttatttttacttcaccaaaaaatggcaaagaagctctcctgcccaataacacaacgcctacggatctccattatggggaagagaatatccctgcttctcttcacctacctttctgacatgcggtagcctcatattgcctcgaggctgcagatctaattctccctttgtctgcagtatatgtgacgggggagtatcacttgatacaacaaactttttgtcaatgaacgagaagaatgggccaacagaaggaagagcgatggtttgggcatctagattagagtttcagcagtcggataatcgcgttaatgatgagcaagcgagcgagtcagtatgcgacctaagtaaccaagcgtatggctgctatctgcaaacaactgatttgtagtcctcaatggccctggaataaacgaactccctctcaggaacatgccacaatttccgccctggctattaccgcaccctgtccttttagaccaaacgggacacgtttagctggtgcggtcaagcaaatgaaccgcggaaatacggcattctgtaggtaaattcttcgcaccatataagcacaaagaggaagggcgccgggctggagaggaacccgagcggatgcgggaaatgatgtttatactcctgactccgatggcctaccacaagcagataaactgcgtgtatacccgccatgattgcgtctacattgccaaaggacgtgggcgggtgtgtacaagttcaggcgctgtaagatcaaataataagcaatggctcattaccaattagggtctgtttagataaataggattgtatgctctatttacgcactctaacaaaaataagcaacggtgtccgtagaaggcataccaccttcgtcagtcatctttactaagaaaagaaaacaaaatgatgcaaagaaagccgttatgccgttagttgagaaggaacctcgtatagaattaaatttagtagatcagaaaacgccccgtttttgtttacgcagtagcaaagctccttgatatcagtttgtttgccttggagggcaagaggcacgataccactgacgtgcatttcaggcccgtatacgtgcatgttgaggccgagttcttcaccgacagccttgatgttcttgagaccgcctggtagttgggacc

SEQ ID NO: 8961 - DNA, 1324 bp, Emericella nidulans
cccagcaaagctaaataatactcccttcttattcctctcaaagcgcaagcatatcgaagactacatcaaagaaccaattgatcgaagcaacaccagaattcggacttccaaccctcccagcgatcaccgacgccgtaaatgactacttcagcaacctcaacgccatgctcgagcttctcttcaaccgctttcgcacgaagcctctaatactcctttgcccaagtctccgcctaccgctggacaaaggtcattctaaccgtcatcggctacatcctcattcgcccctacatcgaagccttctttaagaaaatgcacgagcgcgatcgcaagaagcagcaggaaaaggagcgcgcggagagaaagaaggcccgcgctaaggtctcacctaatgcgctgagaggcggtgctactgagggcgagggtaaggtgttgggagaggttgagaatacggacgacgaggtggatgatgccgagaatgaagaaaacgctgaggactttgcgactgcgagtggagtgccggagtggggtaagaatgccagaaagagggctaaaaagcatgcgaagaagctggagaaggaggctgaagagacgaagggtcccaagttgacagaggagcagatcaaggagcttttggactggagtgagtcggaggatgagaagaaggcttaatggaggaattctgggccctctctccctaatcttattcaagcggagtggtcttaagttcgttctgctttcgagacttgcatgttttacattttaatccctgtaccttgtaatatttagacttcatatcttcattactcataatgtatggacggcctctcgctttaaaggtctgccattattcttgatcttagattcaaaaccttcaatgggctggcttgctagggggacctcgaaggccctcaaactcgcccctgctcactattcatggctgcgatgtgagcccgactatggccaggagcagcatggccgcagtctattacactgcggtcaaatgcaaacgaaaccggagcaaatatttcagttacgccctgcctacgctacaagctcaactcagagcttactggactctataaatattcaagcccataagatcatcttatacatcatgtcgtaaataagctaaaatatcctatacccatgtgatatccatagtaccgagaaggcaaatcaaacccaagaggaagccgagttgcgtaatacgtctaatgcaatctcctgaacgcttcaacaatcgccctgacctcctgtaagctgctccccactatatcaacaatctctttttgcacggccggctcacaggtcaaaaaccgttcgt

SEQ ID NO: 8962 - DNA, 726 bp, Emericella nidulans
gcgaaccgtgcctcaatcaatcccacgtataccccaaccatgcccggtttcgcctcagggaacgatgacgccatatcgggaaggtaaggactgatggagttgaaagccgtctgctcgcacagcgcgatcaatgccagaaccatgatttgcttcttggggaggggcgactgtgacgtcgattcatcaatagagacatgatggtgccgtgagtcttcacccgacgaggcggactggccggagttcggtctgccgcgggactttggcgggggcgtatcaaaagtatgatagtgtagcgtcgacgagcgtcgcctctgaatgggctcctggtctggcgacttcattttttcgtttcaaaataatatagtcgaactgacgtcgattgcgaacaacggttgccgctgcgctagaacagtatctactccagcagtccgtttgtcgcggggctaaccgaggtcaggcggtcgaacgaggaaaactgcgttataaatggttggttataatgtcgtattcaatcctcattgtcggttttaatcatagaagacagaagttgtgggcgaagatgaccgtgggcagaggcaccgacaggcacgcgagcttgatttcgacccgtcaaatgaggctgacgatgacataagcaagtccatacagtcacgtgaaacgctccatggcggtttcaaggaattaatggcgatgaagagtgttttaggtataagtgcctgagaatta

SEQ ID NO: 8963 - DNA, 645 bp, Emericella nidulans
gatttctctttcctgcggaagaggggcatggagagatggagggcccggttaggggcaggaaggagggggattagatatgtgaggaggtgaagatgaaagagtcgccgagttcaaaataccaatactaataataccgagtacgaacagtgggggaacaccaagtgggacaacaacggtgattgggcgcaaacacgaggctgtgcgaagaagaagaattattgtctgcctcgaaggcgacgagagtgtgcggtggcatattattagcaggacgatctagtagtgatagtgggcagctgagctgaggaggggaaatgacggcgtagaggctaagagagggccagtgctaataataggccgagtaagaaccgggacaagatagagctaagtatatcaataaagaacccgtccggccgctatccaacgcgctgcgaccgttaaacacctagttcgatgagatctacgcctgacaggtttaacaaaccccgtgcgtcttgcctgtcctgccctgcagcgagtgcgtttcattcttgtagtgtggatgcgtgtgctttgcccgatgcgacttggttgtatgcgagcgaacgtgtctgccagcgattagttggttccttccgttacgggagagttaagaaatatactgcgtat

SEQ ID NO: 8964 - DNA, 756 bp, Emericella nidulans
gagacagcagcatcatcatggggagatagcgccttctcctcctgctcaacggtcgccatatcgacttcgcccaggtgttttgaggagtcgaggtacttgtcgagggtatctggggggtggatggggtcgaattcttcggtcgcatctttgccggcgtacttgagaatgatcttctggccaccagggtgttcttaatcgtcaattgtcagtatatcgctgatgcactcgatggaattggtagaacatacctggcaaaaactcggtcacgtcataggcttttccgtgtacaatgacccagcaagagtccttggagttgtgcttggcgacatcagcgcccgttaacttgttattcgtcatattgagggagaccgaaaaagggaatgtgagaacaggaggaaggaaaggtacttcgttgataacagaagagaggacgatggataaataagaccagaaagtcggaggcgaagaattcctggttactgcgtgcggacgtggagctgatcaggcctcgggataaagcacagcgaatgagagggccagtgaagggggttagtcaagcgctgtccggggaaaactgcggccagcaaaggcggcgtggcggggaaccgagccaaccaatgtgtctcgcccggtctctcggccgattccaaaccgacctttgtttactccttgtctacgtgccggtgtattgctctttattttcggacgagacatcaacccaaaaggccgacagtctatacctagtatacttgaggt

SEQ ID NO: 8965 - DNA, 1265 bp, Emericella nidulans
ccttttattctttaatagagaacattccttgaaccgtcagcaggatgatacatgacctgaagaccgaactgcgcgtatcaccgtgtatgctgatgctgtctttgagcgccgactcagacgcccaaatccatcgggtctgtagtcctgcagatgagcccagcttgctggtggagaagacggtaacgagaagggtcatcctccaagcaggtgtagatattcagctgttaagccgcgccatgtctattcgagagacatggaaggtacgtgcagatactccatctcatttaccgagttcgtgctcctcattctccaagctcagataaccatcagtaactgaatatcagttggaggtgcaaggaaaagctcccgcaggcgtctaggtaactccagtacgaggagtctctgcattttgttttcctcttttctcgtttcttttcaggcgcaaagcatggtctgtctgcattacattctacttgctgtggacgttaaggggggtaagcttttgattccaaccgcaacctctcctgtcattcgctggcctggtgcgcttgcaacgcctactaggtagctatcagtggtaggtatcagcaacaaggaagtcgaacataaaataggaggtcgacctggatttgcgagcatggcttccaaaccgatgcagaaggtaaatctagagaacaagaagatctcacacatgtgcttcttgttagtgaaacatgtctcgtgtctctggttggctcacctctcgcgctcgaggggactgactcattccaaactgaggtcattgaaacagtacagacatacggggagaggtcgagagaggtgggtataatgtgatagtaccgaaggctgtgaaagatagcttggtaactgaagggttagatgtggttgaacgatactatgatggttggtgatgagagtaagggatgagatgtgggaacccctgggctgaggaaaagagtcgacgttcacaaaggcatgacatcgctttccgtactccccgccctgtgtacgattacgtagtaaacgggactggtcctgcaagcgggcttgctgcatgcatcgcctagtacccgctcgtactacgctcttatgcacggtctctagccctcatagtgagatgcagcaagatctccagaaagacaagtcttctttcccattcatatgagccacatacttatactggaaacagatgaagcgagtgaatgtattgcatttaaccccagacgccgtccacacgcaacctgatcctatagcagatagggtga

SEQ ID NO: 8966 - DNA, 1987 bp, Emericella nidulans
tggtaaatttgtgacctctccttttagttttacccaccgagggcgggtgtctgaacgctcttggatagatcacctgcgctcttgaaggtctacactcccagaaactgacccttcttcttgtcgtatagagcgagcacgatctatttccccaacaaaggattcctctccgatcctcgaccccgctcgactgagcatgtcgtccttgagtcaccgagccattgatcctccggaacagcttgagccgactacccctcgaaccccagtccatgatgcccacagcgtttcaaacacatttcgagacgacaaagtagcttcaacaggaagtagtccagcggggtcgagactggaagcaagcgaggttggagtctctccgaaagcttcgcccacgctacggagcagggccggaactttatcctggcagcagcgacctagttctcgagaccttagtggaaatcgtaccttcttttccacctcgccttcacgcgagactcgttggagggccatgtcaaatgcttcagccaccgaaaccggagcgttagctagccccctggcatcttcgtccccattgcgagagccgtcctctctgcgccagcctgaggtagacgacacgccagcgcaagaaacgcctttcaaggagggcaaagtcgaccaatctgaaaacacaaagacaaaggcccccgaagcgatggagcaaacggaatcagccaaggagaatggccaccgggacacaacagatgaacaatcaccgcctccgtcgagagctagctcaagctttgcagatagcagtctggggaaccggtacagtgtatcatctgtctcgacagccaccggtctcgggtctccgctgcccctgtctagcgcgcagaagttcgaacctccgaaacaggaaggagagtctgacagccatatggcgtttccggtctcaccacggcgactttcgccggagcgttcaacatctccaacaaaaggcctaggtggttttgttcaaagtgccatgctgcgacggtcagacagcgtgtcgaagcgatggagtgctcagctaccgtcagggcttagccggaacagttcgtttgccagcaatcgcaatagttttgctgccccgagcaacactgatctcaccgctacacccaaactgaaccgagaaggcacttctatatcgtccccacgacctagttcgagtcacagtgaggcgactatagtccgtcaagcaaaagccgaacaacgtcccgcaaccccccctgcctcaagtaggagtgagagtttaagcagaccccctctgactgtacatgctagatctagcagtattatgagtgtggaatcgcagggtgaaggcggatcacgtcctacgactcccgtttccaggacaatggatcagaggagatggagtcaaccaaatctacctggctggaaagtgccttgaatatttctgaatcccaagacataaacggcaaccgtcccagcagtccatctcatctttgaacaaagatcggcagtcaaggactagtgtggatctaggacgccggaatagctttaaggaagtcaatacagttggcctcatgcggactacgcctcttggcggccatgtgaaaaagcaaagcctctcggggattcccaatgtgctcaagactccggatcttagtcccactaaagaaaagccgctgaatgacgcaagtcttattaaagaggaaccgtcattggaacaggggcctctcccaatcgagacaactgtgcctggctcgccattaaagactgacggcgtcgagaccactttcgaaatgcccgaagctcctgaagcgcttaatgaagtatctgaggtacctgaagtcgccaaggattctgctgtgcctgaagcagctgagaaaagccctgatggtgatctgaagcataaaaatattccgcccgccttgtcaccaactcctaaggccaatactgatgttcctgtgctgtcccctcgtcagcccatccgcgacccattactggaccgtcc

SEQ ID NO: 8967 - DNA, 1856 bp, Emericella nidulans
gctttggcttatgggtgaaggcacagtaacaaagtcgggagaatcgaagaatctgtatctggaaagcgctcttggcggggtttgctgaaactcaagctggcgtcgaggatgaggtaacgagacgagaacaccttatattgccgacgtccatacattccactggcatgaaaagagcaatgacattgatcgaggggcttatgcaaaggcggctcaggggtgctgggtggatccgggaaaaaggcactagagtaactccgtacagtacactaccgatgagactcagattctcaagatgttttttggatcttgtgaaccatgcggggttaagacacttcgatgcgaccaacattaacctaatatattacatgaatcgaaatcacttagaagccaaggatgaagaatcatgaaagtatttgatgtgagcaatgcgggacacatgaacatattcaaaaccgcaggaggaattcaatactgaggtaaggagtcgactatacgggctgatggttatgttcaacctagcacaaagctatgagcttttcacttgactctcttgaaacgatcacgcccgccttttttatagatatcgatgctccgtcaatcctccgacaagcatatgcgttcatatatctattatcacgtactcaggaacactgcgaggcagagcacatctgtgtaagaaaagcatacgtctataggaccgaccaatgccactgactcatgattaatattattgattttgcctcaactaggaaagaacaaactactaagtatattagagaaggggccgtgcctatcttactgcatagcttaagcatgtccctccaagaaattagtgtccgggccagcacacagcaagaacacagtacctagatataatatccgctccaccttaggaagactattcctcgtcctcatcctcgtcacttgtggcttcaatgttctcccgcgaggggcgagccattgggagtccatcagtcgaatccttcttatcattgccaccggtgcttgtaccctggccgacgtatttcggccgagggattgatagacctttctcttgtaaaacaatctcaatttcaggcagtagagtcaccagggaggaaaattgatcgattggcagcgaaataccctgagtcggaatgttagtactgtaggtatgtttatctcagcagcatcaggcctttgaagaaaataccttctttccagggagctcttcaccatccttctcataatactctctaatattgaccattgttttacctcgaaacgaagatatagtgacgcggcgcattttggagatttcccaatagatgtctccgtttgagtcttcctttctggccacgagttctggacgggaattatcgaagccagcgacatctggagcattggttctggacttcttgctaagaggaggcttgtcgacaagagaatggtcaacgacttccgagacacgcttcctagactgggaagccatgatcgggcgaatgtcctaggaagtcaaaaacagagatacagaaaggaatcttgtatattccgtagctaaatcggcgcttattttcaggatgtattactttgacgatggaccaaactaggagggctaaagtcgatcagataaaagccagccacgtgattctgagcttgcagcccagatgggtcatcaatggagagttctgttgctgaaatcgcaatcaatgcacttgctcgctcctgcttgtattgagtatttcgtacgaaggaatactgagcgctaactaggcaccgcctttatctccgccccccctaggctatgttaggtctaaaatacgtaagggcgcgtgtcggcccacacacgctttcgctagcagtcgtagaaaatcaag

SEQ ID NO: 8968 - DNA, 1841 bp, Emericella nidulans
aaagaaaatagatggaagagataagtagaaagaggaataatagacttaggtgagtcaaaaccaaagtgcatagaaaaaagagaggtgcaaaagaggtaaacgatgataggtattcgacagaaaggtatgaaagaggagaaagagcgaacggaaaaagaaggaaaaagagtatgaagagaaaagggggtagagcaacaaatacaacaaggaggaagggcttgaagaaggagtaagtcagaagagtaaacgaaatacaatatattaaacgaaaaagggagatgggggtgcccataagcgagaaaagcctcacactagcaagggggtaagttaggtaaaaccattggccgattggaggtaatcacagggcattgggggggctccagaaatcaacggcccggatagagcgaatatgttacagtttttggtcggacacatattagcggagggcttcgccaaattcccagcccacttcgtccgggacgccaaggaggtctagacatatttagcctttgctggccagaatctaggtaaaggtgcaaagcgtccccttataagcaagcccatctgagataatatgcacctcagcaccgtgctcatacacctgggcaatattcaggcagagaccgttcagatggtttaacgccagctcctcgcccaaatcaggaagaatgcccatggacttttgctggctgtttggcgacttgaagggaaacgctggtagggccatgcgcacgggctcatccttctctatgcaggccgtgatagtcggtagaaacgtctcgaggtcttcccagagtgtaccgttgtccttgcagttgacgctgtaactctgcaggatttgcatgatcttgacggctgtctccatgcagggtccgtctgtgctttctagaaatatgttaggattttcacgccgtgtgctgaagaggatcctcactctcggagccttcgacctcgttcttgaacttatcgacattctcagtatcgggactacggtagattggatcatcggatattcttcatgcgttaatgagcttcaaacatccgttattggaaccgaacctgactgcatttgtcacgtcttgctgctcagcaatgggggcattgtcattggcgtgcaccttgaaatcagaagacataatggaagaataggaatccaagcgttcaaagtcaaagagagaaattgtttggtattggcgatgggtttcgcaacacaacatttcggacccgtcgatatcgagatttatacaggcgtcataacagcgagctccataaaaaccggatcaatgcaaggtttctcactcagacgtaaagtttatccgctgggtaaaccgacgcggatgcggagaggcatccaggtgtctaccacgccactcagcccatgatgctgccgtctttacgccatgatcagcggcacgtactggcgccaaggttttctgttggacgagcaacctaccccagctctacgcgtgacatctttgctgatcgaagctaccgaattaaggccttcagctgcggacgactgaagccacatattacgtctgttatggtagatggagggcatggtattgcgaacgctggtatagcgatgaaccataggatcccttgcacagcgtcgggcgagatgaaactccccgcaatagatttgcagctgtgtagaaaatgaactatcgacggactattgtcgtgttgtatgcacatccaaggtccgttatgcgagtgcgcaatcattcctatattcgatcgactgttggatgtgtaaatccgtacacggctccagactctggccagcgaagatgctctacacatacagtgctctggcattgagactatgcatgttctgt

SEQ ID NO: 8969 - DNA, 998 bp, Emericella nidulans
tactgcggtggctggaggcacgaatatgatttttacccctgatgtacatactggcctggataaggggtttgttctttttcgaacaggcaactgcaaggcttttgacgatgcatcagatggctattgccgtgcggaaggagtcggtaccgtcttcatcaaacgtcttgaggatgcattagcagaaaatgatcctattctggccactatcctcgacatcaaaacaaaccactcggccatgtcggactcaatgacacggccgtttaagcctgcgcagattgacaacatgtcggctttattgagtacagccggaatcagcccgcttgaccttagctatatcgaaatgcacggtaccgggacgcaggtgggtgacgccgtcgaaatggagtcggttctgagtctctttgctccggacgagacatttcgaccccgagataaaccgttgtacgtgggatctgccaaagcgaacattggccatggagaaggagtttccggcgtcaccagtctcatcaaggtcctactgatgatgaaaaacgacaccattcctcctcactgtggcattaaaccgggaagccgaatcaaccggaactatccagaccttccagctcgcaatgtgcatattgcttttgagccaaaaccgtggcctcggacagatacacctcgacgtgtgctcatcaacaactttagtgccgctggagggaacaccgctgtcctggttgaggacgctcctgttcgtgatcccgtaactgcatcagatccccgaactagccacattgttactgtttctggccacgttgggaagtccctcaagctgaacttggagaaattgcgggatcatttggtgaagcggccggaaatcaatccttcggagctctcatatacgaccactgcccggcgatggcaccaccctcatcgggtgagtataacagcagctaacactatggaaatcttgcgatgagtgaaagcgcatgagcaagagggcatggagtcaaccgccccgc

SEQ ID NO: 8970 - DNA, 1357 bp, Emericella nidulans
gtttcgtttcgtcccagctgccctggaggccgtgagtgcgtgcgcgctgtacagaccaagacgcaatgacgagggctgattcagagaggcttatttggctttctctgtatagttttgcgtgtttctgtttgagattacgtggctgctttggctctgcggttccgacgacttcaaccgcacaatatgtgtgatcagttcgatgacgatctgacttagtgcggagagggctgcgcgagagttcccgtatgtgttggaaatctggatcgcgtgctcggagatctcaaggttttcgagttcgcgctggtttgctgatagaactgagatggcgttgaagagggctggggagaagactgagtgctccatggggatgtctggggctagaaggggatagaagacattgaagacgtagaaggggtcctctatgtcattcttgctggagttggggaagagctgtttctgctgctcgcgggcgaattggagagggctgcctggtggtgcgcggagactgacggtgcgatagtcgcatgggttgttggcgaggcagaagccgtaattcatcatcactgttttgttttggtcagctcatttgatgcgcataatgtacggttacacgtacgctgctcgttattgcgtgggccgtaattgttggcaatctcttcgtttacactaacgtcttccagtacgacaaagtcgacgttctgtagaccggcgcgccattcaactttagcgagtggccggtggttcaaaatgtcgatgaacggaaggagaacagaggtgttctcgggcatctcgtgctctggaattacgccagaaagcactttctctgagaacgcacgggagacaaatatcgtagacgcccagagatagagatcccttacacaaatgtcagtagactaacagaaatctttgagaagtttcctaccatgaatatctctctgcatcttgaaatccagactctcgaagctcattgctcgaactttcatacttctcccgcagaagagccacttttcgcttccgtgcctgcaacaagctcgtcccttccaaccattctagatcctcttcctcttcataataggggagcgttgtcagagagccaggctgaggaagtgtccgaatatacggatgccaaaagctctctggcccacgcagatactgcccaatcagaaaaaaaattgccacctcctcagagcctaccctttctatgaatgaagaagggaatttgacatcgtgagcggggaagtgtgcgtccccagcgtgaaaatctatggcgttgagatatgacatggtggtagcaacaggtgtcttgatgatatgtgtgttgccggacaccccaccctccttcacccggatatgggtg

SEQ ID NO: 8971 - DNA, 120 bp, Emericella nidulans
  unsure (1)..(120): unsure at all n locations
acagttaaccgaccgggtttgaatatgttgacattctgcagtangataccatcagatgtctgaccattccatgaatgcggtatttgtgtttcgaacgaagtgtacgagttgtgattgctc

SEQ ID NO: 8972 - DNA, 1211 bp, Emericella nidulans
cggtgtggataagcagcactgacatatgatactagtggtctacgtaagcaaggcagaacttcaatttcattttcactcatcacacaacacaacgcatggaccgtatgctgtgcaacacaccaacaaccaccggcggggtacaaaagacgccaggttgaaccttgagtagacacagtgcggcgcaggacatgaagtatacagcacgtacttaggccgccgcaaatattagtcctgcagcagctgggagggaagctggagtagacttgagccttgggtgcttacctttagtccgccggggatgaagactcgaccatcctgcataatgctgtatgacctgagaatgttgttacggtgttgtgcttgccagggaaggtagattggtgtatcaagcttactataatgaaattcgcattctgatgtcctgttccaatatttcacgtcctttttttttttttttttgcttttgtacagttacatccgtcttggacgtccttggttacaatcacgggctaagaaccatgctggattcttggctgtatataacctctaagataatcccagcagaagatcatcaccgcaagccctgtttcaaataccggcaacgagtgagatgccgggggataagatggtagaagtccgcatagaaaagtagaaggttcgacgtacatgatgcgcctgcagctggcctcagatctatcgatcccttgaattgtccagggaaattcccataaggacggcctccaatttctgcatacgggttctggcagcagcagaaccccgagtactgcatctgctaggcatttaggaccaggtagggaggcaggcagattcgattctaattttgactgccgtataaatctagcccttgtatggcatcctaagagttgtgattcagactgcgtttaacctgcatcattcgaccttcgaccctcgaccctcagggttctgcttctgtgctgctacgcgtagtccgccaggcatcataacggtaaactacgctgttagtattgttattgttattgttattgttgttgttgtgagccggaatagcgatgagttatgtaaggagtgggtcacatgatgcaagaaatggaggggtgaggttcatgcccatggcggccgttctcggatcggatcgccccgcagatggaaaatgccggaaacattgaccaagagtcaatgtagactgacagcattcttcggctatggaa

SEQ ID NO: 8973 - DNA, 252 bp, Emericella nidulans
  unsure (1)..(252): unsure at all n locations
ccctttgtgctctttgtaatgcagtcatgtgtccttcattaaagttccctaatctcgattcttatcatttggaatcctttttcgcgaggcagttatgcgaacgaacnggatcgcgtaaccccagaatcgcagntcggcagagcctccaatcagcggacgtatattcgcggtgcgcagtcctatgtcgacgtagctgtacgtggatagcaaagcgtcagcttgtggatctcggaagatgagtgcagataggac

SEQ ID NO: 8974 - DNA, 201 bp, Emericella nidulans
  unsure (1)..(201): unsure at all n locations
cccagtcagctacatcgagaccatggccagtacgacggcgaccgacatgcctcacgcaaagacactgaatgtccgggaccgacctaaggtggcaccggatgaatggagtcaacgcgacccatgggttgtgccaggccgcgactngcacatacatcaggacgcacaccagtccgcaggcagggataccaggcgcgcaaggcg

SEQ ID NO: 8975 - DNA, 531 bp, Emericella nidulans
aacaagcttttggaaaagacaccataaagtgcaaactaggcgatgatccccagccgaccttcccagctgtcttcctgctttacaccatctccacctttgcgacgcttctcatttctcttccgcctcttttcttctcgctcttttgaaagctgttcctccctttccttaagtcgttcacccaggtccatctgccacaccatccgttcctcttcctccctgacccgtttctggtgggcaagcatcctcaaccgctgccgcacatcctccactgtagcctttgccacctccccgctctgccccgtagcgatcaaatgctgcttgctgttcagatgctccaccaactgcaaattatccttgaacgtcagatcacagtccgagcagtagaatcccgcgcctcgaccacgcttgcccaccgcgtttgctgcggagacgattgtcgtctttccaaccatcgacgcgacatcgagccgttctttgcgggaggttgtagcttcaagcgaactgtagtcgacaggtgcgtgccattttttg

SEQ ID NO: 8976 - DNA, 813 bp, Emericella nidulans
cggtcatcgtcgcaaacatatggccattgcgcgaaacggaaagaccccttattgcttcatctgcccactgcagcgacggtcctagccgggaatgcgattctgagccattgctttgattcaggggccgagcctgctcttgatctgaggagtcctcatggataacatcgtctgcgtcgtccggtaatgggactggagttccagggccattgatcgcatagaccctcgggactccagttggccagtacatggctcgagagaagtggcacagttatgggaaaatgcggtggcaggtatggtcatcttcgacatatctaggcgcgttatactgccgggtagagggcatacaaaaccccagagcttccgaccataattaccatgagctctttcgactgatcaactgacgacctagatagctgatagctgaagctccctactccgctctcaccgcccactttggatagatcagcacacaatcacgtggaaaaagcaaacaaacagtgcaaaacagaaggctcgagattcgccgctaccaaaaatatccccgcatcaaaggccccccgctgcttctcgccagatatacaaacattctcgagctttgacagaaatattgtcaatctccatcatggtaaccacaattcagtctgtgtctaactctagcgtagtgcttgaagctaacaattaatcattgatttctaggcccctacagagtccaagaagcgcctcgcgtcggctataattgattttcttaacaccagcgtcaaggatggcacgctcacggcagatgacgccgaatctattgagattgccagtcat

SEQ ID NO: 8977 - DNA, 946 bp, Emericella nidulans
atgctcatggaaggtcacatcgtggatactggctggcgatgtatcttcaagctcgacatgatcagatactgtagtggacgccgcaaggtggctttgggtaggagacctgactcgactaatgaccacacgggctgatagtggggcccggctgaccgttctatcacggcaagctccgcctgagggtagcagccgagaacgtagggacacgtgcctgatggtgagactcggcggtcccggcgaccaaccaccgatagctctatgacatgaggggagaagaagtatcacgggacatgtgtgattgctgatatatgatggtgactggtgattgccggagatctcgtgattccatgacgcgccaaccttagcccccagtgtagaatagatttagccgtcgtaggtacacgagcaaataagcgatgtgtgcctgcacttttatgccacgggtttttgatttttgagacctatgggattaaaagggcctgtatgggcaaagaaaaagggcttttttgaagactagggaaatttcgtatcccttttttataacccccggtaggtttcccaattggctttaatttcgcctgataccggcccaatcaatttttttttattaaaacattggaaggttactttatgtccagtaattttccaagaaaagggtttcccttgtagggcgcccccatcaaaaaaaaggggggcattgcgccgcccaacccacattttgaaattcttccttagtgccaagcgtttaaatggtgttatatctggtaaaaaaatggtgggttcgtacaaaagttaaaggacacccctcttcactctaagagtataataaccccttcttctctattttcttaatattatttttcttcttatttattaatgattattatattttttttttttttcctccatattacagaggtatttatttttttctttttcgttttct

SEQ ID NO: 8978 - DNA, 217 bp, Emericella nidulans
gggcgagagtcttgctaagctgcttatgcttcttcaataccgcatgcgggtataataatagtgcggtccaaatcacaaataaggtatggcggtccgtcgtcgtgtacaaacaggacggcaacctcatggtacgcaacccaatccgtattatcatgtccgccctaggcggctcggacgtacatcgattctcggtctgtggcaggtcacacaccttaca

SEQ ID NO: 8979 - DNA, 850 bp, Emericella nidulans
  unsure (1)..(850): unsure at all n locations
gtcttgttcaatctgttacagcgcgagcgaggatccatagaacgccataaataggtgtgggacctatatcagacactcgattacccgaaaagggggaaggtcgatgcagcgagctcatctaaccgagggcgcttgcttgtcttgacactatggccaacgaaaacgtgctggagggctgtcctaccatagagagcgcacagccgcatgattttatccggcattgtaacggacacgcgcctgcagaggtcagttcagataaccattctaggtacacgcaggaagtgtttgtagagaaaaagggaataccagagtcgcatcccctggataacagctatgagccaagtggacaggacagtagagcaagaccccaggccgtccttaaatcaaaaggtcgtgggtcctcaaattcgatttcaaagctgttctggctgctgtgatttggcttttgatcaccggggaggttcttcaaatgttccgggcttttgggggaaccgggtaaataacaaaataaaacttctggttaaaaggggggggttctggcctaaatagacccttcacttgggccggttgatcggattgtgtaattggattcacgcggggactttggtccacccatggattttacacgttgccttggcggaaagcttgccatggcaaagggagctgccataccaaacctggctaaggaccatgccctttantggctctggacagaagcccgtaaggggtcccggttagtagggctagtagttttgcgggtcttggaataaaagaaggcctgtccctttccaatttagactggtaaaatgttaattttatctttttttggtntttattaatattttttata

SEQ ID NO: 8980 - DNA, 962 bp, Emericella nidulans
ataggctctttctaagaagacacgagaccttcgttggccttgattgaacatttgacaccgctgtgtccgtggtggcttggaagttgtcagcaatgcactagttggtataaccggggcactaacctgacgaagtctttcgatggcatgatgaccttcttccctgataacccacggaatattttcgtaatgacttggtggatgggctcttcgtagcgtggctccagtttgtctttgtagcgagtttcgagaagttccctatgcgtgattagtaaagtaccatttaaaaatagccgtgacaacgaactctgtcatgttaagctcgaggctgatctcttcatctaatttcagttgcattaccaggaaagggtagcgggtctgcccttgacggaggggaggctcaagaccaaggacaatgagagtgtgtgtatcgtcatttttggggagtagaaagaatttcttaatggaggaatattgaatcttgtagtcgtatgtctttccgcgcaatcggaaggaagattcgtacatatcgatgtcgaaccgacctctgagcagattattagtaccattcggagacaaagctgctgcataaaacatacctgggtgtaaggtggagaacatccaggaaagtagcaaatgtgtctccagccacatctccaatctctgccttttccatgagcaactcgtagaacagattggcagcattctgctcctcgccgttctcctcgccttctcctccgttcttctcgtccgcgttctcccctttaataccattctccgtcttgaccgcagttccgggaatgtagaaacgcatctcgactagttcatcgggcccagcggccgctttccgaccgcggttctttgtgctcccggacggtttggaaccattggggtcaacggaaagggagagttcgacagcaacctcgtttttccggcgaggtttgtgttggaaatttcggagtagg

SEQ ID NO: 8981 - DNA, 652 bp, Emericella nidulans
atacggcgcgagtttatcagagtagtgattaaaagatgaaattaagatccatctaaaggctattataaaatgaaattgggctgaaacagagccaccagttctcttgtcgcatgcattctgattcccagattccagttcctgacggtggagcggcggcggctgtgattggcaccgtctgagacatggtttgtttcgcgatagatgatgtgacacttttgtgacaatcctcccgactacactgaatacactacgtgcagactacacccgggcgtgactgaatattatgatactgtatagatttctgcccgacgacgtcttcatcctgttgcagggttggagttgctatggactctcagtcgcggcctactcagatcctgcgtatcaaggtttccactcttcctaggcacctccaagacagctcactgcagttctctgctgtgatgttcgtaaagcaggggtgcaggtcccatccagatcgatccagcctatgaagatcctggcgcgccgacgcttggggcacgctttattaggtataccgtatggagcctcagctctgggccctccacaagttttctccatactcaacttctcgctccaagggttcaactgggtactctttgttcgataaatctctttcagctcggtcaaaaca

SEQ ID NO: 8982 - DNA, 260 bp, Emericella nidulans
tatacgttaaattcctcgatgagattcgtaagcctcgccggttgttctggtatcgtcagatagagatgcagccctagtccggtccacagagccaggcagtacaccgtgaggatgtcgttgacgatcctaaagtaaacgaagagtgtattcggctcgaagtatccttcatggtggatacgcgtgggtgtaagattatgagtatgggcgaagtgggcactgattacgtcactagtatgatgtcggctaatggcctcgccaga

SEQ ID NO: 8983 - DNA, 1428 bp, Emericella nidulans
gcattagcctctgatctaaagtctgtcaatatcaggtcctcagaagccgaaaatcagggctaggagccgttattttctgtattgagtcatagagcccagaataacctcgtgctccagtactcgggcagcgctgaattatgttatacaagggatttcacggacctcacgtcagcgtgaagggatggtgctagtttaaaccctttacacttcgtttcctgcaaattaacggaaaggtgaggatctttgcctagtcaggattggacaattatcagcccggagtgtagctgttgaaaaggaggcctattttgcaagaggtctagcggtctatataaatataactatatacaaggatagcaacaaagcactatcgtcaatcgtcaattacagtttgaatcagagggtagggttctcgactaagcctggaaatgcctgctcttctccgccaccaacccagccaacgcagccagactggccgtctgtaacgctctgaagatggaaatatccgccgccgcctgcaatgcaagcatattcctcagctctaccgcaatcagcgagtcgaccccatagtgggccggcggcttgctgagatcgatctccgctatgggcgtcataaaaatgtccgcaagcttctctgcaatagccgctccgatgagcctcgctccctcttgcgggtcgttggtatctgcgagctgcgtggcgagcgaggcactggtgctttcgccgtcctgtcgtgccgagaccttagtgtgaggtcgcagcgttgcatagcgcgcatcacggccgagctgagagcggccattggggtcccaatgaggacccggggaggatgtgagaccgatgattatctgagaccggcctagtggatgtaaaatcgcagcgttgagggcacggagaacaataccctcgtcaagcatggcgaattcaccatccttgcgcaggcgctcggcgactctggggtctgtcgaaacgtagccaatgtcagaaatgggacctaggtcaatggctacaccgggcaggccctgagattggcgccatcgagccatagcgtcttcgtaggagccaccggcggcatagttgctttgcgatgcaatacctgcgacgcccgagacagacgacagcatgatgaagaagtcaagagagtccggttgcgaaaactcggtgtgcaggttccaggtgccgtacagcttgggactcaggccactgcgccagtcgtcgagtgtcatctgctcgaagatggcgtcgcgcagtaacatggcgccctggatgacgccgcgcactggaggaaagccgtcgtcttcacaggccctgagagccacggttagtgagctagcgagcgacacgtcgcagctcacgggcttgactcgacagcccatatgacgtagttcgttgatgaagaatgccccatcactattcttattctggccagat

SEQ ID NO: 8984 - DNA, 829 bp, Emericella nidulans
atgctgtttcttaccgctgagatctatattattgattccgtggctcaatattctgtctagggccagacttttagattggatcaccgcgagctatctaaatggacagtcgaatccacgggcgtcctgaacaggctggtgctcgccgcattcatgacgggggtgatccagctcgagaaaagcccctggcacccatgggacatgtagccggaagctgagggtcctaacgaccaccttaccttgactaagcgggatgtggaatggaaaaggcttcgggggcccatgtgaacttggagaacatcgtcgaccggacttgctcacaggaccttcacagggccctgcttcatgggcccccttcgggacaatgccaggtgatcgtgaataagtccgcaagaaaatctccgccagttttaatttgaagttggcctctttcacccttttccgcctgccaaaactctttattgtatccacactttctttagctcgcatgtggaaaaacggacctgagcgattattttagatttgggttgttgatgtccatctccccgaaagttttgtggataatgtgccggcattttttaagaaggggaattttggggtcttcatggcagggaatgaatcggtggtaccgtgggtgaaacggggtggtacccttggttgccttttttttcttgcccttttaaaaatctaaattcaactcctgggggaacccctgtaaccaaggttccttactctatgtagtaaagttatggccctgtattaaagaatctcggtatttcatataacttttgtgttcttgtgtctttcatatcagtcttttatattataatct

SEQ ID NO: 8985 - DNA, 1779 bp, Emericella nidulans
aggacgattctccgtaagagcggagagcaaagaaagaaagaaagacgaagagacccaaagccaggatactgtgagaactgtagggataagttcgacgactttgatgaggtacgttttccgtctctagactaagcaggcaaggagctgagtaggatacagcatataatgacaagaaaacaccgcaaatttgctgcgaacagtgccaattgggccgagctagactcattactgttccagctggaacgaccgctcaaggatgaatacgattatgtctagtatacccggctcttcgaatcgcatgatggctaccatgtatacagtgcatctcaacgccagcccaatcatgacctgcctttgccttccggtcccggtcaagattagccgtgattctgcgtgtttacagccaccagcggcatggtcgatgcgagcagcgtgagctttgatagattttgcatttgatggcctgcgttcgctgatatgcatttgctcttgtcggtgttttcttcgttgatttacctccacgtttattgcggtcgatttctaccatattccatgttctacggaacagtgtcatagcaaggtgttcttggatttttgttcttgctttataattccgttttccggactcatttgctcaaaactccgatgggttcgcaactcgaatatggcatagccatcaagatgcgactctgaacctgttgggcaatggctgaggattgggaggtgacacagaacttccaacatttgtgggatgctctgcatcgatccagcagcccttaatccaactgaccctacctcgcttacttcttcacatctcttgcattgccatcctccattggacaattgcagtcctcatacaccttaactcaatcattttctcttattctcttattattttcggtcatgggcggatgtttttctcggggttgcatgaagccgactacttggatcggtacgggcgggtgttgtattttattgtctttgagggggatgcctttatttttgcttctggggtcttatataagaacctctgatcccttttttttcaagtgtctatcttttcttctcggtagagtatttaacttgccttgtttattccctcttatctatagcgtggggagatcaggtcgagtgactgggcgatgggttgtgcagcatgtgcttagggagtaagcttgttggactacaatcagatagcggtttgaggggaatctaagactactctatttaattcgtgcctggccagtgttgaactgggttagtatttactaaaatgaactgtcaataaaaggcggagaaggaagagcctcggcctagattctcgggccggaacaagtggggtccggcgggacagccacgagagcggtaagtagagtcagccaatgatcaagcttacgcggagaagaggaggcagaatgaccacaagagcaaggacccccactcgattttctttcagatgctcttgtctacgctgcaattaccagcacgcgggctcattatatagacaccaatgcttgttgacatggagtcagatcttgtttcgcttgactcattctcagttgtactacctacttgttgtgtataggctcgcctacttcacaagtatacataccttcgccagtgacgccattcccaaagctggagcgcctcggctggtccggctccttcatctgtgatatccaacaacacccagtctaatcttgccaaaagatgactttcttaagaatagcgacaaagcgggccatatacctgcatcgtcctgctaatccggctcttcct

SEQ ID NO: 8986 - DNA, 1051 bp, Emericella nidulans
ccgtggtttgcttttcttttttctagcagagttcccaagcgtcaccggtgcttgtccacggaccataagaacgaaggatggaatagttcgtccgtcgatggggaaggagtgggaggttaaggttattctccgcatttcccaccgtataagggatagcttcatcaggtgggccgaccttgtctcgttgggatcgccaagcaagggttctgacggtatctaccgcctaccgtttatagattccaatagcgtcatcgatcagtatagcttcagaggtgaaagtagcaagcgagatcagagtgaatgcggtaaggaatatcgccaaaatgatctgcgcgagtccagcgacctagaacaatgacaccactagctaagtgagttctgcacgatgtgtggtcgagccaataatgccacccttactctgcctatgacgccaaacgcgtcaatacgtcactccgtggtcacctacaaaaacctgcccaagcgagatggtcttcaagatttttatatcatctcgtctagcctcaactaaggcttcatcaatccagtatcagcatctgctcataatagttaaccttgtcgaaacagtacgagatatcaagactgaacccgaacgatgaagctacaactagcctcctggctggtgtgtgctcttgcaaccgctgaggcgttggagcttccaactggttcagcaaagctggtgggcatctcgagactttccagtgcttaggctaaaccactaacactctccttagtctacaacaaatggcacgagactgagttggaacgctggcttgctgatcatggtactgacacatcctcctcattctattgcagaaagcttactgttgtctcagacattccatacccttcacccgctgaccgaaaagaactcgagaacgctgtgaagacaaactgggatctcaaggtccagaaacctcttggtcagctctcagatcactccggcgaccgctgggaacacaccaaagaatggatttttgatacgtaagtttctgaatgcaagtacatgcgatcttgctaactcagttagatg

SEQ ID NO: 8987 - DNA, 768 bp, Emericella nidulans
cagaaatatagcggccctcagcatgaaatcttaccctatgaaaatggcataaaagtcgaccagtgacgattataggacagtttgtcaaatttgaaaatcaataaatataaatatattatctatacagataagctctcggctactagtctcattctaccatctattcatccgagtccagggcaaagcgatccaagaacttgaacacggtcagaccctcctcgaggttgttggcaaagctctcgtccacggcatcggcaacgtacacgccctcgacggcggtgttgataccagcgttgtcgaaagcagtggagccgctgccaagagcagcgactggcttaccgaagcggaaagcatcaacgaggatttcgaggggacggccggcagggtagagggttgagctggagttggccgcggacttggcaccgaagagcttctccgctccaggggcaacaacgacggcgtcaaactgaatggcgtcagaggcagagtaggtctggttcacgccgttggagaagcgttcagcgacgacaatgacgtccaggttgtcgttggagagctcggccttcagagcagtagccgcgctgaaggattcctctgcgtcaacagaagcaagtacggcaatcttcaggccagccaagctctggagtcggtggccaaacgcaccgatgttggaggtcgtgttgtcgtggtagtaagtgttgtcgggctcgggagcatcaaaacaaatggccttggcaacgcgggtggcaaggtcgttcgagatgcgat

SEQ ID NO: 8988 - DNA, 1095 bp, Emericella nidulans
ctcccctgagataggtaactcatcaccgaactgaggtcccaagatgtatttatatactttgcaaagctcagtgatacaaataccttagtatggcgagtcatgccgctgaagatagactaacatccccgcaagatacaggtcaatttatcaattgataatagctgttgcgaagggtttattccttgatatcagaatctcctctcactacttccacaataattagagagatccaggccgtctaattaaagtacaatcatagggcctgactgcattcaaaaccccttttatctatataaaataaaggtcctaggacaagaaaataagcagaaaatagaaaggagaagacatgtatacttgacaatataatctgtcattcaacatgctccaccataatgcagtgactgcaagattaaaaggacatactgtcagaaaaatggcctaataagtaattatgtagctgatcaaatgattatgcataatttgataatatttatgcggggtggtcaaatcgctgttcggcctatccgttgctcggccatggattactttttagtaagcatgttttgtccacacccttagttatcacgtgcgccagtcaacctcggctgattgccgggcaatctggggaaccgaccggagcatagctggagactcgacttgatgccgacaacaagtacatgctgtttcaacacttctatcacgcgatgttaaaacgatgagctcgacgaactttgccgctgctcagcagcgcgttctcgaacgccgacggaaacgcgagaccgaagcccagagccgtctcgcagaacaacaacggacctctatcgtaaatcatcccgccgtgcaacgacttccttatccactaaatacagtgtcgcgatcaggactttcaatatgggatgcaatcaaaggccgcgaggggacgaggcctgcatttcgtgttggtcaggttgacgcggaactgttggacgaggagttacttggcctgctgaaggggcaagtcggagatgcgctcacatactttggggtaggcttctaattgatctctggcagccagttactgacttactagcacatctcgcgagactgtcccacgaa

SEQ ID NO: 8989 - DNA, 108 bp, Emericella nidulans
aacgcgatcggaatgaggaggggggacatgcacgtgtgaacgacgaagtgggtaagagaaacccagatatacaaaagaaacggctgagacaacttgcattcgccccaa

SEQ ID NO: 8990 - DNA, 611 bp, Emericella nidulans
atcttatacgacttgagggatgtcgacccaaccgtctttgctgccttcattccagacgatcttcccctgctagccgaatattggctcagactgatagacttgagtaagctgttggggtccgtagtgacactgagctacaaagcagttcgcccgagaccctcctctgaacaaatcaatgctcttgagacagagatcctccgttataagcctccagagcaaggcgctccgagctggagcagaaccactcggttttatctgcatcatctacaactccattacgagtgcgcaagcaacgttccttgaaccagagaacccagggccttctaacattctcagagcaatccttatcgttctctatcggccgtgtctgacggaaccttcggatgacctctcctctacaaaccagcagtggcaggaaagtatctggcacaaagctgactccgcagcctcccacacaaatgacattctcgaggccatggcccaagaaggcctactcgaatatgcgctgccaatgacgtgagccagtcagccgttatgcaggaagtttggcaaactgaccgacctcttagaccaccactcctcatccccgcaatgcaaatgcatcttctaaa

SEQ ID NO: 8991 - DNA, 122 bp, Emericella nidulans
ggaggtggcgcaaaaacgcgcaaccaactaaggattagtactgcggatggtgtgagggagagccggcagctacgcagggcaaggccgcaaagagtcaccaaaggtcacgcaagagccggcaa

SEQ ID NO: 8992 - DNA, 857 bp, Emericella nidulans
gttattccctttcctcgttgtaatgcccaagcatttaaacggcgttttgattttactttttcttacgttttcgtgtatttattggctagagcaggaattgggatgctccgaaggcctcaagtcgaagtgcaggtcgactggccggaatatgagctctagagcccctgtctctcatgtatttcagccgacttctttctggaatcaaaaagtgcaattctgcagttacatgctatgtgctccgtagtgggtaataaaacagtcagttctaccatagccaatcgacaccttattgcctaaggcggtgccagtggggtcacagcgtcccgtcatcagcgtgcaaagaaaaaaagtcaggtgccgacggcggggaaatctttggtttttcggagatccatccatctctccgcttgctcgacactgcatggttatatccaggtctttgcagctgctctagcatcactctattgcactcctccggctcttacttcacttggacgcgctctctttagtttccctcgccctctccgctttttcacccagtcatactcatatccatcatggcgacgaattctatcaagcttttgactggcaacagtcacccggaattggcaaatttggtggcagataggtgcggttgagccctttgcgtcctgatcatggatattgactaactggaacatctgcctcgcaggctcggtatcgaactgaccaagatcatggtcctgcagtactcgaaccaggaaacaagcgtgacaattggagagagtgtccgagatgaggacggtatgggccccttaccggctctccccttgttctgaggccttttttgggcaattgaaagttgactggcgtccctg

SEQ ID NO: 8993 - DNA, 167 bp, Emericella nidulans
aggaattttaccaagtaggacggactcaccactagctccattctaaaaagctatgcgaggcaacgcacgatgaaagcagggtcaaccgaagccggcgtacacatactggtttagcccggctgaggtggcagatagcatagtaggccagcaagtattgctacgacgtt

SEQ ID NO: 8994 - DNA, 1301 bp, Emericella nidulans
gctagcacactggtggaacgccgctctgagaacgtcacgggtaaccgagctgccagttcttgctcaacttgcgaccgatagccacttagttgccttcctcgccatcaatttattcaatgcggccgtggtattggcggtcatggcactgagcgatccattatcagacaccgctcaagtagtcaaacgtaccattacgcgcattttacgattgcaggatctcttgggaaggcgctcagccttgtcaaagcagagcacgacgatcttaaaaagggtggtcacgttgctccttcgtcgcgaatcggaagccatccttgccccaatcgcagagaatacccgagacgatgttcagcaatcatatcaaggatctgggcgtatgtcggtggaggatactctgcgactaccccttgacgtgacgttggaaccgaccaacacgcacattggacgccaagcctggccggatcttgctactgtcattcgcctgaatgaaagtttaacatcggttcaaaacggtaaacaccctgtcatgcttttacatccaatctagctatggagacactgatttggcatgtatttagtcgtaccttcgggaaatgatactctcccatctgattggtatgccggcagagacggtcaccttggcgacaccgtggcccaacccccaggacggactcatacctggccgccctcttgcgagaccgagtgggaaatagccaatattcagagcaatgatcagtttagtccgacccaggacaacagcggagaccaagggctgtattggctctgggacatgtcctggaacggggcgggtctttaagttagaggccaagcaatttcttgcactacagccggctactcgttctaggccacaagcgggctgaaactttattttaggcgaaagccctattaaactggtctatgataatgtggctctggccacgtgctcgtctacccctggtccgtaaatgacgcttttgactcctgcgcgactggcgacattatggaaagcctcctccgcctgggagaaagaaaattcgtgggtgacgagaccttcaagcctgatgcggtgggagctcacaagaccgatcgcggtcttataatctcctgggccatatcggaaactgcccttgaagacaatttctttgtcgcagatctggcctaccggcagggaaggatttgggcgccccaagcccacctgcacaaacgttcctccaggtgctaatgcgtgaatgccgctgttcaaacaaggttcagcaccggtggcatcgagaacgatgtctgcgcccagcgccaatcccgcgaag

SEQ ID NO: 8995 - DNA, 281 bp, Emericella nidulans
cgtactgtattgacctggggagtatgctggaccaatgctggtaggtcgaagtacccgaaggcaggaccgcttttgtacaataaaaaggcttcaacatcgacgtgtagctccttgatcttattacggtagtttgtagacagcgaatcttgaggtttcatcagaaggcttaacaagccatgagacttgagggcaggtatcgttggcaccgagtgatagagggctgctagcgcaggctctgtggaaaccgcggcatagcagcgcagatattcaatagccaaccc

SEQ ID NO: 8996 - DNA, 1781 bp, Emericella nidulans
cagctcggtcatcatggcgccaagtttcaacagcaagtccatcgagaactcctgggattccggaaagccgccgtgcgctcgcagaaagtctcgagctcgagagaggatgctagggtcaaaaacatccggtgccgcgacattttccatgatgcggaatggagtgtgcgtcccgggtcgtgccgtcgatgttgtgtgggcagagcggccatctcagctgctggactaataatcccactatttgcggcacggacaaaaggcgttgttgaacgggagatggcaggagatgtgagctggtcgagcattccaggcgcattatcccagcgtccagctatgcatgctgggcagcgaaattgaggattctcaattactgaatctgaagctggcagacaagagccgtggtaagatctgcagcatgtttggcagaagagcaaattgttgggccacgacattcagaacagatgacattatgtggttttccagagtctatgggttgatcagtttgagcgcgaagaaaattgaccatgagtacgcaccaagccatagtttatatagggggtggttctctgcctcagacggactaaagccaccgactgaggatactaatggtggttgagatggccaaatggaattgtgactgttcccaggactgctcgtaacagttgctcgagacaaagagcctggttctggtgtcgttctaagcattgtggtgtttgatttgctgagaggtgaagacggtggcggcaagagctgcgcccaaaggggaaggcctcgggggccggagtattattaatccgttaccgagtcatcgccggtcattctgccgaacttccggatccgtcgacgttcaacctgaaagtgaaacctggccatcgatcctggcccacaaaccaataatgctgccatctatcgactaggactgcagttgaccaactgcgaccagtaacccgtaacaatgcccggggtaccctccaacaaggcttgcgagcgctgtaaaaagagacatcttaaggtttgtgccacgctcttatcgctggatccgtgctgataacgtagtgtgacgaaacacggccgcactgccagcgctgtgcaaatgccggggtcgaatgcccgggatttgtgcaaacaagaaaattcatcgaccaaggcgccttaataaggcggcggtatgctccttaccaggaagctgggtccgatatacaccactgcagaaccgtgacgggtaagctttgcttgtccatcggttagcttatttgctaagatagcaggtcgcaaataatccacaaccagagtcgcttcacaatgaagctaccagcaccgggttggaaccccagggccaatctaaccctccagtgcctccagcgcctctagtgtacgaccgggaacaccgaccggcaattcgttcagaaacttcggttctggacagtgctcccttggctgaggcaagccagccgcctgctactaccatgtcggtcaatcgtacaggaggcgacgcggtattggggccaatgcgatggcaaggctctgatgcccgcgctcagcagccttcctgggctctaggcaatgccggcgctggcgctggcactggcacgtttcatgagcgctcgagacagtcctcgccccatgttaatccgtctagctcaaggactccgtcccagcgcggcgagcaagaggaatttcaggacatattctcggagctcatgaccgggacagagcatgagatatgcttcttgacaaggcattactgcgaagtgattgctgcgtggtaagtctgcaaaaaattt

SEQ ID NO: 8997 - DNA, 865 bp, Emericella nidulans
cgcggccgtttcggcgcacgatactgcgggctgctggtcctccggcgccaggcgttttccatgcgctgccctaagtctggcgtagtacgcttcactcgcgtcaccgtccgactctgatccgtcgtcaaacgtctcccagttctcggatcccgtcgttatcgtatcggcagcggaggcggaagaagcattggacacttgcctgggggccggaggtggtggggcgtgctgcaggtacgggttaggtcgcgggaattgtccctgcagggacgacttgagcgacacagacgaagcggaggattgtgatgattgagagaatccggttgagcgttgagaaaatatgggaggagctcatgaaggaacgttggcgatcatcgtacacatcttcagggctaactggccggacaaatgaattggacatggcactcgcgcagcgagggaggctcaaacaggtagcttcccttggtcttctttgcagttgtcgtcagggcttgcatcctttgtggtggtccccgggctaatgctatttaccatcaactctcttttacctgattttctttgtcctcgctgttcacatatattttccatgggccctttgctaaaaggcctttgccgtgttttctcgtcccccgcttcttaccctgatcccatcatttattcctagtgatgggtcttcctcatttttcctttcccacgtactctttctcttttttctactgtcctattccttttcctttctattgctttctttctttttatatatgttcattctttatctctatttccattgttttcttattcctttctctttatttacctcatttctattttctctctttctcaatcactccctctcatcaacctattc

SEQ ID NO: 8998 - DNA, 1119 bp, Emericella nidulans
ctggaagaaggcgaagggaattcgaagcgttagccccgatgagccgattggacgacatatggtacgagtggccggaagtgataacggctggaccgatgacatggaggcttactaaaaagtttaccaccctcgttactgcttcacaagccgctcgttacaatcctagagaaatccgttatgagacatctgatctgatgactccacgaccagacctgacacggtcaacattatccccggctaatgtcataccacctgcagtggcagcctaatttttctatgttcaaaatctggtattcaattggtatttctgacctgtctttacagtcaagctacttccggggaccggcctggactccagatcctcaagaggtcgcgaactcgttggaagcctgttgtcttcttgtactatggttttggcccgtgtgcttgaataatgctgcgccctttatgatttaatattggctttctttgtgagatccctttttatatggttcctggcggttgtgttgattttgtgacttgcgccagtcgcaggcatgctcgttatgtgtttgatatcagcaagcgtatattgatttagctcgtgaattgaaaatctttttctttttcttttttgttcccttgtgtaactttgctgaaccacgaaatcttgtctgctagagcttatcttaagttcttggtatacgtcatagagcatagcgttcagagtaattgaatagaccctgaccggttgactctgatgtttcagtgaccgctggttatatcaaggtaaactccccctcttcttcttctactattctatcctgatcaacaattcttctatacctgaccggattacgtaccaactgaccaaatactgcatcaaaatgcatataacctctattttagcaggcctcatgctccccatcagcctgggtcgttgagcgtcattgtctgaaaacaggataatgcgaccagtggagacaggctgggccctgccttcgcgcgtgtttttttttttttaagccaagatgtccagaggaactggtgatttccatctatctcccagcttgcatcctgaatggcgtgagttgggatgagctaacaggttgatttggcaatgagatccccataagagga

SEQ ID NO: 8999 - DNA, 1399 bp, Emericella nidulans
agccggccaacaagatctggacccatctcaaagaccctattacaggttaactgagtctcgtcgattgtcttgaggcccctgaccctggcgatcaccctcgctgggttgaaatgcaccccagcggcaagtacctctatgctctgatggaagctggcaaccgcttggccgtctacgtcattgacgagcgaacccacaagcctgtctttacgcacatcacatatcctttacttcctcctggtatgtctcgcgaaccgacaatcctgctttgatctgacatttataggccttcccccccgcaacaagtaccgcggtgatgtcactttcactactcgcagcggtgaatatcttttcgcaactacccgcagcaaccactttgatgtgaccggttacattaccgctttcaagctgggcccgaacggcaacatcgagcgccagctgtttatccaccctacttccaccagcggcggccactccaacgctgtgagcccatgcgactggagtgacgagtggctggcgctctgcgatgaccagctgggcttcgtcgagatttacagattccgtgacgagaatctttctcgcgtggcacgtgtggatattccagagcaaggattcggcatgaacgcgatttggtacgattaaataatgatataaaaataaagacatagaacaaatgggaaaacttcgaacatcacttcgcttcatcttcccaccaggcccctctccatcattagttacgtgaccatcctttccggcatttgtttcagctgcaagatgtgcttcagactcgaccagcattccaaacctcggtgtaggtcgagtacccttgcagcaaaaacagatagagcagcagatggtacactctcttaagcagattcgttccatgataattgcttctctcactgagcacccctataatgctacctaccctgtcatggaagagatgctgccctctgccaaatcagagccgagccgctttcaacgaacgatgtcttagactgacagtcacccgccaaataacccccttgctgacactgtacagcgaacttaccaaccagtttctttgcagtccttaaacttttgccgatgtccaccccacaattgaaggtgtcaaagcttactggttcattagataggctatgccgatgattctcgtcttgcaatgcacccctcgggatactaacgtgcgtcatcagccccattcgagtcgcaagccaccggtccaagcacttgttggcccgcgctgcaggtcgtcgcctcgtctgttgttgccaggcttgtcactcatcgttggcaagctctcaccaagattaatgggtcctgagattcgaattcccgttttgctctgggaaccatgatcctccctggaggcatcctgatcgtccgcttaaaccgagtacct

SEQ ID NO: 9000 - DNA, 137 bp, Emericella nidulans
cagaaacacctggaaaaatgaacacgcagacggagcgtcccaaaacaaccggattctgagcgatcgcactccgcagctcgtcatacgtcccctccgcgcacacggctatttgctcgtcactatgctaatacctcctg

SEQ ID NO: 9001 - DNA, 239 bp, Emericella nidulans
ggggggatgggggaggagggggggggagtgtggtggaaagagtggatatggactgtgaatgcaatcgtctgggggcattaggcatagtgaactggttctatatgaagtatatcgtcggagatggaattttacatagagccgatattatagtgaatgatacacggagagggttgacttgatgatgtgttctgagacttggaggagatgaatgagttcgaagatactcggctagtatgaag

SEQ ID NO: 9002 - DNA, 599 bp, Emericella nidulans
ctcggggccgagatgaccactcgcttggcgcccccgtatgtgatatggtcctgggcgagctcccgcttggtgaacttgccggtgcattcgaccacgtactctgcgcccagccgccgcccagttgagcttcttcaggtcacgttccgacgtgagcgcgattggccggccgttgacggagatctgtgtttcggagattgcgtggatggggatatccggcgagacttgcccatggacgagtcgtagcggatcaggtagatgaggtcttggacagacgtgcacgtgtggttgatggccacgatctgaatgtcgtttcgggcgagtgcgacgcggaggacattgcggcctgctggtcagttctcgtccgactccgggatgggaatgggcctaccgatgcgtccaaacccgttgatgcctactcggcaggccgagggagagtcactgatggggatctcgttgatggaaggagccattctggtttgaactaggtaaggcaataggtagggataggtagtaggtaaggctattgatatggtatagggataagggtataaatatagatacggagactgtatgaagagcgtagtgtacgatttgtagta

SEQ ID NO: 9003 - DNA, 531 bp, Emericella nidulans
ggccacagtgtccgcggttgtggagggcggtcaaagtcttctgcaggcggcatagtaagagagttgatgagcgcggagagtcgatgtagcgccattaggaaaactaccgtctgtgtcggtacgtaagttggaggttcaggcgcaggcctttttcttcctgtgcctgtgcacaccaaaacctggtcagctacccctcggtgggttgcaggaatttccgcaaacaatggagcgctcagagcgctggtgatgcccggcaaaacaactggcgtaaagccttcagcgcggaaaaactcaagctcttcgcctcctcgcccgtacagataagggtcaccctgcttcaggcgaacgaccttgcggccctttttaagtgcatccaagcccatgcggagaaactcctcttgcgcctgatcagcatttcctggaaatttgcgcgcgatatgaacctctgttcgtcgcggaatcagttccagcacaggagcaggcacaagtttgtcagccaagatgatatcggcacattgaatggcgttgtat

SEQ ID NO: 9004 - DNA, 1260 bp, Emericella nidulans
aaaaggaaaagggaagaaaagagaagaattgataagatgtagaagagaaaaaatataagagagtatgagagatgaggaaaaaaggaatgaagaaaggagaagaggagggataaaaaataaaattggataagtgggagaactaagagaggagagagtgaaggaaagatgggaaaagttgagacggctgagaaacaataacgggtggaaagaaaacaatttaggaagaaggactaaaataaaggctaaagaaagaggtcaataagaagaattcacgacccggggcttgaggaaaattagctcacgagaaagaaagatttaggggaccagggaagtagaagtttaaaaagaaacaaagcacagaatcttccaaagcagttacgagtcgacaaggaactagaaaaaatgtttagctttaaaagcgtctttccaaaagttcaggtagaccaattttgagcctgccatcagtcagaattagctacgaacaccatgttggataggacaagccctgaaatcagacgaccttgagtctgctcgagcacagcatatactttaaattcatcaaaaacataccaggacttgttgttttcgggcttctggtaattttcgagcacaaaagtcccaagattaacacgcatccgcaagtgtccacgtgcataagcaagacgtttcaagcgatcctcaacagctgttaagatgcgggcattattcttagagcgcaccgaacaaatgcgttcttgtaagccctgcgagtcggaaatctgcactcggtcacgctgaagcacggggttgtgcaattggttctgcttctcgaccacgatatttccctccatgactcttggctgaggttcagcaaggtaaatcttagctttgatgttgcttttggctgtttccccggcccacaagactctgatacattttgcaatatgtttcacgtcatcatggcttttaccgagagcacatatgcagttgggcaatcctttgggaatgaacaagtggcatccaaatctaacccgaatagaatctagagattctagctggaggccatcaggatcagacatgtatgagcgagtcacgattgacttactcatgcttgaatgttccaaaagcagcaggcggttttaccacgcctgcacgtccggttcagtaaattcgaggccagattgcggggcgatgagtcttaccgtccggatctgatctatttacatactttaacttcgccgaggggtactgaagtggattcttcaaccggcctgatatggg

SEQ ID NO: 9005 - DNA, 1471 bp, Emericella nidulans
ggcgtgcaaaaaagccctcatctcctctgtaagcgaaccgtcgatggtaaggaattgagatgcggcacgcgttggaaaccaggtgaggtgctccgggtagattggctataaaaggcttcaacgcatttggataagttgatatacaggccaagactgctaatcctggtcaattcactttgcgctttggtgcagtctcatttagtctcatgaattagaggacgaaggcaatgatcaaggacaaaaaagagctcaaggttcctgcagactgggtaagaaaggaagaaaagctctgtctcgctacataaattgcggcttcgttggacgatctttaacggagtgcttgatccgaatgtgaaacgggctttgaggagctatcctgttctatctacaaggatgtttggcctccagggtctgcatcgctacctaacctataccattccttgggagtattctatgtgttagctgggatccagacaatactggaaatgcataagcctgagtaactttaggcgttgaaatatcaaatagtgaggattgtatttctgtgacacatagactgaacacgagacaaccagttccatgccctttatgggttcccttcctgatccataaatcaatgcagtcagcctcagctggatatcttggtaggcaagttcaacgtcggttaatcgcaatggcggtagcctacttggcgactactgtccctactgcgccacacttcaccgactcaccctgcagctataaaactcaagcaggaacagcaagacgacctaggcaacaatcgacccaaattctgttattccagactgagaattcatcttcttcattacctcgttggtccgccttccccaaagatccattgttgaagctatctcgtgttactcaggtagttgcatatacatcgctcgcgctctgtgatcgagtaccttatcgttagcttctatccgtccagattcccaacccaaaccaccaactctcgaaacctactccaaccaccaaccatccatccacgatgtcttcaacctctattccaccagagtctgactctcagttgcaaccccacaatggcgctggaaaaaaagagtccgtatctccgctacaatcccatctaaactacctccagattcccaccaccccgcttcccaccgtagtccaagccctccactggctcctccttaatccagatttccatctgaccccttccatcacaccgaccggtaaacgcctcattactctcaccatcactgccagcgccgacacaactccctccctaaccggcacagcggacctcaacaccctcggtaggatccaccttacatctgcaacccgctgccgagacgagcatgcgtcatttaagacgcgccttctacatgtctcgctcgacgaaccaattgaaaagctttacgatgcaagcgagaagatcctaagcgacggtctaagcaatgggacagtgcgatacccgcctttaatg

SEQ ID NO: 9006 - DNA, 519 bp, Emericella nidulans
ggaaaaggaagctggacgaatcgatagaagatctttgtacaacgtcgatcctgtggaggatcatcgccagttggggccgtgctgggctcaaatactgggagccgccctcattctctggccgatcaattattcttattactatgattcacggattctcgagtgcgaaggagaccacggccaggaaccaagcagagtcggggaacaatcaggttgtcaaccaggtgggatgggatttcccctggccctgggcaaaccacggttggaacccggtaattcgggagctgatgcaaaggcgcacggccaatggctagccggctcagtggctgattaagaaagcctgacacagcggaggctgcctttggtgacgcgggatagcctggcaggagaccggtgcgccacgttccatggcagacggcatcgcttcggctggtctgggtctcgaattcatttttgaatgatttgattgctgtgattgttttcagtgatggagccatgcaggagaagaaaaaagtccttatc

SEQ ID NO: 9007 - DNA, 1080 bp, Emericella nidulans
atcatgctcgcgagtcatactagagcgccgtcgacagcgagaggaagatcgtcggcgcggtcgccccgtagacgatttctctagcgacgacgaggacgagagcgacaactttccccttgcaatcgagggaccaggcgagccaagatcgtcgcagaagagttaactgatggaagccgagattgcggaccagcgtggccattgagtgccgtaggctgtagcttgacaatcaagcatgaacgtatggagtacgatttaggggtatcactatcgcatatttgtgtttgctatacggagtagggggtcagaacatattagcctgcttacaggaacagcagtagcaatcaaccattaaaacatcagcctcacacttttcatcaaacatcagtagagatgcatctgcccagtctgacccctcaagcacacggggagtagtttcttgacttgacagcagaccaagatccgatatttggcagtcgatcccgactatcccttgtgactacaagataggaatcaccactgtagaatatccacagcgcagtgcacttaggttacacagtacaacacaacagcacagtgcattgcactccggtcgagtccccatgacctttttgacgttagctgttgtactaggtagggtatggtaggtagccatgcccaagcgctgttgttctgcttgtcaccaacagcactcacgtagtacataggcaggtggcgtgtactggatgggaagacgttggctaccatggagtgtaggcaatgcacgtatgcaggtgggttggttgtactcctttctaccggccccttacttacaagtacgtgcagtgttgaccgatccacaaagtacaggctgacatccggactcgttgagacccatatccacgaagctcacttacccgagtatagaggcgagcaccattccatacttaggtgatgcttgcttacttcgatcactacgcatcatgtctacggcctacatctccctgcctaattgaccacgaggagcctcgctctgcactgcactttgcgaaaccaggacaatcgaccacccattactggacagctgtcaaagcacgggaggtt

SEQ ID NO: 9008 - DNA, 1176 bp, Emericella nidulans
aaaggtcctacccaactctcttatgacttcctggcctcggataagtttctaaaaggtcaacctacaggccgtttttcacggtcccgatccaaccgacgccgacattggcagcatggcctagagaatcactgcgcccagagagcctgtgttaccctaaaataaccgtagatggacaaaaggcttgattcaaaggtcaactggaggaagtatggcccaagggtcgcgatcgtggctggctaacattgcgcagggttacctcttgcaaccctaaggaatccaccccttggctccgtgccagggttcaacgtcgagtcacttccgtcacaaagaatgtcgtgtagcaacaaccagtttaggccgaacggaaggccggtctgctgtttgcggattgcaaagtgaccgccctcttttacttttgatgctcgagcacatcattatgggtcgactttttatgtcgagagcacggcgtccgtccaactctcgtcctccgtcccacgaacatccagattaggcgccattggataaatacaagtttggaattcaaaacatgtctagcagtgatacagttgctgtggataatctgtccaatgcacctggtccaacctcgatggtcgagtacgagatatatgatgagagggaaattccaacgacggatcaacgacaaaactcgtgcactgaggctataggaacaagtactgtgcaaaatgatccggaaaagcttgcagtgcggactcgatctttggaggcttcaggtccagggacacctccgcctgatactccccctgatggcggacttcgagcatggggcactgtcgtcggtgcactctgcggcatgtttgtgagtttcggctggatcagctgtgagaatgcactgcttcaacctttcattgcccagatagcagttgaccaatgtcgacataggcatcggtgttttcatcgattactacaaaacccacttgctccaagacgtgagcacaagcgccataacatggataacctcactagagtatttcatgatgttctttggggttggcacacaccacgatattacctttgctaagatgtacactaatggacttctataaagggccctttcgtcggcgtcctcttcgataactttggtccccatttgatcccctaacaggctcattcctacacatctttggcctaatgatg

SEQ ID NO: 9009 - DNA, 1671 bp, Emericella nidulans
catccctagttcggagagagctaacggacctgttttactcctactctctagcggcatcgatgagtcttcgatgctgtatgtcccgtctctcgttatcaaacgtatttgagctaacaaacagtaggttctcaacgtcgcgtagcccagaatcaagggactcttcatcgtcgtagtccacatggcgaaaagcaataccacggtcttcaaaacgtgccctgttcgaagctctggatgatgctgcagcaaattcggaggcagggacatggtccacaaagtaattgagcacctgcttcccaaggcctcctgttgcgccggtgatgagatacttaagtgtcattttgaaggcgagtagcgagatcgcttgaaacggcctggatggagcgagaaattcaaggtgttgtgcgagatagctgaagtacccctgtgcattactatttatactcggctcagtcgaagattcgagttatactcgtgtaagcagctcatttataagcatcggcaagattcatccttcggagcaataaataagggttggtgtccgaaacctagcccaacttggatagcttcatcgacaaaagccagacttgcttaaaggtttcgaactgcttcgtcctaagccatacttgccaattatacttgtctggaccgatgagaatgaggcgaaaggcaacatcaaatcatctagattatagaacgacgcctagaatatcacaccgacagtgccagttggagatctgcgtcagggtatagaaatatttgacaagcatcgctactccaggccgaattggattgaagctatcatggctccaggtctccaaataccagctgaacgttattgccctgtgtgtttgagaccgggcggggagacagatgatgacaaatcacatttcactgtcatgtgaccaaagcgtgcctatcaacgttttgagcttcgactgtctctgcaccgggtgctaacttcgcattcacgatggaacagcgtttcttgcgccaggaactaggatactaccatgatcgcgtcttctagcaagttgcgcgtattggatacaacggaagttgcacaagctgatgaatcctcggacgcaagacaacggaaacgaagagcaaatctctacgatgctgtcgcaggttagtagccatataggtgggttatagttgcgtactaatctatataggccgtgtgaactcgcatgggtttatccccgcgaaaccttacgcctccacatatcgtgacacagcgtcgtccagtagccgttctctcccgccagaagaggtcctttttcgccgaaagggcatgcccattcgctatgaggaaacagatcggtatttcgcccacgagtctcttccgcctgaccgtccgctccctagctctgagctgttggagtccatccactcttacacggccgacttttacgatcaagcagtcagcgtaaacgggcgcataaaccactacagcatgaacgggaagtctttgttgtttatgggtgtacttctggaggagctggcaaaggaatcgctgggtgacactggcgatttggcactggtcgagggagacgatatgccgacggatgacgagccagtcgagaaattcggaaggaggaagcgacgcaagcgagccagcagtctcagcagcatgtatgccagttccggagaggatcttgatagcgtggt

SEQ ID NO: 9010 - DNA, 1393 bp, Emericella nidulans
gaaggccggactggcaacttgaccgccagggcacaggatggtaatttggtgttcgtttacgcctaggagtaatgcttgttgcaaccttggatggacaagcgaatgcgacctggggacgagaacatggtgctcttagatgacagtaatagctattggtggcttgttcgaatagtaaaggatggtagtattggtgagtatgatcttaatgctggaagagactgtgctaactggcgtaggatacctgcccgctgaacatatcgaaacgcccacagagagactcgcccggttaaacaagcaccgaaatgtggatgtgggtagctcttcgctctgatgtcgaacctgactgacgaataagctttctgcgacaatgcttggggacaacttggagaaatccaaaaatccgctgaaaaaggcaatgcgccgtcgaaatgcaaagactgtcacctttactagcccgacatacatcgaagcctctgacaatgattactcgacagaagaagaggacgatgatgatgacgtatctttcacggatgaatatgcgcgggaggaatacgagcagcaagaggagcacaatgaggctatcgttgttgaacccttgcgaccgaaaactaaggctgttgaagaaccgcagatcacagagcaagaacctacttcccctagtccagaaaagccgcgctcaagccaggagattttcgaacaggaagactctattactcctacgtccgaacccaacgtcagccgttcaagaaacggtactctacgaaataccgattcattcttcaaggacgacaccgcggagaccaagaagatctctctcactccgaacctactgcgcgacgagactgccccgggcgaatcgagagaggtatttctctttctgctttgttgctttccccatgctaactcccagtagcctcgcattagcctggaagccctcgataaactcaatccggacgagaagaaagacgacaagaagaaaaaggacaagaaatccgggatgctcagcggcctcttcaagagaaaagataagaaatccaaatccggtgatgatgaagaaaacattgagaagcactcgggcgagctgtctcgatcatcgcctactccaaaaacatccatggagtccgtatcttcccccgaagcgcgtccaacaaagcaagccgggccgtcgcggcagaccagcaagcttcagaaacaacaacaagaggtggcccagccaaaggaatcactggaacaaaaagagacagccttgagagaacaccagagggatcaaacaatacgccaagtagtactggacgaagtcgaagagatttctggctctggctcgtctcgttccagaccctacgaggtagaacagagccagtcgacactgttcgcgtaccagttcttaagggag

SEQ ID NO: 9011 - DNA, 563 bp, Emericella nidulans
gttcctttatactatgcgggtggccaacccacgatctatcgtcagagggtaagccatggaaacaatccccagccgaccgataataaactatcgtggccagctaaagagcctcgaagacgtgcgctaggaacaagatggcattctgaggaggatggcccacgtgttagagtttatagcactaacattgcgtgcctagtctacccgcatgcaaccagggatctccagcacggcagattgacccaagctcctgtacctcaacgtccatccacatatccctgtgttggtgccatgatatggacaaacctcgttcttctctaggattccctggcacactacagctgagaaccctaccaccttatgggacctcttcgtaaccagcacatgcccagggataggctttcctctaaacacttttattgccccccccaacaatgcaacggatcttcaactttccgaacctgacttctgtctattctttgaaaggtaaattcacttccctccaaatggggctctctccctcacatgtatcgtttctaaccagtctaatatctcccccgggcgtt

SEQ ID NO: 9012 - DNA, 426 bp, Emericella nidulans
acgctcgactctgcgagtcggtcatgatccatcgaggccttgaggatatcgggtactctagcctcagacacactgggataactgtgtgcctagacccacgtaggatacagtccaggcttggctgcttgctgtacatgcaagccaggtcctgtgatataccgcgtgaacgtgttaacaccgaccagcatgtaagaggacagcgctgtactccttccagatatttatcatgggagtttacgcggggttagcaacacctggtgagcgagccgttcagatcatgatggggccgcacctatggaaaacgtgcttgcgccagacaccgatgaagcttagtgcgtacagaatggggagccatgaagacgagatcttagtgaactacatgtccgtgtggagcagatcgcgagctccattgacgccgtacatggc

SEQ ID NO: 9013 - DNA, 719 bp, Emericella nidulans
gtcgcatgccacgtcggcgtgttgaacatcattcggataggccccttgccgccaggttcaccaccctgggccgaatctagcgaacccttagccaacccgcgatcgggagtatcccgtttcccagtcgacgtcctcgcctgtcgccgcgtgatcccactgcgaatgcgccggatttcctcgacatcgtggataccatcgggcttcttcttgaagagaaattgatcgagatgtcgaccgagcgaagacgaggtgaatgcctgattgcagtattggcattttcgatcctttaacgcttggtttttcgacgacgttccctgtgtttgcgtttcctcaccgggaccggagtcctcaggagtgtcggctggacgagtcgacgcgccgtcgtccatggtagcacaagggcgcgagggttctgtttcgtcacaaggaaaacagtcgcggtggaactgtcaaagaaacgcgtaaaagtggaacagcagtagcagcgttaggtcaattctgcagcttgatgatgatgcatggagggcctgggtgagactgagcggactggaatttgggcacccaatgggagggcgacgacagagaaaagccccagaggagaaggagtcaatgaaaagtagaacgaagaagcgataaaaaaggggacaagaaggtgctggagagggaaagaaggtagaataaatttgggaggagggaggagaagacaaagatgaacaaca

SEQ ID NO: 9014 - DNA, 967 bp, Emericella nidulans
ggggggtttttaaaaggcggatagaccacctggggaacaggggagaatggtgcccgggtcccccccccgcatgtttctaaattaagggtttgctcgaaaaccacagtgccagggaaacaggttccctctggttaaggaacagagtgcggcctgcaaggtttttcccaaaacttgaggttgtgtcatccaaaaaaccaggttccaggttcgcttgttcaaagtcattgcattgattctggtctcccccttaggaacggtttgtcttctagctttgggtgcaaggagtttagacgtcccgtcacaaatccatttgaatcccggggatcagtagtttcgatacaaaatcaaatgctatgtacactggcaattcaaacccaggcgccgttttcgaacagggatcatgcgcaatgatcagatagaatccaaccaggcaacccttctataatatagcacaacctcacacataccgtacctggcgcgccaactgcctttagatcgagcccgggttccgtaagaaagccggggtatcctccgctcttagggcacgtctatttctgactcataacgtcttgtcttcccttgccctcagtgatggctatcgccgtggtggtgatcgtcttttatgaagaagtgctcgtaggcgcagtagccggcgaacgcaacggtagcgataccgaagccagggaaaatgttcctgaatcggttgaagcggctgaatggaccggtgtacctccacgcctcactgcagaacagtcagctcatagtcttcggacaaatttattgaaaaccgtactgtcgagcccatgggtccctcttggcccaaaccgaccgcgggttggccgcggccttgaactcgttgatgtcaaagccggtgggattgggagcaggcattgtgtggacgtaagatcgcacagaagttggcaatcaattgatgataaggagcgacagtattctattgagcagtgaa

SEQ ID NO: 9015 - DNA, 913 bp, Emericella nidulans
tcgttcttcgtgtggcgattggtacatgacaacgctatatcagcaagattgattccgggcccgtacacagattgcaaacgcgcaaaggtccggtggagttcgtagaaacgatcgccgtcctgcccggcttgggactctagagtgctaagtatatcctggaattcaacgacatgtgtcgcggtaacaatcagtgctttccgggctaattttatttcctgataggtccagattctagttagccacattccgcagacgagtactcccgcggtcaccaacgggtcagccgatgggaggtgcagggtcaaggagtctagcacaataactggtccgcattcctgtatactgcgtccagactgttgataatgagagtcttgatctctgtaagacgagcatcgctagtggaagggtccgacttcttcgggatagccaaaaggtcaagccagacccattcgtatccacactgaagggctttccccataatcttgttaaagtgcgtcttgagcagcccgcgttcgtcctggtcgactttctcatcgttatactcaagacccatcgtctcagcccatacatgcgagatagcagcgtacccagaattcagcatgcgaaactggccccatctattcacacatagagcctggcccacgcgacctgcctgctccatcaggctcaacggcggcgccacaaacagcgacgatgagaccatattcacattcaagtcaagcagctctgaggctgtcttcttccgcttttccgcatccatcgtcgccagcgctaacggcgaacgtgcaacggcgatcgtatcaacaacggccagtgtagcgattttggctgcaagtctgcccaccgtcgtcttcctggtggcgggtaccgagcttcagggcctacgggatatagccgtcgttcaggaaggggt

SEQ ID NO: 9016 - DNA, 440 bp, Emericella nidulans
cacctcagtcctcgaggtatccgtgtcctggggcagaacgctgcgcaggtacatgccccgaatcggtctctttgctagctaacgaattcagcgcagttcactttgcaggggacaaacacatatattgtcggcaccggaccgcaaagactcatcatcgataccggccagggaattccggaatgggcagacatcctcgatgcctacctcaaagaacgctcgatctccttgtcgcacgtgttcctctcgcactggcatggtgatcataccggaggagttccggatctccttcgtctttaccctaatcttgccggcgccatatacaagaactcccctggcagcgaccaacagccaattgacgacggccaagtctttcgtgtcgagggcgctactattcgagcagtgcatgggccaggggactcgcatgaccatatgtgcttcat

SEQ ID NO: 9017 - DNA, 1134 bp, Emericella nidulans
actgttcttatattgtttccgacctcgtcggaaagtgcatttttgatatctttccagctgctgccgtgggtgttgacagccgataacaggagcatattctgggtcgcatgttaagtcccgtctcgtcgcatttttagaatacagccaatatattaaacatacctcatccaccgtccatggactgcgctccagctctgggttcaggcagtgatgccagcgctttgaacattctacatctcctagatcagcaaggtcgctaaacaggggtttgagtacgtacggtctgcattcctcgtctccatcttctgtgcaatcgtcgcccatcggtactggtaccgctctaccagccggaacagtcgttcgtcttcttcttgcgtccatgagccctgttaatagataccttgctcagctgacttgattccacagtaaagagggacaggcgggcgaaaatacctttcgcagaccccccgtaaaccgattatagtaccgcttccgacagtccttattcgtgcggccggggatgtgtcgcgcgatctcgttccagttgattttctgacatttaccggtaggtgctagcaggccgtcagtacggtaagactggcaacttgacctgcagaaggcagactggcagaacgtgcaagcatacctttttcctggacctggtatagatcccagaggagcgcgtcctcagcagctgtccagcgccggcgaggttctgtcattatgaggagaagatgattatctttgtttttttttcttcttctcttgcgatgccttgtgttgacttgttgctaccggcggatatgaatggtgtagggtttcagacgtagaaactggggataagacgaacctttaaaccaaacccagactgacgaaatgagacatacgacgaatgcacgactgcgcctcccaatcggccgagccaggatcattaacatcgatgatcaccggcggaatccttcctcccagccccagttcttctgcctacctagaccagtgctttacgcccgcctaacctgacagggggcgctgactacgggtacggtacattccagtgtttggttcaaccgagcttagatgagaagccccccaccaacggttttcttaaggtaaaaataagatgacaagacagga

SEQ ID NO: 9018 - DNA, 479 bp, Emericella nidulans
atgtcagtctcgcgtttgcgaaggggtagttaaccagcttaaatcctcgcacgacggaccaggtcggggaggcaccaactacctagagtgaagaaaaacttagggttgcatgcggacagagagaagcatactgaggtactgaatctctgatctgacgcaagagactctgctttgcacaggatccgtctatcagagggtgcagctgctgggctttattacatgtgcggaagaagctggatgcagaatccggctgatgtacggcacgagatatacgggttctgaacaccgtacctcgaatcgccgtgccacgtctcttgtagatggttggccggtattcttacttcgcgatgcatgcacgaaaacatcagcacagacctaagactcagagaggtctgcatagaccccaaacagtgctggcctaggaggctgtcttagccacagtctagaagccttgtcgatcattttgaaccagtgccgtt

SEQ ID NO: 9019 - DNA, 221 bp, Emericella nidulans
cctcgaagggtcacaacccaaacgccgacaccgcgcacaagaacatccgttagctgcgagattcagccgcccacccgacgcgtgcttacacattcgagtagacggaacggcccaagtatcgcattcgtcaggagccggcgtccgtcgcaatcacccagctgactgctcgtcaggccgtgtaagcaccacggtatgagtcaatcactagaccatgcaggtca

SEQ ID NO: 9020 - DNA, 511 bp, Emericella nidulans
gggagattgtttcccatgtgtgggttcacttactaagcgataaaccctcgcttaccacactaatagagatagctgcttcctgtgagaaaatgagattcgttcacaatgcctcacaacatacaatccgtcagaatagagcgtaatgcccggggagaccaataggtgagccaacaccacatatattgttcttcaagtcactgaccggtttctagccgagaacatcacaaaaggctactggattaatgaatctgccaacgcacggcaagaggtaggctgggtattgagttatcttacgatatatagttcctgagccccttaactttgtggccagcacattcaagcagttttactccacctacaagtcggtttactttttttctcctatgaaggtttcctcgaaccccacacctcgtctctttttgttagcccctacgtaccaaccctctacaggatattttatactattaatttttttactaccctttcctactttgtaaccccattatatccc

SEQ ID NO: 9021 - DNA, 935 bp, Emericella nidulans
gaggacaatagcgtgcaaacctgccggtttgcgagggaaaacggagtgtttactatgattttttgatagtaagaaatcaatattgcagacgtttggtataagtcgagcacttgaaaatgagataacatccgtagttcgggaagatagtcttcgtaccccgtgcacacgatctaattcttattcacgtgctcatggaaaaacacacgacgtgggccgccaaaagtcaagactcggaagtccaccttcctagtttgcataattcgtgggaactacctcgacggcacgccgatcaatctaaagtcttttatttctgattactcggagtatgaaataggacgacagttgttagatacgtggtcatctcgggtgccttgcagattccgtcaccgctggtgcatttgagcatcgctttacgcagacccttgactgcagggcctcgactgtggattcttttgcgtcaaataatattgtcagggccaacaaatattcttttttatcattactacagatagaataattatgtgaattaaccattcaagtaacgccgagttccaggttgcgaagtttagccgattaggtaatctgagctgagtattgcaacgaatcagatatagatattgggaatggggtgccttgattattcctttcataggcccggcgccggaggagaggcatccatggcccctggagtcatgaaccatggcccgctgcttaaaatagtagtactccaaatgtgagggataatactcagattccagtctcgactgggaaaaactcactggatcgacacggttgcaatgaaggatgcaatcatgcagaggatagtctcgcacctctgacgactgacgagaaggagtcgctttccttgttcatcgctctgacagctgataaatgtcgttcttgaaacactgcccccaggtgtctcacgcgacgag

SEQ ID NO: 9022 - DNA, 782 bp, Emericella nidulans
atccactatgtatacaaacttcaggggaattatcaatcaaaataacaatcaccggagttggcgttttagggacttggctctttttgacggttcagcgaatgtggggtgacgaccgcggcccttcattcactactacgaatgttcttctcaagcaatcattacagcgacgctcatccgcttctcttttgtccctccggctctcgcactgcgagcctgaaaaacgcgaatccccctagacatttcttccccgctgcacttggtcaggaccgcctttattccattcgcaaagtcgcggagaccaggaatatatcacctactgccatattttcggaaatctttattgctattcctgctatcatctcctgatattctctccgacgattctccagtagtctcgctctgcagcatccagcctcgttttgttctcgaaacatcacgttcacaccgctaacacttcgtcgatgttcaattgactcttatttgggcacttatttgggaaatacatagtttgatctgcggataaaatactgaggttcctatttttgatcgcgacaacgcaccgaatactcagcgtgtaagggactttccccttcatgagatggtagcaaacatcaagcgcatcccctttctatctactgcatgacccaaaccacatccattctgtagctaactttcgcgctattacagcttcacgcggcgaaacctattcctttatcgtgaggctgcggatcctctgattcacacgcaaccatcattgcccactactacgctggccattaggg

SEQ ID NO: 9023 - DNA, 177 bp, Emericella nidulans
aagcgcaggccgaacaggcgagaagatgcgggagccggacagggaaggcgctggaagcacacgcgggagagtgcgaagtggtaatgtaccgagcgggaactcgatgaggcgaacaccaacccgtgcgccaatgcggacgggttcgagccgagacgtatcggcagccgggacccggga

SEQ ID NO: 9024 - DNA, 1883 bp, Emericella nidulans
ctaatgttgttctgcgattgtccttgttagtccgacgggcgggagtcgcaggctctgaaacaatgggagaggaagtcttgggttccttatacggagtttcatcttctcctctcctgcagctggtcccgtcggcgtcttcactgcatcgctgatgccggttgctgttgcgtggcgttcacgtctcaagcgtgaagcctcagcattgagttcttcaggccggcagctgccggttcgccggtcgcttggtattagaaccttggacagctcgtgtgcggccacggcccaattgactggtggtagaggtggtgactcctgctctgagctatgggagccggtggagcgccgatcccttgccggtaagacaacctttgcagcaaacgattgggttggggcgaagtaggtcggggctgatttctctttaggcttgctgggaggaggcgggtatactaaggcctccagctcctccaacagaggcagagaccaccattcctgatcataagcggcctgaaaagctggcctttcaggaggggtgtcggacaagccgaggcgttctgtcatctcagtcgccaaacggtcgatgtgacgatcatcgagcaattgcacacccttggtatcccctagccctgacaagtgactcaaaacaccagtcgtaagagccctattactgtaccctccttcaaggacgcttacgattcgcccatcaacaccaagaccttcctcctctgccatccgcacaacatcggctgtgaatctggcgtaaaattcggtaggaacattgaccttgtgcctttgcatgcccatgccttcccattcgctagcatcgaagccggccgaaatgaatattgccgccttgggtggagggccattgggaacacttgccagacggtcagtgtgcatctccagaaagtcacgagccttctctatcaggattgagtatttcgcacaatagagctcccaaaagtcctgctctgtcttccacggttccacatgtacgttccagatagattgcccatgtgctatctcaatgcatacactcgcgttgcggatcttctccgcttcgcccatctcacacgggtacgaattgatatcgtgcaagctaaaatacccaaccatagcttttttgtgggcggcagcattcttcggagcagctaacgccttcttgttctgttcccaagcgatatcctgcgagccatcaccgtgatggagatcaaagtccaggatcgcagcgtgggtgagatcatgggtcatcgcagcgtaggagattcctacatgaacattgttgatccagcaaaatccggatgggttgccagaagaacaatgatgccccggaggccgaatacaaacgaatgcgcgtttcgtcggtccggggctaaacacagcgtctatgccttcgcacactccacccaacgctccttcgaatgcgtccaacgattcggagcataaatatagatctccttcatgaaataccggcccagggttcccgctagagttatctttcccagcactacgaggccgtactaattccttgccattaagcgcgaggcgcgattcagcagcgtcgcacattaatttgaggtcttccatccatttcgttccgtgcacatgggtgaccgctggggagtttatcgccaaagcccgatctgtcttgcggatctggaacggcggaacagggagctcgcgcagatccaaatctgggtgggggagcaaacagcccaccagcatgtctgcgggcagccgaacatctcagggatatgcttcacacaggctgaacggctcggtcgttaacaagagcttacgtggccgggagtgctggacccaaagctatgccttaccgctcttgagtcccaatctggtggtttcggccctttgggtcacctctttga

SEQ ID NO: 9025 - DNA, 526 bp, Emericella nidulans
ctttataaacttaaaaccgctgaggggcactcagcagtcttaggcctgcagaagggcctctgttatgattccagtcaagtgctgctgttagaaatccctgggtattatttcctcctggtcttactctctggtttgggtcacctcctcccctgctggtctggaaactccaggagtctgagggaaggaatgcaggagcaggcagccatctcaggggagggtcctggaggcctcctggctgtgctggggtgaatagcagccacccaggccctggccccagctcaggactggacgccagcctgggccctccctggggcctggagctgacgcctagctcctcctcctgctgctggccctgcccatcctcacaggcttggagtctcaggccagctagctggagcttagcctgtccccatgctccactgcaggccttagtttccctgtttttacttcagaagtctgggtctgcaaaaggggaaggcaatccccagccaacctgatctgcgaatgcccctggtggtgccatgtg

SEQ ID NO: 9026 - DNA, 684 bp, Emericella nidulans
ttgaaggactgtagtaaccaggcagaataacgtggacaccagagctaggtgcgacaatctccttagtattgggatcgtccatcttcctgatggaatcagtgaatggaccggtagcgttgatgatacccttcgccctaatggagatctcctctgctccttggccgtcccgttcgggaatgcagtccctaagccgagcgccgttcaatcttcccgacgcatccttggtgaggcctgtgacttccatatggttgacaacagtgctaccatatagcgcacgcgtcattgcgagcgaaacattcattcgagagtcgttgtgagcaccatctacaatattagcgcctccatttcaatttctcaggggtcataaaacacataccgtagtaaaccatagcaccgagaacgttatcctttcggagcatggggaatgcctcaatggctttactctttggcaagaagtaggagctctcaattccttcagagccagctagccaatcatagcatttcgtaccggcccagaagtagggaatctgccaccacttttggactggtaccatgatcgggagccagctggaaagatgaggggcggtgttcacaaagtactttcgctcccttagagcttctacacaagtttatacctgaaatacaattcaagaatgtcagtcttgggcggtgccatcaaccaaa

SEQ ID NO: 9027 - DNA, 355 bp, Emericella nidulans
tacagaatgtagacaaggtgcgggatcacactctacgctaggcacctgatggctcgaccgaagcgcaggtagtggtgccacggtcgtaacgcgggtgctcagagacagtgttgctaggaataaccctacaaagggggtcagtctgcaccgacaatgaaaaagattactacgaagctggtgacagcctaacagatgggcgtgcggggtaatatccatctactgagagatggctacgcgagtcacgatctcctaaggtacaccaggcttaggccggggattaggtcgggatatcaagaacgatgcactgccagacctagtcatgcctgcacaaccaggcatttactatcagcctatg

SEQ ID NO: 9028 - DNA, 346 bp, Emericella nidulans
actaagaccagagccctggccatactcctactttgatgccgctcggcgccgaccgcccggccggtgatccggtcttggcaaaaaagtgttcatccgcgattcaatctgcccgtttcctccgtccggtcgtctacccttcacaatgttggcagggctggtttgaaggggcgcattcccggcagcaagctgctgcctttgcacgatctactcgatcggttcgtttcggttccttatgcgcgaactcgcgctgacttgagcagatatcctcgtttcgaccgcagatttcaagattctccccgcgaaatagcaaagtcctcggcggaaacacatcatggagggctccggt

SEQ ID NO: 9029 - DNA, 452 bp, Emericella nidulans
cctctgccagaagagcgcaaacagcaacagcgccagtatctccatcaaagggggggctcgtgacatgcaggtgcaggcgctactaaccctcgttcaggccaaggccgacgcagccgttcagatagcggccatgattgacgccgcgaatgcccatttcatgcgcagcctggctctgtctgaacccatggaggctgcaaagcacttgtgctttacggactggactcgctagccgcggtggagttccggaattgggcgcgcagggagttgaatgttgtggttagtacgttggatgtcctgggtgctaagacactgaatgcgctttgcgagatgatggtggggaggttggctggctaggtgcttggggacaaatggggaaaggtatctcaagtcgttgacccattaatatttatacggtgatcgtgctggataatggataacttgacagttttaaa

SEQ ID NO: 9030 - DNA, 1793 bp, Emericella nidulans
catcagatgtaaagtgggtgcataagccatctttttagcctagtgaagcctccaggtgtcagtgaagaatgaagggtgtttcagtcataagtcgttcgacttcgccctctgacgccgtcacctagatgggcgagatccaggccgtctggcaccgtcctccttgggctccttgagctcctcaacgctgtagggacttggagttttacccctgagggtaggtcgagtggaggcaggacatcttatcgatttagcgactatcaagcctagcgccgtcctgggcgcctgcaccaccgttactccagactctgcatcggactcttcggggtccagggcaaacatgatgttactcgagtggtatctggtccgactgcgcgtgctggatcgtattagagtagctcaagctgctcgtttgaacagccgcctggcgggagaatgagtagagatcatgtcttactcgcaccgataaagttgagagcatcgcagctattaccgaagcttctgacccacctccagacaatcctccccctgaacctgaaataatcaaatcttcctccttgaattcacgcaccactcgcaggcccggcatcagctctgccgtgttcttgacttcttgtcggcttgactcgaagatcgagattagcctacgcctgctttcagccattctccgtccttctttggctcttcagcccaccctggctgccgttggcgcttagtctcgcggtcgtcacctttatcattcgccatgaaagcctgtcgatcgcccatcagtggcattgaccatcactaaattggttcgattctcgcgttctcattcgaccgctgcggtcatcttttctcctattcaattccacgccggctctccagggctttgaccagaactctctttcttgtcggcgtcgtctgcgttcacatcctttcctttctagttctatcttcaatgtttatcacctcgttaaattctatcttattgcgactagatcttgtcaaatatggcccctggttggagtccgccgtctcctggcatccgggcccgagcttctgtcactgacacactctctgcgggcgcctatctacctgaagccactattgtctctggcgtccctgcgcatcctctcccgtctcccaagcccgaccctactgctacggtggtgcgtaggaagcctctgccggcctcctctcctgtgatcgctgcccgttctcgccgatcggggccttcgctgtccgtttcttcctcatcgtctctttattcgacccgctccctttcgcaagcagatccccctgctcgcgcgtctcctcttcagtcgcccgcctctcactactctcattctcggaacagttcagttgcgaatagcctctcctcctttgtgtcgaactccgccgcgcagtcttctgtgcgcgcgaaccgtcgctctttgctcgcaggactatagataagaccgatagtatgacaagatagcccagccctaccttttcctctccatcccctggtaccctggccgtccaatgccatgccctcccccttctctcctcttcccctcctgttcatcctttcctccttcatccctcccactgaagggcctcgtatgtttgtcatcctcttgggtcgctgcaggactaaccccgtgcgctcgcgtcttttctccagatttccccggagcagtctctcaagactcctctccggatagatacctccgctctactgtcaacgtagatggagacgacgacagcgacgacagcgacgacgatataacaatctatacaaatcgcaattcacgaatgggacgccatacata

SEQ ID NO: 9031 - DNA, 116 bp, Emericella nidulans
actcggtgaatcgacttatcctattcgaggtttcgtagtcactacctaatatcaggataactagacgtctctacagtattagaggactcagagtctcgacggcaaaatgttatatt

SEQ ID NO: 9032 - DNA, 541 bp, Emericella nidulans
ataatgtctgcaaccagcatactgtatggacagcatcgtaagccttacccagatctcactcagtgctttcttcagctcaccgaccattcatctcatacccagcagtcctatgcaccacggtctagggcttcgtcaaccttgagaggtctctatatatgtatatatatatatccacagaccggtagagagatgcctctattgatgccgactgcgagtgatttgatctccagcagggatgttgcattagcgcaactgcaacggccgtaagatgtcccacaagttgtctcaggctctttactaggcttctacagcaggtgacacatatcggcttatttctcgctttgctcggctgtgcttaccttcgctgttactacacaggtcggtatacatctttggatcggcttactcaaccaatgaacacgttagacaggtgccactcatctgcgcctgctacactacatttccgggtgatcaatcatctattcctataacgattcacaatattaatataggggctgtgtcgtacagacaatgaccccaa

SEQ ID NO: 9033 - DNA, 1668 bp, Emericella nidulans
tggaatccgcgttccgctgcggttcctactgccgggctgataccgcgcttaccctacgttccgtgcacaatgagaacgtccgtcgcgaaatctatcaggctacacgtactgctagctcacggcagattcagcgcctggagcagttgcttgccaagcgcacagaactagctcagctcgcaggtttcgagacttttgcacatatgaccctcaatgacaagatggccagaagccctgcagcagtatccgaattcctgaccactctcatcacaagtaaccgcccggatgtgcaagaagaactagcccagctacaggcgcaaaaggggagtgagctacagccttgggaccacgcatattacgttcaccagcgggtacgacagtatgaaacgtctcagaagactcgcaggtcacgcgagttggctgctatccctgagttcttctctctcggaaccgtaatgcagggattgtctcgtctatttgatcgcctttatggcgttcgtttagtaccccgtgaagctgctcctggcgagacgtggacacctgatgttcggcgcttggatgtagtagatgaggcggaccgcccagtagccgtcatttactgtgatttgttctctcggcctaacaaacaccctaatccagcccactttactctgcgatgcgcgagagagattactcaagaggaaattgcggagtcggcagcgatggacgcttccgcggttgtcgctcacccgaacgatggaatggcgacggctgtcgattcagaatccaagacgctccgtcagctaccgaccatcgctcttgtgtgcgacttccctgagccttcgtcttgcacaccatcgcttttaagcgaacacagcgtgcgcacgctcttccacgagatgggccacgcactgcactccattctgggccagacgcagttacaatccatctcgggtacgcggtgcgtaaccgactttgccgaactgccatcggtcctgatggaacgtttcgcgacggacccgtccgtgctagccctctacgcccgccactggcaaaccgaccaaccgctctctgaaaccatgatccaccacatggcccaggatcgggccgcgcacggcgccatctacggcgccgtcgagaacgaggcccaaatcctcatggcgctcgtcgaccaagcctaccacaccaccaagaccgggaactccttcctcgacaccacaaaactttaccagcaggtctactcaaggcacgccagcctcccagaccccgtagacgaacacggccgcccttcaacttcctggcagggattcttcggtcacctgtacggatacggcgccacatactacagctacatcttcgaccgcgcaatcgcgaacaagctctgggaagacgtgtttggcgctggagctgcggctgttgaccgctctgccggagagcggtacaagaacgaggtcctgcggtggggcgggggacgcaacggctgggaatgcgttgctggtgttctggggccgcagaatctgtccaatgccaacggtcgccttgtcgaaggaggggatgaggccatgcgtgaagttggacggtggggactcggccgtgatggcatatcaggctgatcgtccggcccaaatgcagatcagagttgttgtattataccaagcataccgcgaccatagactaatcaataaatgtata

SEQ ID NO: 9034 - DNA, 415 bp, Emericella nidulans
gccgtctctccagtccgattcttggttcacaaaaaccctgaagagtttgaaggctgccggtgcccgtagcgtcgtgccggaaggagttccagatgtcagtactctgggacgctgggttctaatgggttctaagcttgctagcaggtcgtctccgtccgatacaacgaggaccctttcctctctgccttccaccctctacaatctggcaaagtagtgtccgctgttaccagctcgtctagactcctcacctcgatgccccacctgtaccgtctcgcgaactcgcccgtcgtcattcaggttgcattggaaccctaccctttcccagactactccgccatcagtgccatccggcaatgcggtttcacattcttgcactctgagacattgcaggaggcccaggatattgcggttgacc

SEQ ID NO: 9035 - DNA, 101 bp, Emericella nidulans
aaagacaacagagcaagaaacacgaacacgaggtaccaagtaagaaataatattcaaaatacgaaagcagaaggacaatagacgaggacgtatcttcttgg

SEQ ID NO: 9036 - DNA, 674 bp, Emericella nidulans
ggggattcctcattgtaaacctataccattctactaatcactatggagtcaaatttttagaaaaagtggaacggcgtgccacagtacggtggctctaatttgtgggaatagtgtggaagaattttggtggtggaaaacccgtgtgggcggatttccgatcttctgactcagtaggcagctcttctgagtcttggcgatgttctggtcttcagtgtttgtttaaggtcaactgttagtaaagcactctggcttatgtattgccctggagttgcaagtgatactctgtgagtggctatgggagctcagaagccgttttattggaccttgaaggactgtacgatacgcctacaagggataaatcagcgcgcccctacttactggattttacattttcctgtaaggtaggcgtaggtgggtatgcaaggtacagagtacgtaagcctgtctcagaacgtagacaagcacacctgatgaaagctggtctcatcacccaagtgtgcgctaggtattatgtacgcgtacatatccttatcttgcaaatactcatgactctccagagcttcccagacggactacgtatctacggataaccctattcagcgccccttgctcctgtcttcattccacagtacatactccgtacaatgatactacttgtgggctagcagtataga

SEQ ID NO: 9037 - DNA, 515 bp, Emericella nidulans
gattccctctcatgaagtcaggtgcaaggctgtcagatacggtctgatacggtttcatacggccatcccggccacgcacaggcaccaacagcgccactccactcagcggcactccaagggctaacactgcgcctacttctgccccctcgcccgctctccgtctttcccttcctccttctctcctcttttctcatggtttcgttcgcgattctgcgtcgacatcgagcgttttccccctctatcttggccgccacagccggtacttggtgtcctgtctcacggccggcgccaaacggtgcgtaggctttggcccctttgctgcaattgatctcttttctttgtgcttgcctttgctgcagccttcttagctcgtttcgtttctccccagaccgactgtccctcccgttcctggtacctgggatcgactgcgctcgcgtcctacgcaattgacccgttccagaccaacgcttgaatacgtcgctcggaacaccagtcgcgatctggccctttacagg

SEQ ID NO: 9038 - DNA, 458 bp, Emericella nidulans
atatacaggatagcaagttgtcagtacaacgtgccgcagtgtcggcggcccgaggcacgaataccatgaccacgaggctcgctgaggtcaccgccgggactgacatgtagtgcacctgtgatgatcagacgactgttgagatgatggagaggagccgtggacagcggcctactatgaccgatactagctacgacgcacggcgagttgacagcaacccatgggggacagccgctgcacaccattcgcatgttctcccgatcacagcagtctacagttcagctcctaatgagatgctgatgccatacgctgcggggcaggccgcatagctcagccagatccgcctgataatcgctagggcacgatgctgaagtgatgtcgtgcatgaagccggccatttgctgtgatcaagaccccgtcaaacggtgacggagacacccggaaccgagtgaatgcagctg

SEQ ID NO: 9039 - DNA, 1066 bp, Emericella nidulans
ccctatccgaggctcaggcatgttgggccgccgctcagatgagggtcctgttgacttcctggctccgttatgaaaaattttccggacccgcagcggacctacggcatccatgatccagccggcactcggatcgatcgggaaatttcctggcacccggtggacctcaaaaagggttttgttttgtgtccgcgcccgtgatagactcaagccgaggaacatgagcatggctttatccgagtcagccttcaatgatgactcggcgcagaacttgctcgttatgactgttccatcctgattcctcggcctgagccccgactaagcttgatatttacacagtatatcgataagcgctcattgactccattgcggctactgtcggctacccgaccggtggcattccgcatactcactccaagaaaaattgtgcactgttacctaggaaatatgccggtcttcggtctttgccggtccccaacagatcacagataaaaaatgaggcgcagcgcgcaaggtatttcgtaattcggagcatccggaaggcagggcctccgtagtacacattggaaagaagtatagagctactatccggattcacccttcgtactttctagatcattattctctgtagcgtcatgttttgcgaaagctctatcagttgaaacttgcgagtcaagaaactactctgattacttcagcgcccacgagccctaaattcaacactgtatatctccctgtccaacgcgagcatgccaactgcgctgatccagtcgctagagtaaccgcagacgcatcttatccagttggcaaaaaaaccagatggtcggaatactagcacattcaaaatatggtgaatgtatactgattcatgttgtcaagcaatatcacaggccgatagccaacgtctaaacatggccttgaaaggacctcggttggcatttacttcaacctcgccacagagaagcgcgagaaagggttctctttccactttttacaaatggtctccgatttatagaatgagaattttcgatgttccgttcgaaaagggtgggtatgacctcgggcccag

SEQ ID NO: 9040 - DNA, 455 bp, Emericella nidulans
ctgcactaacgcagagtgatccaactggctgccaccgtttgccgcacaggtattaaataactcctggcaggtcgcagtgtttggcaggttcagcgcaagtgctttcgcactttgcagtgccaggttgagatctttctggtgcagagcgattttgaagcccggattaaaggtgcgtttaatcatacgctcgccatgaacttccagaatacgtgaggaagcaaagccgcccatcagcgcctggccgacacgtaccgggtccgcatcggcttttgaagcaaatagcagggcttcagaaaccgcttcaatattgagcgccacgataatctgatttgccactttgcaggtttgaccatcgccgttaccgcccacgagggtgatatttttaccgagcagttcaaacagcggtttaacacgttcaaataccgcttcatcaccgccaaccataatcgacaacg

SEQ ID NO: 9041 - DNA, 631 bp, Emericella nidulans
tggagtcatcctttgctagcccaggaagcatcggcgcatttgtacgcgcagccccggtggcaggggatgcattgccttatgctcctccaatttgacggatttctcctcgggcgtaaccttctgagccttagtgactttgctgaatgtggtaattttggcattcttgactggctctttctttgtgcgcttccgaggcgcaggcttcttgacgccggcactctcagtcttaggtgcatccttcttgctggccttgaggatctcagtgagcttccgtcctttgcttgcaggatttgagagagtagtggtggaagcattctcgacgtcgccatcgtagctggatgatggtgtgagcatcccggtctgagcctggactttctccttcttgggggtagtaataacgacggaaagcggcccttgctcgttctttacccgctccacatccgcagattggcactcgtcgaaaatcggtttggaatcgtcatcccaccgcttcaattgtgcaagccgtgccacttcctcgcagtcgcccttgaccaacagatcaaagcagtcttcaaattctttgccggaggcggttcattattgatccacatggtgactccattacggcgactccggattaccgaacaca

SEQ ID NO: 9042 - DNA, 1483 bp, Emericella nidulans
aaggcgcatatcaactctgggctgaccgagtaggcgacgacagctacacttgggacaattggctgcctttcttcaagaaaagcgtgcagttctcaggcccactgacgaaccctcgccccgccaacgcaacggcctcgaatgacgtctcagcatttgcagcaactgcagaagaagaggggcccgtccaggttgcgtatccgtaccttacgaacgccatttcgtcgtgggtagacaaggccctcgaaaagatggggtttcctgaagcccagggattctccaacggccagctgctgggccgctcatacatcacgcatactattcatcctaagactcgtcgacgggatactgcgtctacctcgtacttgcagacggcccttcggacgagtaatagtctgaatgtgattacacatactctggtgaagaagatcgactttgacgaggagaagcgagcgacaggcgtcgttgtcaataccggcgggttcgagtggcagattggcgcaaagaaggaagtcatcctgtcggcaggagtaatgagatctcctcagctgctgatggtctctgggcttggccctagagagacactcgagaagctggacattcccgtcctgtctgatctccctggcgtcgggcagaacatgcaggacaccatcatcctgggccccacgaaccctgtgaaagtcgagagccacagccagttgatgggcagcaaggagactcttcctcgctcgatctacgaatacaacaacttccgcacaggcttgctcaccaacccggggcaagactactttgccttcgaaaagcaccagccaggaaaccttagcgaggcgactgctgccgatatcgacaaggcctttccggctgattggccgaccttctcatatattgcgctggatgacacatttgtgcctcagtatgacggcaagaactacttcagtatgtcggctgcgctgctggccacgtttagccggggcaccgtcaccatcaacaccaccaacacggccgacaaccccgtcgtggacccgcggtggctggacgacccgcgcgacaaggagatggctgtggcagcgtttcgccgatgccgcgagattgtcgcctcagagacgatgcagcaagtcattgacggacccgagctgctgccggggttcgagtatcagaccgacgaggagatcctaaactacatcgccgagacttcggacgcgtactatgcgggagtcggcacatgtgccatgggaaaaccggatgatccgcttgcggtgctcgactcaaaggcaagggttaggggcgttaaaggactcagagttgtcgacgcgtctgcatttccgactgcaattgacggccagcccatggcgactgtctatgcattagcagagaaggttgccgctgatattattgctggaaattgagaccaaatgagcgactagcagtaatattgtccacctaggctttgatactatatagcagacccccaagcagcaacaaaata

SEQ ID NO: 9043 - DNA, 1365 bp, Emericella nidulans
gatcgtttctgcgataatagtgttggccccccaatactccattcggtccatgtgccgttttctagcaaagttcgtgcatggtccttggactcgattgggacccggagtccaagaagcacatcttgcaattggaagcagggtcggttccaccagatatcgccgtttctgctaaggagcatagctctctgagatgtctcgccgcctctgatacggaatcctagacgttacataaaccgaagcaagctacgaaaagagcttcttaacgatatgatcgccatctggatcatttttattattaaaataacctctgtataatatactaggaatgtagattagaacctctttggtttgtcgtttgcaagcttgcgtatagtagcgcacctgattcttgtctcgccgtatgttacggacgcaaagcgacgaaacggtggtgtgtacattaggctcaatagtagtttacagccgaagatggactcatcttagaaacaactagcaagtgttaatggcaacggtctgccaatgctattcatgcagaaagcaacacgcgctattattccggtaaggaacaaacgaattaaattaatgaccacggttccaagtcatacgcatcccgtcgccataagacataatgctcggaacatctcgcgaagtggtgcgcttccttggcaacatgacatcatcgaaccctgttagttatatagtcccatgacgcatggttttgagcttttgatccagcatttctatttaccagagtctcgtattcgaaacttatatacctaactcacctttctcgactttaacattctacaaccgacataatgagctacgctgaagctgcggcaaagggtcccaaacaatctcccgaagaggtacgtcacgcggacttgaccacttgattattcaacgttgttaacatttaacgcaggcgtaagtcgagacactgaacgactcaaagcaagcgccagacttaacattgactgacttcttctgtttcaatatagtcgcgctcccaacatcaatcacgtttatagagacgaaggtgacagcacagcgtccttgatcgatgttgacggcccacatgtgcaatcagttgactccgacttcctgcagagggaagtaaagaccactacccaggctgagcggatagagcgcgaggaagaggagtcggaagaggctcgcgagaggaaggagcaggctaagaacaaggcgaaagctaaagcccaccgcgctcgagagaacgggggcatccctgtgttcattggaaaccccgcttttctggttcttgttgccgcgggtctcggattgagcgcctacaagatgcacacgcagggaaagctgtcgtgggagcttgtgggactgtggacg

SEQ ID NO: 9044 - DNA, 341 bp, Emericella nidulans
cctgaagaagacttttatctttggttctctttggtttctccagcaatgtattttcaacctttccctatactaatatagaagttactcctgattttcttcaacgtcttttgattctccccttaaataaatctaccaagtctagcatacagtctacgagtgggtgtcgcgtgccgtttgggagaccttttaagcataatttcgccgtgccacttgtctttcccttgcagcgaactcctgccctggcgctcacggtggacgtgcacgacttccccgctacaacgactcataacacggacaatattatccggacgaaagtagcccgataagcggccttgtccgtg

SEQ ID NO: 9045 - DNA, 658 bp, Emericella nidulans
catccatatacttcccctcaggccaaggagtcagatattgtgagctggatattcagaagtagagaggcctaccgtatgcgtggtacaaaggaagaaatccaacccaccgttccggtggtcgacttgctggcactagggcgtggggaaagccctgatcgcgcataaagatggtctgttccacattggcaatcaggttgcggtgtgagacgcacacgccctttggcaggcctgtggtccctgaactgtagttgattgttgccaccgtcgtggtcgaggtatcagccatgtcgtcccatctccattccctcgcttcgtcttcgctcccgataaaatccctccaatcctgcacaccgtcaagtgtttcgcacgggtgatcggcaaactgaaagatgcgctcctttagaatgcctacacgagaggctgcatcgaccgcggtcttgacaagactcgggtgcacgagaatcagcttagagcccgtatctttcagctgatgttcaatttcgagctgcgtgtacgtcggattcgccccgctaaagactcgtcctgagccgacaattccctgatatgccacaggtacaaatatatggttcggcgttaaaattatgacgacctcgccttttctgatgcctagccgatcgaggccgtacccaagacgccg

SEQ ID NO: 9046 - DNA, 847 bp, Emericella nidulans
tgccaaaaccactcagcagcaccgtccgatcgcgcatgacggactgaaatcccacccctttcatggtagacacaaattctaattctgacttcccgatgggcgttgttcaaagacgtgaacaataactttgagatccagttcacgctcgatgaagtacctgacacagacacgattacgatgcgcatcgcgacgacgctcgcctttgccagtggaagaccgcagcttacgctgaacgacgatgaatgcggcgcgcctgaggcaccgactaagattgattcgaggggtgtcacgcggggcgcgtatagagggtatggcgaggtgtacacctgcgagttcgatgtgggcagtctggttgccggtcacaactcggtgtatattagcgttgtctctgggagcagtggggacgaatatttgagtccaaattttgtgagttttgagcctctccccgtctcttggttgtttgttggtttggccactgggataaggataagctaacgttgcttttctcgtacgtgcagattgtggatgcgatcgaggcttattattgagactgagcttctggtattatgcactaacgctggagtactgcctggggcttacttggagcagggtggaatggcagcgacgctggtccaaatacgaaaagagtgttggctgtcttggagcctaggtatgctcggtaggtctagactcgttgatggtctggttcgaagggatgtggtgaacattgcctttgctggatggaatccttgcgctatgtggtgctcatgattcgcattcatatgctgtataccgtaatcagcactagccgtaagcttgataaagatatacgtgctcatctgtggta

SEQ ID NO: 9047 - DNA, 544 bp, Emericella nidulans
ttctcaacccgaaattgtcggtatttcttgtcaagttcagggtcgaacctaagaacctgctgcctccagaattcgtgcattctcaggagttgttcccatttaaattgctcaacccatttcaattccgagatgcatgcacagcttcggcccataacataacattccatgcagatatcataggggagctcaacacccgtcgcagttgtggcacatgagggacacgtcaggaaccgattgaagatgttccctctgcagtaggcacatgtgatattgctgtcaaaaggtatgtattcaacgttcttctcatgaggtgtcgccgtggaaaacgattcggaaagcagaatttggttgaacagagagaacaattgttcaaattcgttctgcagctgctgtactctcgcggggctgcgattagcatcaacgctgttgagacgtgttgaatattgtttgagcgagtagaatactatcgctttgtttttatattgttcatcccgacacaccactctggcatgcggaagcgcttcgttcaacgccctctcgagag

SEQ ID NO: 9048 - DNA, 148 bp, Emericella nidulans
gaatcctttcgaaagccaacggaggcaggaagggttaagtggggggctgcctaacccggaagatcccaccataaaaggtacggtgaaggcccaaaaccaaatccagctggtgggtgatgggttggaaacccccaaacggaaaattacc

SEQ ID NO: 9049 - DNA, 1189 bp, Emericella nidulans
aatcaaaatagattaaatagtataagaaattaataaaataacggaagaatcaaatattataccacgtgtcatatattttaatagtaatgatcaaaaactatggcgggaagtattttcccttttaaggcaccgggtatcattaatcaaaccctaatgaccacggtttttagaaattccctttccatttccccaagttttttttaagcattttttttatttattaaagggtatgtatttccctggcataaggggcccccgcacaaccaattaaatgaatggggttgtaaaacaacttaaagttggagaacaacaactggtcagggtccgaagactaaagttgtgttgggaccatgacatcggatcagcatgcttcccactctgcaaaagtcggaacctatgggccccatcctgctgtctgaaaccccgagtttgaaactaagtgcttgcaatttgccggctactagtctgctctccacaaatatttgacgtagcatctctgccccaataagtcatggaccctgcgcccccgacccaacccggtctgatttcagaggtgcagactgcccgttcagtccaaacaacaactggtctctgatccttctaaaccttcccgacattctacagcaagaattgccagtgttttgacctcttgtgccccatgttgaaggccattcttattcgcatgcagctcagccgcagatgtagcctcaaagtttatccccgctagggggaccagctttcccgacccagggggccgggacctcaccacattggtcggtgatccaaactggtcgccaatagtttgcacttccgtcccgtctttctcgcgtggcaagttggcagcaacgtggacctaggcgatcagcgagcgctgctgcgtcccatggttttagaagagcgtacatctgtctaagactgtacctgggtaatacaagcgagacgtgaagatcatggtgctatccggtccactttgtagttcttgcgtacacgaaacagtctacaccaatgctcagtttgaccgaaataggaaatagttccaaatatatggccgatttgccaacggaagttggaagattgcagaacgcctatcatgaatcagttccttaaattacccaagcagtgtttacgctaaggaaccccatcggaactctttactcaacgttttatataaaggccactgtccgacttg

SEQ ID NO: 9050 - DNA, 979 bp, Emericella nidulans
tttacctagctaacagtttcggcaggacggttgacgagacggcagaataatattaaacattattataactagtatcctctctaactcagagcattgaaaactgaggcctgcgagcccggtctccatcgtactatctatataagcggaccaccatgtcttcaatatgactgattgctgctcgataaacccagccttcgggacgttctcttgccctccacagccaggagaccagaatacagatgggatctacatgatagtttgaaaccagtcatgaagcaactcgatcccattttttgtgcgaacgagatcctcgacaacaaaacagattgccttcttgggttgttgacaagcagaaccttggtataatcgacaactgctggtatctgggatcaaaaaaaatatctgatgcttcagtcgccccgctgtgctattggctggatcccagtgacagtgtgcttagggctggtataaggttgtcctgacatgtaccgaagatgtgacaggttccagatgataatcagatatgacaagtaacgtgtatttgtatggtaacgaacggaagctaaagctttaagaagctaaatgcacataaacgaactgtacatatatttctttgtttttccgaagccccttgcctcctgtactgatgtatttcaaaaccagaaccaatacagctctggtcctgtgtgacatattacacgtggatactatctagcccctctgcaatgaaaggagcattggatatcttagccctatataagttcatgaagcgtcttgctgtaggtctcctagtgggtaggaccctgggactcacctcccagtgtcactctgaaaactctcaagagtgaactcctgtggtgagcttgggaaaatgcttttaaaaaggccatctgattcacattaccactgtggaatatgtagcgcactttacttcattagaattccagtatgtttttataggaaaggagcagccaacgcc

SEQ ID NO: 9051 - DNA, 991 bp, Emericella nidulans
cgagcaagctactggacaggcctttacgtcgcagtatggcggggtctatgttcggtcgctgaaggtattcaatcccatgttatatactctcatgagcagctgcatctcgtccttcgtcatgatatgtattttatgcatagcagacaaggtcgggagacggtatgttgtcgactcctggcactttgtatctgctcgacttgctgattcggcccaggaagctactcatgctctcatccgtcatcatgctttctggcatcatcactatggccggcctcggtgttaatgagccggtcaccacacaacggatgaaaggcgtcatctccttgatggttgtttttggcgtcggcttcgccggcggttggggttggttgacctatgtcgtagtgaccgaagtaaactcgctgcgactgagagatcatacctttcaccttggatttgccatcaacgtctgtttcaagtacgtgagcttaccgatattttttttccattcgctggcactcatcgctctacagtttcgccgtcaacttctccgtcccatatcttgttttcgaagacgaagtaggcctataaagcaaagtgggcttcatcttcggtgccgtcgctttcttgtcgcttgtcttcacttatttctgcgtacccgaatgtaagggcaagacgctagagcaggtcgaccggctctttaacaatggtttcaggctgcgcgatttcggcaagactgatgggtctagaatgctggatcaaggagccgtgggatgaaagctaatgacatcgaaacttgttcgtccaaggctcctgtttctccatcgtagccacatggaacagggctgaactgatgggccgtggattgcggctcgaacaaaaatggcaagctacgtcacgccttgatataggtctgattttctgctaaaagggtaggatactacggaatagctggtgttatcttcgcattatgccaatgcggtacttcaaaatggtacttcggtatgttcag

SEQ ID NO: 9052 - DNA, 1283 bp, Emericella nidulans
gacgagattaggttggatgtgtagccgaggaagatagtggttttgtcgccggtttcaggatgccgataggcgcgctgtggaaacgagcactggttagcagtgtaatgaattcaagctcaagaaaaccggtcgattaccatctcattgatgatgcgtgctgcatcagcaacagcgctactctgaaaacccatgtgcttcatattgtcgaccatttcagcaacagtaatatcgcggccttggtacttttcaaagtctaccccgctgaccttgtgagtcccctcaggaacaggttccgaggcgacaaggaccgcattcgtagcggaggaaggaggtgcattatcttgttggcccgacattgtgagtgaacagctgtgatttcaataaaatccgataatattgtcactgtgggagaccgggttaaaggtgcgggggcacatcggaagatcaaaataaaaaaaaaattcgagaagaatgggtaattgatgcctgaggattgaggccacagtaaatcatggcggataacacaaaccgccatcgagcctaaagaaggttcggctcaaattcgtctccatgtatgcccggtatttgaggcattaaatttctaagttaggtaatatgctactagcgttggctccaatctctatgggtctcgcctcaggcactagactaagcctcgattagtgcaagtgccaaaagtcgggctggacaggctgccgggctcctcatggggatccgcattgaagattggaatcggtttcaattaggtggaagcaaagaatccctgaccaacggaaattcatgccagctttctcagctaaggctaaggcttgcacctggtgactggttactactggttagcgactgcttgaggtccctcaatcctcatccatgatccgggcgagatcttcatttctctcccttcccttaacccttccctttccccatcagccttcctccctttttttattcttgacactcgtttacgccattttgacccgacaaatcgggctttgggtcaggactacattcaaaccaacgtgattttgaagactcgcgaggtcgaacaatcgtgggtcctcgtcctctctggcatctgcactgcagttcagacgactccttgcagctgtccatccggccggttgcttgacacgtcgcgtgcggttgaaggtaagaaaactcattctgttgaattctatgtcttttcatctttgtattttttccactgtcgatgtcttggtcggggtcgattcggatctgccatctttgtcacacatggcacgtcg

SEQ ID NO: 9053 - DNA, 586 bp, Emericella nidulans
caatcatcatgatcgagtcagacgccgcgtgattggctccgatgttaccccagcccttggagatcacggcgcgtactccggctttctccacggcctcgaagacgatatccgttagtgctttggagtcgtctacgacgattgacccgaagccgatatatactggtgcgggaccggcgtccaggaaactttgcaggtcctggggtggtttgtagtcttgcgctgtggggagggttgagaagccgaccacgtcaatgttgtcgccccagtcgaggggtttttctagcagggcgggagacctggaatcatgttagctttcgcacttattcttgtgtatctgctttgccaggaataccataaatacgtgtatggcacctgcaaccggtgggcgaggctcggtgcgcgaatagcatccaatgggtccaacccgagttcgcgctttcgaaatcgattaatcagatctccgagtccctcccacatcataatttcaacaatagcatacgatgcgaagttggcaacagacggtttcgtactttgcgattgtacgtttgccaggggatgagggaaagcctgtgccccgggcaggccc

SEQ ID NO: 9054 - DNA, 811 bp, Emericella nidulans
cacataaacaaggcatcgctatacgaaacgctccgtggaggattcgaggccccccagaagatcaagctactgatcaacgaaacaacgataaagtacgtatagtggagggagagaaagttaaacggcggcaaaagagttgatacaccgctggcgatcagccgtagacaacgccgggctttgtgaacagtacagttagcgccgccaataccgggggagctgaggaaacactcacgggtcatggaggggggcgaggccagggaaccgagtgctgagggctacgggggaaaatgggcaaagaaagaacatgattctcgcggatgaaggtaggctgcaaagaaaacccagagcggcaaacaatgatgtgagtgggcagcaatgatcaaggctgaccgcagccttcgcgaaaaatcagcgcaatggatcacgatttggtgggtcgctctgtgatggagcagttgtccaccgctgcttatcgcagcttgtcgcactatagacgccgccacaatcgtgattagacgatttttaacagcaaccaataatgaacgggcaggaacgcaatctttagtgcccaggggctgttttctgctctggcagctggcttgagaggagatgacaaggcgtagtctccatgattttggtgcgagaaaaggcatggcaaaagcttgggtcagccctacgaggggacgggagatttcttagtaagacaccgccaggtcccgttgtcatacacatccaggtaaataggtacaggtacagactcaacccagtgtgtcaaccacatctactcatccttcacgttctcctctcttac

SEQ ID NO: 9055 - DNA, 1545 bp, Emericella nidulans
acagggaaatatgggcatcgtccgagattcacggccaagtcattcaacaaggacggacttgcctgcctctgcttagacaatcatgcaagatacagtacactattcagataacctcgagggttgtatgaccggatagggttgcacctggcacaccctcaacgtttcggctcggcctctactcgcggtccgcctatgtgctcgataattgcaatttcgcagccaactgaggagtgagccagatgttgacgctttccttggaacgcagtccgaaattaactatagcacatatcggaggttaatgacacactccacaccacgatcctagctcatattatgcgaacccgtactgtgtcacgttgaaacgataatgaggacatagacaagcttgtcttgcaacaaccagagaagacattgatgactccttgatgagatagtggcattgcatcctacaccttgtgggtgtgctgtggctctttgctgtttctgcatcctgaccttcaccttcgtcagccccctttccacgggtgctcagatattccgaagtatgacgacaagcggatagggacataattcgggaggttaaactaattatttcctgttctaaaagcgccgtctttgtgccggccgacttacatgattaggccctcgctggagcccagatgatttccgtttctcgcgaaagaatggattgactaatatcgacatctcagtgtattgagactatcaaaacggctgacccggctcaaagtggagtctttagtcccaagggttgccctgtggtggtgcgagtctgcttctgcaccgtttatatgcagcaccgttgtcgatatgcagctcgccgctccattgcggcagtgtaacgcgagcaccagggtcgtgtgctggggtcaatgtccactgacggagtgtcgctagaagcgttgaattattcgagagggtttgctcttaaccatccactgcggagtcccaagcttctgtctagcgggaggtttaggagaaacggttggaaaaaaaagctaagaagtctccccttgcgtgtcatcaagtcctctcacagacgtaggatatctttgtctaattcaatgcaacatcgcaagccaaagcaccaaatcgcagacttgtcctgccctggtcacactgatggatccagagttaaagatgcgcaattcgactggagcctcacaggccgtcatatccaaagccacttcccttgacactactttacagtcgaggaaataggcacatagcaggattgttgtaggcactaccccgttgtgcaccgtgcggtaggccgacattgagtggcttgcagaggcacctgagcaccgctggagaacgaaatagactatcccccttgctggcctaacctttcaggacaagaagggaagagaggcaccgactcatcagatcatacgttgggcctaggctatcagttgcaaactatcgaattttgagcagccagaccgagacaccacgacttgggccgttgaccgaaccgttgaaccaatctacgtaatttgctggcctctacactttgaatcagtg

SEQ ID NO: 9056 - DNA, 548 bp, Emericella nidulans
gggctatctcccattgagcgaatggacccttgaggcattgactgacgcttgctagcttcaacaggggtggtgatgctaaccggaacgtttcccaaagcggccgaatccatggagtacctcacgttctgaacggccttgtctaactccgaaaaatcagagttttgctttgcctcactaacgttgacagaatccagagctagcgatgaacgatttgaccaaggcatgcagcccgcgttggcctcaatatcatcattcatcgcattctggttgcgaccggagagtcggcgagcgcgtttccgaaggtgggagaagaagctctccttctggctgatggtactggtgctgttgtttcctaggccgttcagtgctctctccgcttcttgtcggtggacatcgccatagtgatttccgtgagagttaactgaaagttgacggccgatcttcttgcttgacttggcggcgttggtatttgattcttgggctggaggattggcttgggcagtgactgcgttagatagaggagagacgggacggatggagggtaggat

SEQ ID NO: 9057 - DNA, 1809 bp, Emericella nidulans
aatatagaagaaaaatggtaaaaggaaaagagaaaaaaaaaagaaaaaagaataagatggtaaaaaagataaaaaatgaataaagaaaaagaatagtaaggaagagaataaataaaggaagagaataaaagaagaggaaaaaaatagagaaataagtgaggagagaaaaagaagaatagatagaaggaaaaggaaaagagaaaagaaaaagtaaaaaaaaaaaagtgataaagaaaaaagaaggtaaaaaaaaataataaaagaaagaaaaaaagaaaattgaaaaaaaatagagattaagggagagaaataagaaggaagaaaaaagaagaagaaaaagaaataagagatgaagattaagaaaaaaagaggaaaaagagggatttcgacgagaactataataaaaaagatggctgaaatctcatccctctagggcagattatacacgatgtgtagtgcacaatgggacgatagccgtcgccgacaagctggtggcggatgcgtgccctcatatagatgaagcgagaatcttggggtcaaagggttattatccatatttgacgctggtgatctggattgaacacaaaaaccggtgctttggatgtggtggtgattttgctaactctcctgacgatgggcgatggaggtggtacgcggcggctacggtgatggcgtctgcgaaggaattattgaatactcttgcggctttaccgctggatgatatgaatatgccccgttatctcagaggattgtgggtggatttgtgtgctgtagtagttgtacttacgcattcattgtttataagcgtcgcaacattgagaatgagacagactgttttctcatgcgaggtctaaatctttcctttctaccacgataactactttatttggtaagcaagattcaaggattaatcagacaggtctagaagttcctactccgatggcccgtatcttcgtcaaacaccaggcctccctccacctctcggtgtcttccgcatctggaacgtcaagccagtagatgcactcacatcctcccttgagatatgtcagttgcggagagtgatgatggtaatcaaggtacctagtctagctatgcggctaggtaggtgagatagggctgactcggtccaggccagttgctacgaggtcaaagtagaggccaattgaggcactctagtagaggtgcttcctctcagtccttcagacaagcaaggccagttcatcagtccgcggctacgcggttaggtcggatatatagtcactagcaagcacgtatatagcttgatccacagagaaagcttgcccatctgcttgattatgttaaggcgccaggatactagaggacaactatcagcgtagactcatccagaaatcttgggggagcaattgttgtgccgcagcccctagagttcaagccctagatttgaagcaatgtcaaaatggagaggaaaagggtattaagctaggaggctcgccgcttcggtagtaatttgaagtaggataaagcatggactgaagcttaaagtctgggccatcggctcttcaactttgtagaagcttgttacaatactaactctactagggaggatttggacctgaaaatggagggcaatgataagctctttaccagatagtcttaattggtcaaagtcataggttactgtgtccaagtcggtcttttagtatacaagcattcgttctcttctcatcttactggcttatagtctcgtctcgccaatggaaaggtcgatagccttcatggtgtaaaacacatataaaaagaacgccgcggtattttgagttgtaaagc

SEQ ID NO: 9058 - DNA, 519 bp, Emericella nidulans
ggatttccgaacgtcagctaaaggctgaattagagaagcagcggaagaatctggaagatctttctcaggaagacgagtggatatttgactgctctggatgcggcgttcacggtgagaatattgtaagtttgacactccaaaacttcgggctatgctaacttgcgcaggacgatggttcccatagtgttgcatgcgagaaatgcaatgtttggcagcacagcaaatgtcttggaatcaagcaggaggaggcggacggagaggactttcatttcgtctgccgggattgcaaacgtcgggaggaggaagcaaaactcccgaaattaccgccgctcaaattcaaggttgggtcttcgccctcttccaacaccgatggtcatccagagacgaaagccatccaacctaccaacgaggatgcggtggttaacgggtcgcctcgaagcagccttgcctacctcagcctactcagcctccgtttcctacatctcctgaacgccgacctcagtcttcatatgcgagttc

SEQ ID NO: 9059 - DNA, 941 bp, Emericella nidulans
atcttcgggcctctccgacctgcctgtttgggtaatcctgcatgctccaacaggcgaccttttctgtagccagattttccaatcttcaccattttcgagtacagcacaccccccgtggccctgaaatcctcggccgtttcggggtcctaccatcgaagttggatggagacgtatcacggccacgtccgcacaccggcggacgccattattctctttgaagcatgtcgcatcggcctgctgcctcgcgtccagcggcggctttctgagaaggagcgccagctgatccagtccggctcggttttcgtctgggatgaacgggaagccggtatgcgacgctggaccgacgggaagtcatggagtgccagtcgtgtttccggcagttttctgacgtatcgtgaaatggagggcaagcgaggaggcaccagcgtgtcaacgcaatcgactagagctgggaaaactcccgactcagcacgcggcagcgacgacgatcggggagaggggctcgatgatgggccggacgggtaccggtataagcctgacggcctgatgaagcagtcgttcagtatcaccacctcgaccggccagcacctgcatctcatcagctattactcgcggtcgcatcccaacgccgccaacctcctgcagccgtccaccgacccagccctgcgcagcgtgcgtccgcaaaagggcctctatccggaatccaccgttaacgatcagcaaaatctccctgttgtcacacgcggtccaatgaccggtgcgccgtacgcagtgccgccgcctccaccaccgcctcaacaccatcccatggccgcagcgtatgctcgctccggcgctgctcatccacaatcatacgcccctggatacgcctggcctcccacgccgctgggcactcaaccggctgtcccaatccactatcccgcttacatctccccgcgcca

SEQ ID NO: 9060 - DNA, 537 bp, Emericella nidulans
ctctttgcctactaccccgtcattggaggttcctgtgctcactgtctccccggctgacacatctcttcagacgaagaatgtggtggctcagacaaagcctgaggagaagaagccagcgaagaaaagaaagtcctggggccaggaattaccagttcccaagacaaacttacctccaaggtgtgtgatacctcaagagtcaactccttactcctgctaataactaccacagaaaacgcgctaagacagaagatgagaaagagcagcgccggattgagcgagttcttcgcaaccgcgcagccgcacaaacctctcgcgagcgcaagagacttgaaatggagaagttagaaagcgagaagattgatatggaacaacaaaaccagttccttcttcagcgtctcgcccagatggaggctgagaacaaccgtttaagtcagcaagttgctcagctatccgcggaggttcggggatccgccacagcactccaacttccagttccccgcgtcagtttcgccaactctcacaccgactctttttaag

SEQ ID NO: 9061 - DNA, 1305 bp, Emericella nidulans
ccatttttgtcaagaatataatacaacacttcgcagcagttgtggtatatacaagaaccagtatataaaaccgaatgtgatggcgaacgtagacaataagcgcaaacaagccaatatccgatgaatgtacttagacggtcccttaacgccgagttgagaaacagacaattgcccatactatttggtatcccgttgcgttggtaggaaatttccaacaataagagacggactagaatcaggggagtcaaaaatctgacatagatcgtggtagttataggtcacttacatgttatgattatctcttcggatagtgaatgaaaagcagcacggtatcccttccgtcggcgaggtggcattcgggttctttaaggtacagctcgtgagcattgctttctgggtgttatcgaaggcgatggcaccgaatttctcccagtagctcacgagctggtcttccacgataatctcatggatagccagcttaccctatagcgtacaagcgttagaaccatcctgagcgggtattagtaacaacaactcacgtctctgagaagctcgattggaacgccgattaattcagccatctctttgttaccgcggaaaatttcacccgtccgcctccagcagcaagcaggtatcgccatactggcaaagacacggtcatactccatcaaacttcgctcaaaccacatctccaccagtatgagttcaatatccgtcagcttttgcatcctgtctcggaacttgggtcggaatttgtccagttgtcgagcgatcttttgtcgcgacgatacttgtagattcttctccatgtatgcgctaagccttgcataacccttaacgtagttgaaaggtcgcagaagaccggcgtcatatttcgctttaaggagtttgttcatgcgctcttccggtggatctgacccagcggggtctgccgccgtcatataatacgtttcccttgctttatcatttccaatcgtagcgcccgaagcagtgtcaccttgattttgctgactctgctgtggttgtagagtttgtgattgctggagcagtgatgtactggggcctccgagtacggccatggaatttatcaacgtcgggtccgaatacattctctgcatatcttcgttctgaaaaatactgccatcgtccaacagactgttgctgaggaagtctcccagaagattgtattcgttcgtaacctccggcgcgttgaacatataagaaggatggaatgtatgcatgtcttgaaactgattttgaccgccgacccagtcattgtatccgagaactacaaagatatcagta

SEQ ID NO: 9062 - DNA, 414 bp, Emericella nidulans
tcctctcttctgcatacgctctcaagaacctcgagacatgggaacacaaggtcagtgacaagatcgcccgcctggtcaagcactttgacagtgtctgcaccgcgcctctccctgccggccaggaagagcccgaccccgccgacctgacggtcgacttccgggcatggaccaacttcttcagtctcgacgcgattgtcgacattgggctgagcgagaaactcggcttcctagatcagggacacgatatgtgcacggccgaacgcaaagatggcacgacctaccgcgcctccctccgcgacgccctgtaccctaacgcccgcaaacaatctctcctcctctggaactacgactggtacccgatcatcaatcgctgggtgaacatcattccttacttcgccaagatgcagaaatcca

SEQ ID NO: 9063 - DNA, 367 bp, Emericella nidulans
tcagaaggaatgccacaattaggggatatatgaagagagaaattcgctggctgaagaacgctctcgaccagaaggcgagcatagcctggagtagtctgatctgctatcaggctgacacagcaggtcctaagagtacataaaacaccttcaagcagtcgccttggcgcactcgcctcgtttctcttgactgcctcgcatgaaacttccatagggaccagcaaagtagagggtagtccaaaatcatcaccggtcgacttgccgcgtttcctcatcgccggacagacaaccagctgcaccagctgcttctgcttctctttggctcccatctctcctgtccccagcctcattatctctggatcaaatagaa

SEQ ID NO: 9064 - DNA, 739 bp, Emericella nidulans
gcatacaagttgcaaaccgcgcctagccaaatgcttatcatgccgaagcatgccattggctatcaacgagcggagttcgcctcaaagccaatctgggttactcggtatcaagacgacgaactatacgctgccggtgagtttacaaaccaaagcaaacgtgccaacggggtagagacgtgggtgcagagaaatgatgttacggaaaatgaagacgttgtcttatggcacagtaagtagattccttccgtcaagctctagcatcttcaagcaaatgtggcttccagacagaactgacattttatctcagctttcggtctaacgcataacccgcgtattgaggacttccccgtcatgcccatggagcgtatcagcgtgatgttaaaaccggacggcttttttacgaagaacccagcactggatgtgcctcaatcgacgcagaatttcaacaagtcaacacttcacccagaatcatgttgcgagtctgtgaagagtaagatatagataggcatactatggcttgactcatattcaatgacatacaaatctctgttatttctccataaaccagcatacgtataaaacaagttccaagctttaggcgtcaggagataaaaatcctaggcgtaaatatgacaatcttatatataagctgttatccagcgtaatcgattgcatacgacagagtgtggagaagagggcttccgtccctacttgagccacatacaacacagataatagt

SEQ ID NO: 9065 - DNA, 464 bp, Emericella nidulans
atccgccacctcggacgaccggaaaagaacaatgcgggctcagcacataggaccataaataagttctagtagcaatccggcatagaatcactcggtagaagtcatttaagatgggctgatcccgggatagaagtgcaggcgcgagcctcgagaggatgtggcaggaccgtagggattcccactagggctggtagatctctgtggggcatggccagagcgaagcaaaaccgtttttgtcgagattgcttgtggtcactggtcagaaagactaaaaactactcggtagtatccatagcacatacggagtagtaggtccgttagatccctggggaagtgaaaataaagaagcccggcagatggcggctctaggagagctctcattcgtggtttcggtacgagagaccagccaatgggagcaatctccaccgctaatgcctcatctcgtccaagaggggaaagtacgc

SEQ ID NO: 9066 - DNA, 294 bp, Emericella nidulans
aatctaaatggccatacaagatgcctctggatgaaacttaagttggcagcttctaggacagtttaatatatgagtatatttcatagatttgtctattttggaattggatgtaacactgtacgatgtgcaggccagacttagacatgcgtccagtgagtagggatgcctatgacagtttatctatagttgatagtgtagataatataaatagcttttaaatttcatctcaataactctctcctatataccgattctaccttatgtagtaagttgcatgcttgattcctgttgcat

SEQ ID NO: 9067 - DNA, 804 bp, Emericella nidulans
ccagtatatcatcctcaggaaatctgaacacatgtttcaaattctactcggccgcgccggccaagcagctgaacgccgtatgcgaactgtaagctaccatcttgtatccaagagcgtttactgaaagtatgccagagaccatctacagacggccacattccctatgccagcttgtatcgccaaggtgcagcctggggcgccggcggcgtaggagtcggctcgacgctgtatggtgtctataagacattccactcaatgagggcgtttaggtatatcaggtagcttgccggtaacgagtgtcttattttcttttttgttttgtgctgtacaaaaatggatatcaactggtttctgttaattctccagaccgtattttggtctctagacatgggatatgggactatggggtccctagtagcatagggaggaacctcgtcacgagaagaaataaagaattggccagactcttagtggcgacaggctagagtcccacctgctttcccatggttatcagtttgagctttccccaggttagcagctcatttagcagcccaacgtctatcgttacccggctcttgagcccttagaatcaaatgctactgattaagattggacgaagtaagagggaattcactcccggataggcttcatgcaatcaccgacggcgcctgacctggctctactgcaacatcctagactcatcaaaccggccaagctcggcgcatagggcggtgaagaaactgatagaaatcgagggcctagtctgctcaagtacatggtcgtacagctgacgtcagacgtata

SEQ ID NO: 9068 - DNA, 1132 bp, Emericella nidulans
tcgaggccggccgctgaaagacattcgcatccgtcatacagtcatactcgatgatccatttgacgacccgccaggcttggtggaaccaccggagagccccctgccaacaaaggcgcagttggcgactgtaaggatcgccgatgatgaggatctcggggatgacatggatgaagcatctatggaaaaacttcggcgggaacgcgaggcacgggcgcaactctgaccttggagatggtcggtgacctcccctttgctgaggtcaagccgccggagaatgtcctgtttgtttgcaaactaaaccctgtgacccaaggtacaacagattacatcctattttggggggagcgtacgctgacagatggttacagatgaggatttagagcttatctttagtcgctttggaaagatcttatcctgcgaagttatcagagataagcgaacgggcgacagtttgcagtacgcttttatagagtttgagagccagaaggattgtgaacaggcatatttcaagatgcagggagtcttgatagatgaccaccgaatccatgtggacttttctcagagtgtgagtagccgcctctgcagcgtccttcgatccaatattaacaacaaccctaataggtatcaaaactgtcagaaagctggcgtgatgctactgtgaagaaacggagcgcgcaaagaggtggtttcggcggtgttgctggccttgagaagaagcgtcagtacagggcaagcgaaaatgctcgtgaacgcgccaactacaacatggtgttcgacaaaaatgacaacaggcggtctgcgcctcgtgaacgatcatacagtcgaagtccccaaagaaacaactaccgggatagaagagatagtcgaagtccacggcgagattcttaccgaagccgatatggtgataggtccaatagtcgaagtccaccactgcgagatcgtgacaggatcaggaccgactactatgacaatgatcgacggcgtggctaccgtgacgatgacagatatagagaccgccgacgtcggtagcagaagcccctgacggagttctgaagctcagcgagtactacccataagccttaagttaatgtaaataagacgagtgccatctctagagcactgtcttgtcccc

SEQ ID NO: 9069 - DNA, 1285 bp, Emericella nidulans
tgccaacaatacgaagcaaaacatatatatggtggtcttgtcactttttttttttatttccttcttttatttttcgggtcggcctcaactggaatatattcatacctgcttgatatagtcatgcagaggtcatgtaacctcgctcgatgtaagatagatgcaaataccgcgaaattagagtatgcgcccggcgtcggcgaacattcgaacttcacttctcctgtgttattagaaacttcaaaacttttattcttctgacgtaccccgtctggatggttcgagcagcaacatactccccgtagacaagtacaccaaggaaccttaatttggcagctatgggatttgcctacgctgcgagggccacttagtaagaatatctgctgtctcaaaaagccccctacccgaattagtacattatgtcttctattttggagttggattgtctatggactacgtaacttcgaggcaaaggcaggttgaggttgtggcttatacagcccataagcgagcagagtagacaccttccatacctataccttgcgacagacgaacaatttagagcgacccatggtattgggcctcacatatttgtcaaagacggaaatggtgtgggagaagggtatggatttgggacgatatccgtacgaacggtgtgtctggccaaatgtcccgtcaacctctgcacagagatgaaggcgttaaaagagccggaaggtatatacgaactcattccacatcaaaacatctacagtaatcatggattttggtgcctcggcgagaggaaaggcagcgtggcggcaaaggtgtatcctacagactttgaagaacaaagtaagcgcgcctgggaaggcactcaaagacggaagtgaaaaggatcgaacttcatcatgaggcgatgtagcttcttttggcactgttgagcgtacgattgcttctcagctaggtaggaatgtcggcactgcacctgctgcaatggagttcatggcggcgtttggcctcaaccccgagcagtgtggactttcccgatctctggagaaacctgtaggccatagacacctttatggactgataagagcgtgtctgaacttggcgcgacgtttcatggtccctaacaggacacgagtatcttggcaatatagggcaagcgacgggttggccgagtatggtactgatgctgctccattaatcaaggatttatcctgtctctggcgaattgggcaatatgcatcttgcccactaggcgaggttactcggaataggacagcactagggattggtgacttgc

SEQ ID NO: 9070 - DNA, 506 bp, Emericella nidulans
tttttcttcacaaataaattaccagcatgtaaaacgttcatgaatgatcttattagaagacacaagactgtttaaatgagaaccattctgtgtacagctcattcaagggctcaaccttgactactgatgtttaaataatactaattttataactttaggaacttaatgtcattttcttcagttaccataatatgcattcctactgaatgtttaaaatttattttttaacagaaaaaaatatatttttaaagcagccaggttttactggcttctatcatgttttactggcttttatcacatttcaaaaagtttgtctattaaaagttcttaaaggaaaacaattgggtatttacagagatattacttttcttggtgagctcaccaagttaaatctctgcttgcaactatgggaaaatattcatgtttacagtaacatatgaaactaatacgtttccttatttagccattttcagattgaatcttatttaattcttgagaaccttaat

SEQ ID NO: 9071 - DNA, 641 bp, Emericella nidulans
gaacaagcgcccttgtctactccgtcaacgccaattgttagcggatctatgaaacgagagtcaagcactgtccgtgcagtcaacgatgtgacagtcgacatcaaagtagatgggccgccagttgacggtgagatgacaccaaagccagacaggacacgagactccgtcgagcctgatgccaccccccgagtccgtatccgtgaaccatcacgcggcccagatgacgacaaagacgttgaagagctctcattgcaggatggcgagaagaagaagaagacgcgcaaacgtggcagccgcggaggcaagagtcatagacgcgggaagaagaaaattgagagtgagaaagaggaatctgatcacgcccctggcaccttgcaacccccggctgggcccgatgccgggttagctctcacccgcactgcatctaatgaggtgtttgaagcggacggtgtcatccagattggccgtttgaaggtctttacggctgacgttctgggtcatggaagccacgggacagttgtttaccgcgggtcgtttgacggccgagacgtcgcggtcaaacgtatgctggtggagttctatgatattgcatcgcgacgaagtgggattgttgcaggaaagcgatgatcataacaacgtta

SEQ ID NO: 9072 - DNA, 809 bp, Emericella nidulans
tttgagatgttcttctttgacatccgttggttctttggcatcgtggagtcgagccttggggaagactttgaagatgccagaagccatggactgcccaccacgcatcagcggcacgatcaaggtttgctcctcgtcgagcagtcggtatccggcaacaaagtttccctggggatgacgtatagctaacacctcagtacctatgagctcaactaggtatctagtggctagataacgcccggcgttctcatgggcctcctgcaaggacggtccgcgaatactgtcatcccgcatcggagtgctcagcaactttgttgcgtgactatccgtagcgtggtgaagtcgtacgccaccaggtcgcccgagcggttggaagatctcatccaagaacgatttctccgtgaggttggcgacaggcagcttcgcagtatctaacagcggcggcgatgtgttgactggcagcaaaacctgacgagcctgcaaaccattgtctcttatctcagtcaacagtttgtgctccatgctcttgctccggctttgctgctcgccgaccacaacgacgggcttgtgagcagccctcatcattggcaggtcgagaggactatctccaaacgcccaagtatataccgtgtgagcactctttgcgcgggtaatcaggcactctttcaccgaaggggtaacgacaaaaccgtctttgattcggcccccgcccacgaccttcactacatgagaaaggcctgctttttctataatcttctgccacacacgttgtagtccgcaggtcacaatgacagaagaaacgtggcggtagt

SEQ ID NO: 9073 - DNA, 1312 bp, Emericella nidulans
tttattccaacagggtgggttttgtttcagacgcacttagactgatgaaaagaccaagctgttccattttgcataccaatagccctcttaaaaaatttctgatacagttccagctgcatggctcagttgggactggtgcataaactcaaccgtaaaaaggtgcttagagcacgatccctaatgctcaagacatcaacattaacatcatatatggcaacacaaattccactactcctcagacccctgagattcgtctacctcagttgtagaagccttgctcttaaaaatcaccgggtccgctctctttctattcacctgcagctggaagacatccaaccgctggtacccacccacaacatcatgatactgcttcccttcgacacacctatccagctcaaagtccgcatagataatcccctcctcgtcttgaagaaactctctcttttctttctttccgtcttccgaaaagacaaacgccggatgcaccgctcccgtgggatcaaggaacatcgacgctccccgcgacgaattctgcaacacatgctttacggcctgaggcgcacttgcgccctcagcgatcatcttgactgcggcgctatcggtgtcgggagccagaaaccccgcacagagtacgccgaaacatttcgcctcgaagcagtgcgcagcggcgcgcgtacgatttgccgcgacgttgtcgtagttggcaccccctgaatcagtcggggctctcgtcggccagatcgcaggccacgtcgagatatggatctgctctgcctgcgccatgagcgtatatcgcgcgaggggattcgtattctcgccgcagatcaggttgccgatgttcccgtgcgccgtctttgagacgcgcagaccgtgcccatcgccggccgcccaggtgagtttctcgaagaaggtcggcatcagtttccggtgatggttgaggacagccccgttggtatctatcaacagattggagttgtacagagtcgcagtgctgaagcgagatttttcggaaatgccaatactgacgatcgtgttggtttctctggctgcggtacggatggcggcgatttcgttgccgtcagcgaagactgattcagccaccatccgttggaagagctcgtgattatctgtgggtggacgcagggcgctccagataggaaatgcgggaatgaacgtctcggggaagacgatgatctgggccttgttgcgagcagcagcgtggatgagcgagacggtcttggacgttgttttagacgccgagaggaagataggggaggcatgacaggcagcaatgcggacagccatgatggag

SEQ ID NO: 9074 - DNA, 814 bp, Emericella nidulans
atcgcctgctctgccgcgaaaagattatagacagtgccaatcaaggacatatatctcggagccactttggtcggactctcattgcagtccagaagccagcatccagtgccgttgtaatccatgttgcgcggaagaatgatcgagaataaaggttcgctaaaggttcgggtgactcaagtcctacgattttggcgaagttccgacagaaatagagccacagaactactacgactgtggtttgccagacggtcaatcttcgggaaagacgagctgaaatgccgcggacgacaggcggaccgtgtttatttcctctatcagggagagctcagtcaatggttgtagcataaggataccaactcccgcaacataccttaatagataatatgaccaaaacagaaacacagcaatcacctgtaccttgcgaaacctggttgatggcctccccaggacgtgatctaggccgattcttagtgttacatcaggcatgcccgggcgattcagcatacctatcattgccacacgctaggaaagtgtatcgaggagatgtttgtgtaacacggcaagccttcagtgtgcacgagatgataactggatgatcgtcacacagagtgtatggtatcggagaaaattcgtcctttcagagttcgctgacgctgagatatgagaaggagcatgcatagatgtagatagcagaacggtcaatccatcgcaatttctggtttgcggttagtcaagccaaagagtattcagaaaagagacaacagattgaggccacataggcataagtgagagatcagatacggaccagagggaa

SEQ ID NO: 9075 - DNA, 362 bp, Emericella nidulans
ttgtccatgcacgcttggttaggatgaatgacgacagactgacactgaacacggtaatcgccacagaccggaagcagggaaagaactagacgatgtaaaatatactacctcgccttgacacgagacaacttgccatatagtatgcgtccgattaaacgaacggaaccactgtctctatcgctgcacctttcactaacgcccgccaaatgaccaacgccctgacgaacatctcgcactcaacgatagactagctgaaactgaacagcatgaccgccgctagagtagctaactagcagcgttaggctcagagcactctttatagccctggatttgaccgtgcttggcagctgacacaagggcaa

SEQ ID NO: 9076 - DNA, 941 bp, Emericella nidulans
gatcttgtataattctggctatagccactgtgaggatgaagacggtaacgatccagcttccagctgtagctcgtgtgatccagcccagagagttacttgattgcagagaacttctgaagacccggttatacactacggtataatcgcttcaagcaaccaggtcgtcaaggacagcgcgctgcgggaccgcattggcgcagaaatcggtgctatctgtttagaaatggaggcagcagggcttatggacagcttcccctgcattgtcatccgtggagtctgcgactatgccgattcccacaagaataagcgctggcagcggtatgccgcggccaccgctgctgcgtacgcaaaggagctgctacatacagtgcccaccagcgagctgattgccagcccctccgcagtgcagatacttcgatcaggtcagtcaagcgggttttgagacctctggtctgtttgactaacatcctcgtagagctgtctggaatacgcaacgatgtgtaagcccatctattaattttggttaggaccgacccaggtcaagaactaaggttacgaaggcatacaatcaagcacagggtctacctgaatgtgctccccctagcagagggggctgcattcgactcgtatgagaatgaaatgagtccgcactgtcattcagaaactagaagagaactgctctgtcaaatcaatgactggtcgtgtgatcgtaacggtaagagtatcttctggctcaacggcatggcaggaacgggcaagtcgacattagcaaggacagtcgctcgctccctgcgagcagatggacgattggccgcaagcttctttttcaagagaggcgacgtctcgtggcaatgctctcggttcttcaaacaatcgcatcgcaagttgcacgagcatacagcagcacagacacaccaggaggctgtcagagtaccctatga

SEQ ID NO: 9077 - DNA, 249 bp, Emericella nidulans
tatatcaggtctgagaggttttatatgcattagtagaaatttatgaagcttaaagaggagtagagtggtttgaactaatgtgaggatttgttatttaaggatagcttattttctgaggatctatttatatacccttctttatattaataataaatcttaaagacttagttaattttaaaattatatttattaatattaagctatagtcctgctttgcctagtttctagaaaattagttatatataatta

SEQ ID NO: 9078 - DNA, 539 bp, Emericella nidulans
gtgtggctaaagtggcaggaatcaaagatgcgatggaggactaggaagccatccggtccgtcatttctaggagctcgggtgccggggggttatgtgctgtcctgattgcattgacgccgagatcacacagtagctccagttgccgctgtcgtcgtcactgttgaacgccgctcctaaagcacctaggtcatgatgctggttgacgccttggatacgtactggcgcgccgttaactgagaggccggtgttcggattgtactctaccgaacgaactccgaattcggtgctgtaggtatcgagtaggtggccacttgcgtcgtataaagaagtgacggcaatatacagattgggggtctgatccggtggaggtccccataggcggggatctcgatggtcgtggacgcggacaaagacttcttactgtccttgtcaacgataaccttatgcctggggaattgttcgacttttcgaccgcgcacatggccattcgcagagtcaaggtcaaagatctccgtagcgacctctaccctctgtctttt

SEQ ID NO: 9079 - DNA, 519 bp, Emericella nidulans
aaagatgtcaccatggcacgacgatgactcggagtccgcgcatcccgcatcccgcagcttccgcaatccgagccctaagtgtcaggacacagtcaccttggcgtcaagctgccatgccgattggatatggggattcactgtgtagtacacaggcgtatgacgatgaaaggaatacgggcggctgttatgtttgggagaacgctcctcttttgactgagattcaagctctcgctgtccctctcgtatatatccacataaattataaaaaaagcgcacagagtttctgcagcaccaattagtagttggctaaaataaaaaaaaaaaattaagataatcaagaaaaaaatataaaattgaatagaaaaatggcttgtcttgtaacctgaaatcatatgcgaaattttcaagatcgaaaatataaaataatccaaacaattttgggagaaactgagtattcccttagtaactaagattcacaagactgagatattttcgagtaaatggcatgaaatagcatgt

SEQ ID NO: 9080 - DNA, 363 bp, Emericella nidulans
tcgcgggtgttgtggtgcgctcgggcaagacggtcggatatcgaagatgacgaggtagatgggttatttggtgatggtgggagagatatgataggcgcggcggaagtcatctgctgttggcgttaggaggtgcggtgctggctgcacgtgatcttgggcaatggcgatgagttccatgatgataccctctaagacgcggaaagggctctggacgtcgaacgtgaagcgaacactctgcataacttgctgctctggagagataacatatactgctgcagtgtcgtcttgaccgccaactggaaatggcccaggggcatgtaagacctgtccgtctagctggtaacgatgagggcgcttggcatg

SEQ ID NO: 9081 - DNA, 1569 bp, Emericella nidulans
caatgcgtcttctccaaaatctcctaccgcttcccaggcaacactcagatcctcgatctctgcatatcctttgcagacttgcatgccaccggcttccagcaccaacgcttacactccgacccgacaagatcacctcggaggcaggcccctgggaagccctttaaaactggtctatcgcctacaccccgcaaaatccgctatgagtattcttacggcgacgaagaagacacagacgaggagttcgaggaagtcaactccgaatctgacgagtctgacgaagccaaaggttatatatcaccgcctcatggcgcctctcttcatgaatctcagtaccttcagcgcctgaggaatatccaggaacaattcaatcgcctcgttgcgtttattgccgcagggctaaagggcgttgggcgcgttaatgggcaggttagctgggagatgttggctgagaagttggaatggaggaacgaaagggtgactgggtggtcgtaattttcaccgctgcagtggttccgagcgatgtggatctatctttttcatttctttacgtgcattagtttggggttggtgttcattaagaccggatggaaaaggacggggtaagctggcgttcacaaaaggtgtaaagggggtaagtttgcagtgattttctcccaagggccgattgcagtatgaatggagcatgagcaatttgaaataatgatttccattgaatctaacggtatctgatattggaataagtctttttgggatacatatcttcgtagcaaagtagcacagttttctcagctctcatatgtacgcatgcgcataattaccataacaacatgtcaagaagcaagtcagcaagaaacgattagagaagtcaggtcgcgcaaagaaaaaatttttttgaggaaagtaccgcggtgcctaaccaacccaccgtctcgcgctgaagaatatccgtccccatggcccaatatcaccccactcctctgccttggccggcaaccagctcgcaataccgttcataacggtcctttcaggatgtggcatgatggccatgacacgaccatttgcgttgcgaataccagcaataccctcgggactaccgttggggttaaaagggtacttcatggtgggcttgagtgtagcgttgtcgacccactgcaccggcgccaggccctgagcgacgaaggaagctgggtctgtagaggaggccgtgaaggaggcgcgaccttcgccgtgtgcaacggcaatggggaaggaagagccgtgcatgccgtggaggaagacagaagggttggacgggtcgggatcggagatgcggaccatagcaacgcggccttcgtactgctcggaggcgttgcgttcgaaggtaggccagtttgaggcgccagggatgaacgaggacaggcgggaaaggaattgacagcccttgcagacgccccaggcgaaagtatcggggcggttgaagatgactgtactccgcgcggtgtatcgtgaggagcctgattggcccaccctgccgcgccgagactctcgtagagatcaccgagccggagacacaactgatagagaccaccg

SEQ ID NO: 9082 - DNA, 482 bp, Emericella nidulans
tttctgtctagctcacgaccagagccttcacaccagattccccttcaacatcggaccagagcaggcgcagacatttcgggccccgtccgttgtcaccaccgtcgtgaatccagaggaggcagttgaggccgtgcccagaggagaagccgaagtgttagcatgagtgatgccctcaaccaaagcgcgaactcaacaaccgctcgcagcggctcaacactgtatccgccgtctcgtgttctagaactgggactgagcagacgctcacgatcacgatctcgctccaacatccgcgcacgatcgtccagcgtcacggctgacgttcgccgttcaagctcaatgatcagatcaacctttaacaggctgagcggcaggcggaaaacaaaagacgaagaaaaggaggacattgatgagattgagaccgagttagacgaactcgaccttttaccgaacgaaccaagaaaggctattccagtatttacccc

SEQ ID NO: 9083 - DNA, 369 bp, Emericella nidulans
gatctctacttatacacactgcttctctaccatcccaaacaccgcaccctagtcttcacaaactccatttccgcagttcgacgcataacacaacttcttcaaacgctacaacttcctgccctggctctccaattcatcaatggcccaaaaggccgtctacgttccgttgaacgtttctcatcttcaaccgcgaacccaggcacgatcctcgtcgccactgacgttgcggcgcgcggtctcgatatcaagggcattgactttgtcattcactaccacgcaccgcgcactgctgacacctatgtccaccgatccggccgtacagcacgtgcgggcgcctccggaaagagcgttattatctgctctccagag

SEQ ID NO: 9084 - DNA, 1798 bp, Emericella nidulans
tccctgccgctcagatattgtgcgaggatggtggtcaggtgaaataaaaagccctaggcatgggtggttcttcaggcagcctcaggctgcattgggcggctcttgcccagctgcgagggtctcttgcttcaagtcaatacgtgaagtgaacatggtgggagccgactagatattgctatcatattcccagaatggctcagatttagcgctgaggataggttgtcgcgcggcagggagatatatgttcattagatatttgcaacgcgttgatgagataatgtaaaggcaggccattactagcgtatcatgagctcgcagtgtcattaccgctgcttccaaagttctccaaggcatccatgagattttcccaggcctcatccacactcgttccatttgcagaacccgctataccaccgagcacatcactgatattcaccccgccaatatcgatatcaaacaaatctcctaaattcagctcgctcaatgcgtcaaggagacttctaaataactgcccaagatcgacgtttgtcagaatctcgcctaatcccctcaacacggcgctccagtcaatgtcttcgaagatggcgccgagatcgatctgcgagatgatcgggccgatactgtcgaatatggcgtcccagtcgatattagacagaaacgagccgatgtcgagtttctcgaggataggctggagctgttccgacagggaggaccagtctacgctgctcacgatggtgctgagcgtcgttgcaagcgaggaccagtcaatgtctgcgaggaaggatgctacgccctgcagcagacttgtccagtcaatactttgtaatatccccgccacgtcgaggtcctcaaaaaacgcgccgagatcgagttgttccaggatactacccaggccgtggacgactttcgcccaatcaatcccctgtaggaattcattcaggtcgatgccgtcgagcagctgtcccagatttagattggtgatgatctcgcctacactcccaacaagggaatcaaaatcgaccccctcaaacagagccgcaaagttgatcttgttgaggatctccgtcagggactgtatcacaccctctgacccctcgccgaggaaatcgctaacggtatcaaggaggatcttgaggatcgatactctggctgtgatagtgagatcattcaacacccgctcgaagtagggaatgtgctcgccgttgaagatcgtttggttcccagatgcgctgagctcgacctcgccgttcctgagcgcgtctgcttgcgatgagaggattgaaccgatgttagccagtgcagaggttatgtctgctttgccggtgaagccaacgctgttgtctcctgggaggagggtaacgtccggtaagagggcggtaccgaggaatatgtcgccggacttgaggttgagggttacgtttccctgtgatgttagcagtgatagcatgctgggctaacggaataaataccaaagcaaaagtgacaactgagtggtttggcagtgttgctttgccgcgcagatttgacccatcgcccatggccgggataaggagcgcggcttcatcgatggagaaaccgcttaacttatcgagtcctgtccgatgacgctcgtcagtcatgtttctcatccacttggaagcatgactattagtgaaggaaaagaagccataccatccaattccacgtctttatccaacgtgagcccggccttgatagccccgagatgccccgtagtcttgcccagcgcagacaatgtgaatctttttgaataaaccgccttggtgagcgctttgacgaa

SEQ ID NO: 9085 - DNA, 105 bp, Emericella nidulans
tgcgtccttcaaagggtcagatggtgatatttagccctgctccaggtcgcagctgcagcggacattagatcttcgataggaacccaataacactatctgtcccgt

SEQ ID NO: 9086 - DNA, 296 bp, Emericella nidulans
  unsure (1)..(296): unsure at all n locations
nnnnnnnnnnnnnnnnnnnnnnnnnnnnnnnnnnnnnnnnnnnnnnnnnnnnnnnnnnnnnnnnnnnnnnnnnnnnnnnnnnnnnnnnnnnnnnnnnnnnnnnnnnnnnnnnnnnnnnnnnnnnnnnnnnnnnnnnnnnnnnnnnnnnnnnnnnnnnnnnnnnngaagagttccatcagtcatcagagtattgcagatagtagccataagttctgttaccccatatgccttaggcgcggacatgaatctaggtctactactcctttagacaggagcctacgtgggatataatagag

SEQ ID NO: 9087 - DNA, 709 bp, Emericella nidulans
gatgtatattaataataccaagtgccgtcgagttacccacacctcccactgttctccggacgcacttgaaacgatcggtcgctgtctccccctcggtttattcaactgctctcctctcccctctcccctgtccttttcgctgttttatttgagacctttccccgctacgtgcgattgggcttgttgggtatctccgcccgccgtccaggatcacagttgccggccgatccagacgcccgctttcagcgcacctcacctacgacgtgactcgatttgtccgccgcacgtcagcctgccagccttacttcctgtcctgtgccgttggatgaccgccctctcttttaaagtgactgtgaggtctcgtgcagcgcacaagggctcccaaagcgtttggcatctctagtgaaccgccgactccttcttttccccgggtcgtcgacggtacgtgccgcttgtgtgtggtgttttcttcaagccctttttgtccctcccagccgcctacccctactccttcgctcagtcggaactctactcttaacatcgttggctctgggagaatgccgcgacagtctcgtgatatgtcgctttgaaactcctagaccattgctgactggctttctggattacagcgcttggtcgctccgacagggcatattccgccgaccattaattatctccctttatttccgaacgactgtctctcccgtga

SEQ ID NO: 9088 - DNA, 1956 bp, Emericella nidulans
  unsure (1)..(1956): unsure at all n locations
tgagtaacttcggggcatataaatttgcaggtacatatactagctgtgtgactcgttatagttacttattctccatcggtgaagtggccgttctccaattcgcgcctttaagcaccttcaagtccacatagcgggcatcaattccactatgtgtatcgaaacctttcaaattcctaccgcaaccagtcggatctaaagaaacatgccgatggtgggctaggctccagccctttagcgtctggggataataatacgtcattaatgaaaccgagtcccaaaagagaacaatgaaaatgacggtgacgatagtgaagtcggtggccttaggcatgactcggtctctcacggaacaagcgtgccggacggtggagcgacacctggcttcccattacctttggacctggagttagtgccacattgtggcaaaatacgcttactctggaagtcggaatctcagaacacgttgtagggcccggctaaatgaagaagaagataaaaagaagggttcttcgaaccttagatgctttgaccatctgtcatctgccatctgctctatcggcccatcgttcctggtgacaatcggtcattggcgaccactagcctcgctctttagcctcgccaagagcgacggcgtgcgacggctccccttctttcgactggaggaggggttacggtggctcgtcgatcgagaggcttagccgcccttctggaaacattcgctgcatcgctccaaaaccatcgaaggcagcaagaatgatgatgctgatgataatgatgacgatacttagttgccaattccggccaaaaggggctttgccaggcacccggagtgtgtagagtaggttggcagccctaatgagtgcgacaacggttagactctggagaagcgaagtggctgttcctgtggatttgatgtaacccagcagcgccgctttaattcgctgagattgtagtatccaagatctctaggatgccattgagagccattgagaaggcacaggaatcttggaatcttagaatcttggaatctgaagtcttctttcatcagtctccacgtcgcaatgcagacagatgtggctttttgctgacttggctttggccttggagtgcatgattcttgcagcaggctcccaggtttgccttcaccggattcggccgggccatcacgggttcccgatcagcgagggcgacgacgataagtctctgacagttttactccatacagtttgatcaggtcaaatgtgggctgcgggttaaacggtgttaagtcggatgtggatgctggatgccaatcacagtctctaccttgttccccatattctccatcgggcccagctccattggcctgtataattaatccccaacagacccagcctcgctttcactgattgagtctgatcccaatcattccatactatttattgatcggttgggggctgaatattcgataataatacgattcttggacaaatcaacaggttcctctggactcgacccggtctgtggatcgggcttttttccttgggggtgcctccctttcttttcaaccttccttatttggcgtgattttaaccctctacccgtaacccacntgggtcatttctgtgcgacgatgggctaaggctttaagatcatcctggggtttcccaatattgtcggccaaaccttgttgaggttccccctggaaaacccctaagttacccctctttgacccctgtgaccttcgccctcttacttggggcttcccccaaatggccttaaacgcatcctgggtccataacccttcgggaaactatctcacggtatctctataaggctctttggacaactctgtgtttgaataagcctattctttttaacctcattattactcctaataattccccaccctcttaccccctttccttccctcccatctatgcttttcgcaactgaatctctcttctctactcccct

SEQ ID NO: 9089 - DNA, 1261 bp, Emericella nidulans
attcgccctatttgctctccttcaatcgcccaacaaaaccgcctgaatcctgtcttactctcacaaaacgacatctaaatcgcgcaatttctcgcatgcattatcggcgaattggcttgggttattattatacctatttacctatctacttcacttggagcgagcaaacagcagtgcaagaaaaccagaaccacccccaactacaatcaccctcctctacccgacagccaccgaggccggagtcggggtgacctcggtccccacgagtccctccttttcagatgatgtcggccactcactcattttacctaaaaaaagaaaagaataccacctatttgatgctttgactagcaaacagccttacttacactacctgatttttgcatggcggtggtggaatcgatgcttgagtctacctacgactttctagtagtcaagacgtgatggaatggaatgatgttgaaacgcagttacgatcttgcagcatgagacaaaagttatttagcctgataccataccaggttgcgtcgtttcttattttttttaattccccgggcgttatcatgacctaggtcgactgatttaccatggcttgatttgattcgccttggcctctggctggctgtttggtcaattgagtgaggatttaattacatctctcttctggtcattcctcttctttgggtctttttcctttggctctgcattgtagcgggtttcctactatttttgatgtacttgtactattcacggattcggaagtagacaacagccccagatgcagcgaatacttacgtactacatgtcatctacccattgctcaaaatatcactgcatccttacgtcttatgagactcgctggtaaatgtatattccacgatcattgcgggttttctcctgatagcgcaaagccgagctgccgtgcttgatacgtatcgtcagtatgatctccgactcgatcactctgctacatcttagagcaggcggggtgatcatcacaattagggctttaggtcagtcttggactggggctcaggaaaagcaatatgtgtcttgtatagattaggtttgaccatgtatgtacctatctagggctagcgcaatagggctgggatgtggagctagatcttgatattctgggcaaactagatgctatcagctagtcggggtgatactcagatgcaaagcttcgctgctacactgccatttaggtgtagttggctcttctactgtgccgggcggcggttcttgcaggtgagtg

SEQ ID NO: 9090 - DNA, 434 bp, Emericella nidulans
ggggggacccgaatgacagatgccgttgcctacagagaggcctaattgcgctgaagaaggacccatggtcgtacctggtagctgtggaagaaaggcatacgatgacaatcccacacaagataccaaccgaaggcatagagagaacagcctggagcgcggaccgagagaactaagtgagatctattgtaacaggctaagtggcggactaccagtctgaagacctgacccgcgaggtgcttcaaagaatcgatcaacgcgcgtgctgaggcgcattgcgctatgacagctctgacaattgcttattcactgacttgcttatctcataacggcagacagggacagcgaactcaggtaactcaaatacaggagaccggttattcacactagcgggggatcacgcacgatagaacatgggagcaggaggacagcataag

SEQ ID NO: 9091 - DNA, 1069 bp, Emericella nidulans
ctgcagcgtcaggaagaagacgtcaaggcaatttcgattgggatcgtgtgtgggggagaaaaaagacgggttacgagaagtcagtagacggtcggtcggggttcgtcgtcgtaatggccggagaggagagtccgcgagcgagacagagtgggttgggcttggcagctcccaactcatcgatcaggctggaacggtgcaaatccggggtacagactgtaaacgaggccgcggagggacgaggaagtcagaagggacaaatggtcgtggaattctgtgaacagacgagggaaatgccgatcgttggggctgaggggggtggtttgcgcaaatcagcacgacagccacagttacacgcactgtgtacctagtaatccgtacctcctacagcgagactcgacgcccgaggctgcaggtttcgcaacgacgcggagtgccaggaaatcgcctcgacaatctattctaatgcgtactctctaagtttgactgggtgcagagtgcacgttcttctgttttgacaggagtctatctgtacaccacgtttacgagcccaggatctgcgatccgacctgcgatcagtcctgtgatgtactcctgcgatggagtgcgtctcaagcttagagtctacagtctccagtatacgatgtccaggttgaacgcacattcaaaattgtcagctcatataaatgatgacctatctacagttcgtctttgaagatctcttcacttccatccacatctggatcctctccatcttccgatctgtcatccatcgggtgcccggcctgccctgactcggtctcttcctgatggccaggctggccaggctggcctgtggtttcttgtgtattttccctctgttctctcttgtccgtttctccctcttcgttttcatacccatcctcttcatcttcgtctgtatcgaccactccacgaagatatgcaccgttgccggtcacaatctctagagtccaatctttacccttggcccattcctccagcttcttcctgagctcctcaatttttgcctcgtcgaggtcgaatttcttcaactcctctgccgacagcagtt

SEQ ID NO: 9092 - DNA, 493 bp, Emericella nidulans
tcgagttatatgactggtgcggatatcatcatagatggcgggtataatcttccttaggcttgtgtactgaataaacaattttgagatagaggcacggctactcaaaggccggcaaccgattcatgaaatccatgattgttgattcttgtctatactcgtaggtcagcaaacggctacgataacaaggggtaggatgccttagaatgaagatataggaaaccgtacatgattgaattcccctcaacccccaatcccattcccatatccaacgtcggccacataagcggatacaggctcgccagctgcgtttgcggcgattcctctgtcggcctccagccatcgccattcacaccaataccatctctaatatctggcccttgtccagactgcaggtaattcccgcatagatcagtaattacgcgcaacgacctccgtgcactcgagttcatgagcgccattgattccagcacctctatggcctgggatatttggc

SEQ ID NO: 9093 - DNA, 1160 bp, Emericella nidulans
aagtcgtcgaaagaaggatggagaagaagtctcaggtggcctcggtcgtattggccgcgatgtcggtgcgggcgctttgggccgtcgctgtagaagccgcatcgcggctaaaggactactaccgcagcaagagccgccaccgctctcactcgtttgatgatgatagaagctcccgttatagccatcatcgtcactacagccacagccattctcgccacgggcgcagcgcagtcgatctcattcgcgctctcgtgctagaacatttgcagagattggcttgggagtcgctgctattgctggcgctgtagctttggctcgcaagaagtccgacagcggccgacgcagtgcatcccgttcccgtcattttcgatcccattccgtcaaggatgccggagatgacaagcgtagtcagtcccatcgccgtaagcatatggcagaggctggcttggccggtgctgctgtagccggcttggtggagagagcccggagccattcacggtcacggaatccggtctcgctctcgatccaagagcaggatcaggaaagcacttcccgtcgtcgcagccggcttaggatctgctgtggctgcgaacatttgggacaagaagaaggataaagaagcagaagaggaaccgcgccgtaaagaccgtcatcgctcaaggtcgcgtgggcgggcgccgtcagatatttatcccgactctacccgtgactccgctggcttaatcgaatacggcgatcatccagtgcacgggagcatccctgccgcgaactactacggccgtccgccaagctctccgggttaccacacagatgcctctgaccgagtcgccagggatgctggacttggctcgggacatcggggtcgcactcgtagtcgcagccgcagccgtgctagattcagcagcagctctccctcgagcgaagaagaccgccgtaggcgcagaagccgccacagacaccgcagccgctcccgcgatttggccggagctgctcttgcagccacgggtgttgggtatgcagctcataaatactcgcaacatcggaaagaggacaaagagagagacaggcagagtaagtggcctagatactagcgccagctaccggttgtgcaggtcaatgctgaccttgtccattaggatatgacagcgatggaccgagtc

SEQ ID NO: 9094 - DNA, 690 bp, Emericella nidulans
aagaactattatttatgttcttacaaggattaggataacttcgagtatggcggctttgattgggtgtggtcagattaaagcataccagacctggaattgggacttcgtgcaggcatgtctgagggactgaaagggggtatggtacgtaacaaatgaggtctgcggtgaggtatttcactcatttaacttcgttctaaatctgtgtgtcaatcatcagtttagtaggagtgattagagatagtgatatatggcccgtgaaacttcattgttggattaactaaacaagttctaagaaagtatcctctcactattcatagtgtctgatatcgagtcaggaactgagcgggaggaaaagcaaatatcaaatccataagtagttcatagttcccaatatgcccgtaccgaagttcccacctcagcggaaattgtatgctctcgcttgtaaaagtttaaacacaatgtagttgtgccacttcacactctgtagaactatgttcggggctccaagcttcagagaacaactacgctgattcgtatattgcggaaaagtcttctcagaggggtgatgtgccgcgcgcatagtcacttgttttcatcgcatacatgtgtatagatcgctagtttaattcggctagagaacaaaaatcctacccatcgtctggcgaagtgtctgacgaagtgtctggcgta

SEQ ID NO: 9095 - DNA, 1936 bp, Emericella nidulans
acccattcatgaattcaccatggaagcagtaaccgtctcccggtgtatcgctgcacgagagctggaagggcggcgcggcgctccaccgctccgggacaacagaatttgtatcgtagagaacgcggtagcaagctgtggtatctgctgcattccggtgggacaggcgttgcttcgtctgcaaaatcatacccagcgagatatcagggttgacgcagttggggaaacggaggttgacctaaggtgttgggtgcaggtgcttgtgggcatcttggcaatatcgctttcgtgttcgtcagagccctcgcagaaccattcgaggtcgttagaggggcggtacgcttcagactgggtttttgcagaggcgttgccggagatgagggccaagtcttgagagattgcaagggtggagtagctgtttgtgtagtaggtgctgaagcggaagatgggaacttcgacgaaggtagagtcggcgacatagtacagtgtggggatccctggattaagataatatgtcaggtcaatgcagcacttgatttaggtagctgataggtctatttggcgtcatacgtacaatagaccgacaggtcgtttgggttgtcgccgctgtagcagccctgttgaagctcagtggacgtaggtagcacgttagagctggcgtcgcttccgaagaaggtgtgcatgtgcgaggtgtaggtgcctggaacgacaatggcgtcgatgttcttgattatgaaaggcttatgatggagctcggtccaggcagttacaagactggtaccagccaaaagaactatcagagagagacgcatagcgagaggaacaaaacaaaaggaaagtaagagaatgactactgattccagatcagcgcttgctgcaaagaacgaaggagcgatagttcagacacattggatctcgttcatagagcatagctccttttatagctgcccacgacaatatcactatgtacatcaggtgaagggtcaggaggtaaacgatgtgcccctttgtttcgtatagaacacagcacccagcaaaggaacttgaatacagctaagtcacgtatctcgagttactgcattgtggacttgtggatccacttcaacctactcactgaccaagatattaaacactgcttaaaagggaatatccgccagtcggatccccatattgggaacagccgccagatgcccagaactgggcggaccacacagtggtgttttcctatagaggcccacttggccagccggctgttcgaggaactaaccagtggtcactcattcagctttctggaagtcaatagatgccgtcgcttagccctacagagactccgctgtccctctgtgaaaagccacccctaggtggagtacgctgcgccactgcgccagagtattactgatacacggcttaagcgaccctcttgggaccctatggctaattcctcgcaatagggctatgaaacgaaacactttgtcccttaactgggcccagatatagttttctttatgctacattacaaagttttccctggcttcctttaaatcaaccctcctggctcccccccctccgatagtggtcatctacttatgataaaggtttccccttctcccacatcttatggctatttttgttcttccatctcttctattgtactgcacatatacttcttctctcttactccatctcgaactattttcacccacatcattcttttccttatcctatctcactcttctccgcaatatacacgaccttttttttttttcacccttgcatgtcgtatcctcactctatcttcctcctccctacatcttccttctcctctttcttatcctttatctgctccctctttcattactttgtttaccttcttattatgctactcttgttcatttcaaacttctattctttttattctcctttcatatcttcctatctt

SEQ ID NO: 9096 - DNA, 1850 bp, Emericella nidulans
atcattgactgtttaacatctttgttcgattcgaagctctccaaagtgagcttttccgttggctccttggagaccggttgatccgctgctacagaagcaacatcagatgcctgatcgtcctcagcagatggcgggctaacgacaggctcaatagtcacactttccgaagaccccgcctgcgccttttcgccttcacggatgcgcaattcccgtagatcaagtctaacgcgcagtctgtcaaagaccgtgctgaccatttgtgtgagggatccttgagcgatttgttggttctgactggactttgagtaaataaacatgttgtagatttgccgaacagctttcagaagacctgctccatgcaccacaattttgtcgttcaatactgcagccagaagggatttgattatctgttgttggatctcgattggcgtagcttcattttcgaagcaatcgcatatagcgtcaatggctcgctctataagaggaggctgctctgccgtagcatctgcctccgatggcttggcttcttgcgccgatggaaatgcaaaataagagtaggtgattagcttgccgatgcaatcgagagccgttacttgcaagggaatgcttagagtcctgcttgcgagtaataaagggtagaacagtatctccgggtcgataggttggcggtccgactgcttgacattggcgagcgcattctttacagcgtcctccagctctttgctcttccgagcttcccgcgacgcaccaattgcatccagagctgtcacaataaaaacagtagagctgactaccgaggaccgattggtagcgaaggttgcggtagtcgatcgcgagtccgatcgctgtcgcatatcctgggcaagctgctcatcgcgagttgacggcgcatctggagcttcattcagttgttcgtccgaagcaggaggctgatcttgctgcagagtttcgagttgatcaccttctgtatgtggttgttctggttcgtcggtaggctcgtttgaatcagtggtagtatccggagacgttacggagggctcatgaggcaggttattcttgctgtcattcaatcggttgttcgccattgtgtcctcattctctttaattgttgggatctcctgacgttctgattcatcggttaatgctggttttgactccgcgactacctccggggcgtgcggttctgttgcaacatcaaccccattctgcttgtctgcctgggtaactgatgtttggttgagctcgttcgtagggtcgttctcagcttcccccattatgcaagactccgtctggagtatcgggtaccatattcacggaacgtacggcatgttaagaagacagctcatctaatcagggacgatactggggattgtgctccgaaccttgccatagtgctgttttggccccgacctaaattggccccttatttggtgagacttctgcggcgctttcgttgcatactcttgaggtgtgtgggttatacgtgcatgggccctgccccccgttgaacttgtttacaccccacaggcttggcgtcggtttctcttgctgttccccctaaattcccgtttacaaatcgccgggtcctttttttttctagaaaaaccccccactggtcccttattttaagcgaggcctagcttctctttaacggctcttcaagggttattcctgtaaaaacctttacagtggcttctttccccagttttttcttaaacattaaacttttgatactactgtcatttagtgttttaccttgctatataataacattattatctttctccctttctcttcatcctcttctttccctcctcttcatcctctttaatccttaccttctttcctct

SEQ ID NO: 9097 - DNA, 962 bp, Emericella nidulans
gatcagctcgtctgctaagtcttcgatacgtcgcgatatttccgtcatgattttcgcacagcgtggagccgcgtgtccggccacttgcgctcctcgcaaccgcatgaatccaaaacgaaccagacgggaaaccaagaggaagagcctgcacgcccctcgatactctcacaaggtgaaaggcagaattagggggacaggtcggggcaaaaataaggaaactgacgatgaaataagcaaagaagcgacggaagactgcagagcattagtcgcaggacggacagatgtagaaaatagaagcaaacgaagtagcgcgagaggaaaaaaaaagagaaggataattcaaggaaacgctcgtctccttttaaattatacctcgaaagagatgcatcttgtctgccgctctccctgtccgtcgctgtctggctctccttcattctagtctgaaccgtcacaaagcttcactttggtatcaactgcagcgaaggtgaataataggcggcgggccccagacacagccgcttgcagcacattggtatgtctgacgaaatgcccccagtcccacacatcgccagtcccgtcgactaggctgacgagggtcgctagcattatctgaaatctagtgacgctgagggcgactcgtctgggccaaccaaaaggcgaacattgagcgaatgctggcacactttaggtcacatgattgaatcggcatgcggataatcagcgcgaacctgcaggacaagactggctgggaacagaaggattggtagagaggacgagagagtgagggctagcttgggataggaggtggtagacgtgatagtgatgggtggtggatgggcggacgacgggcggggaagccaaagcgtcagggagcgctgggagcgtagagagcagtgggttggtaggaaaggattcgaaaagcgatgcggacgatacgagtagatgcgacatgacggcgagat

SEQ ID NO: 9098 - DNA, 547 bp, Emericella nidulans
tctttttcttcagggctcagtcctttttgctcttcctgttcctctttactgccttgatcctcatcagacttcctgcccatatcctgaccgtccagtttcgagtctcttcgctctgcattctcaccctctctctccttatccttctcctcctcctccctcctttccttcttcttctcatttatgaaccaaggttgctcttctttaatatgattctccgatgtatgaagcacgtatctccaattctgcggatggacctctggccgttgaagatgaaaatcctataccaaccgtcaatccagttcccttttcaggtctctgtgtcttctccaggtccaatctactgacctgctgcttcgctaaaaaatctctcacggtaaggagctctcctctttcaaccttccttttcagctctgcgatcttctcttccgcctcctcctcaagcacaaagcgccagtcatctccagagtgccgtagaccggggaaacggtcatcgcgcgactaggaccaaccccgatggctaatgggttttcgtcagtccggctcattg

SEQ ID NO: 9099 - DNA, 1625 bp, Emericella nidulans
actttctcaaacgcctggtactaaccacagatagcaaggcgtcagtaggacaaacagacttagagataaagtggaaggaagaggccaaagacaaagtatacaaacttccaagtacggaacgcgtctcgaaccgttttggactagcgccctccgcgtgtcatgaatctctagtcccctccagcttcttttctacccaagcttaattcccactcatcgaacttctcaccactacaatttgcttacttactcatgttgcgcgaggcttatcaaggctgggattgagcttatccggtacaagatccacgaagactagccgtttggactccccgaacaaccgcaatcatggctccacgagcgtcggtgaaggctcgcgatttcgactactcaaatgttggaaaagccggaaggtatgcttcacaagcagtcaaccaatacgatgttacacgtcgtttgcagaccgtcgggaacccaactaactgtcaacagacgcacgggtatcacactggcggaaggcaagcgggacgaacatggaatggaggaggtcgacggaatattttcatcaccagagaaatcacccctcggcgataacgggcttgatactagcgagtcgataggctccgacatgtctatggacgagggtaattgctcccccaacttccgtaaccgtaacgaagctgaactcttaaggcaacggccccggccctgctgactttctcagcggtaccaacggaacacgcacacctcgcttccctccgcccgtcccaagatcaccgtcaaagtccgggattaccgggtctccgcgcaggacccctggcctgcggtcctctcaaagcccacagcgccatcgcccatcatctagcccatctgacggcagaagcgtgagaagagattcacggcgagaagtatcgcctctaaccgaccgttccgttaacgctacgccatcactggagcactcacatgccgcgcgcaccaagggttcgaggaaggcagagaaaccggcacggatcgacgtttccgatagcgaagcaaacggcgacgagaatggagactcaatggatcaagacggttttgtgggtagttatattaatggtgatgatacaacgctgggaaatgaccccgaggaagtcgaggacaatagcgccgaagagagaccagttcagagtcctccgtccaacaaacgcaaagggccaagaaagggacgtaagccattaacagccgcgaaaagcaggcaaaccctcacagcgcaagacgcatcagaggaacaagagacaacacagaaacgaaagcgcgccgggcggccgcccaaatcgcaaaaccaacccacagacgatatcgaagagcgaagaccacagaaaaaggccaagacaacagtgccagaacgtcgtgtttcaggcccctcaggtgatcccgagttggataaaatggttgaaaactatgtcaaccggactggaccgctcaagggacgaagcctctatattcttaaacgcgagaatccagcggacccatctgcgacgcacacccgatcaggacgtgtgtctgtcagaccgctggcctactggaagaacgagcggtgtgtgtacggtgacgaagaggcagcagaaggacagcgatttcccctttcaaag

SEQ ID NO: 9100 - DNA, 1618 bp, Emericella nidulans
aggagaagtgacaggaagggccacgggcgaggagtcgcagtgatttgaccccaagggagcacagattttgaacctgaaattccaggcatccggtgccagatcgcatttcacgttggacaccggagggagggtacagtaataacacaaggacagaaactatacatctacctaagatctacttcgttgacgaggcaagagggttgacggtctgattgtctaacgtctttgcatcttgtatacgtgttttcgacggggtgttgatctatccccgcttactacggagtctcctccactgcttatcaccttcacggccaactccgtagcctcttcagtaatactccgtactgagacaaccttttgcagtccagtctataacgtagcgtacaatctgcattctgcgcggagccaagctgcggtttcaggcactagagcccgggttaacggctgctagaggaaacgctggaggaaccttaacttgggagtctcatgcagggatgcgcttcagaataacattggcggggcatgcactgcaaacacgccagccgaaaagtttcaggccagagacgaagtctgtaatagtgctgcacatctgcttgacctccagctcgacagtctcaagtatggaggagggcctctatcccctatccttgttatccttccacctggtagatatagtcggggactcggggactatgacagcacacaaggctgcccacgcttgagtcgctgccactctgcttcaaaacctttctcgtaaagtaattggatagtcagcattgtgtcacatgggcgagatgcctaagcattcaatagtagtaggataggttgatgattttgaatcgtgatgatgctggaatgcaatgtttgttttgatgggctcgcagcctgaaactgagtgccaactttcagcatccgcgcgggcatccacctcgcactcttttcctcattactgcgcgtctcgtatccccctccaaccacaaccattgccccttgaatatccgaaacgatcgcttcctcgggaactcgcgtgctcagcattcagaaacggaccgggggggcacgactgcatcactacccaccgccttaggcagaagctggcgctcaactgaggctctgagcgggagggatagcgagggaaccgtggaggaacagagacgaggccggtttgatcatcgcatcaattaaaacctgatggaaaggacttccatggcgagagatactgatgcgtcggacgccccgatccctcttcgtctcttcccttccgacctcaccgcccgctctttgtccgcccccttcaaggtggatgaaggctatgcagacgatacacgaagccaggcagataaggagctcttgcggataccctcagacgatgtgatgtccattcctgactgggttcttgctcatagcgagactgaaagagccggtaagccgcagtcactcctctccgcgcctgtcgtgtgctgcccagtggtcgatatgaagctcacgattagctactttcctccttagaaatcgcctatagtctgctacggactctgcgcacctctactattgctggagtcgtggagcgcttatcgccgttattgcatatggaccctgttctcagattgccgccgga

SEQ ID NO: 9101 - DNA, 1549 bp, Emericella nidulans
tgatttggaaggaaagcttcctcttgtcggtacctacaatatcagacagattaggacgcactgccggaccaaagatgcctctactggatgatccgtagagcagaatatagctagttggtccattcttaggctctctaaagaattaggaatatcccctacaaggatactgaatttcttgcagctttaaaaaaacatcggttcttcgttaggacctcacatgatcggctccagacttcatgagcttgctagcccaagtattagaagtatactacgataagatcgggcgtctgcataggtcggttgctgattcttccgcagagcatcgagcagaggattccatgctgctgcctcaagtgcgtttgcgcttttagccgaccttttgagtcatagtgctagtgacgcagacgatgcaatctactcgtcaggaattatcttgttgcatgtaaacgggttcgcatagtcgatacgtaagaaataattcataccaaaagcttattccctgagccataaagatgcgactagcgaaaagacaagggcaatgtttaatagcaagctgcatccaggctcagagcaacgataccagtggcctcatgataagctcctcttggcgttacatctagtacaatgcttagcccaacatcttctgcctctggacgaacgtctcctatgcatatacggtagaaagttacctaacacagaattccgccgtcctagtagtcatcatcggttgaacaccgttggcgtcaaatttgcgtctccggcaccgcctcttagagctttgcaacctgtatagattcagatctaggctcagatcagacagggtgccatgacccatccttctaagcggcaccacaaggacagcagtcttttagggatcaccgatgcctcacacagacatcatttgggcatgatgacattaaatttgacacagcgcctgcaaaagaggactagactcaatctcggtatcatctctgctgacatacttgtaagacatgaatgaacgcgtctggccggcttgacatactcagtatctttagcagtgggaatcccagacctgtacttttcggagagttgactatctctatatgaaagctaatacactaaatctgaagaaaaaagagagtcacagtatgaattgcacagagctatatctcttccagcctgacctcaaacccagctaggtcgaatgcaatcaaggagaagacgatccgagaagcagctctaagccgcgacattcatcaagatactcttgactgtcatatattcctcaataccctggcgtccgccttcccgtccgtagccagattctttgacgcctccaaacggactctcagcggcactcagcgtgcccatgttaatcccaaccataccaacctgcaggctctccgcaaccctccacatgcgcggcatcgactccgtaatgacataactggctaacccgacgtcacaatagtttggcttggcgagcacctattcttctggtttgaatgggtacaacgctacaactggtgcaaagaccttttcccgagttgtgagggactcggtagac

SEQ ID NO: 9102 - DNA, 522 bp, Emericella nidulans
gagagtgaagatagtatgttgctgaaccacttctgtcgccattgtgaaagttaacaaagtgttatagcattcgtccgccccatctatgcgggcaacgcaattctaaccgtgcagtcgaccgaccccatcaaagtcatcacagtgcgcggcaccgccttccaagatgccgaagccactggcggcaacgcctccataacagacggaacggaccccaacgcccccgcccaaaccgaatgggtctccgaagagctctcgaagtccgaacgccccgacctagcaacagccccccgcgtcgtctctggcggccgtggcctcaaatcaaaggaggaattcgaccgcatcatgatccctcttgctgattccctcggtgctgcaattggtgcttcccgtgcggccgtggactctgggttcgcggataatagtctgcaggttggacagacgggaaagaatgttgcgccgcagctgtacctgagcgtgggaatcagtggggcgattcagcacttggccggtatgaaggatagt

SEQ ID NO: 9103 - DNA, 750 bp, Emericella nidulans
cgcccgtcattttccttgccgttcgcttccatgccatgttgttgtcacggtattcagcttggtatgattgtttggcttgttgttcgtatagagtgatcaaaccctgccactctggcccacttacttccctagcaaatagggtcaacgcactgtaaacccataattcccgacgagcgtaagcccttgctgagccgtctaacttcatcggatccttctgcgaattagctgccgcatcagcccgcttctgtgccgctacttgataggcgatgcccatgaactgtctgagccgttgaagaaatgatgacgaatagaatcgatactcctcctttttgtccttgatagcacgcatttgaccgatctcagtgtcggcgtacactcccacggtaccatgtcctccagcagcatccagacgttttttgttatgccagatatcggggtcgattgtcaacatagctttgtatagagtagaaagcgcaacgtcggtttctcttaacccgtcaatattgctaagcgatgcctctttcaaaggttgcagatcgtttacagatatagaaagcgtcttcaacagggtctgtagctcgctatgcagaagcttctggttggccgtctggacctgtaaaccttgagattgggtctcaatatatgatacgtcgtcgcgaagtgtctagattttcgttagcagggtgaaaaatatcgaagaccttggggatgactcacattgagttcgtgcgaatataacgtgagtaggtt

SEQ ID NO: 9104 - DNA, 931 bp, Emericella nidulans
taagcaccagcaggggcagttgctggaagcagcgtctgttcttttcaacatgaatgttgaggaaccgaccaccgcaaaccctgatgctgagtcggagacttcttccgcttcaccagacgcctcttctgaactccgcgacggactcagctctgcagagaccaccccgccgccgatggatgaagacaacagtgatgacgacatgtcgatcgagcccgagaaacccttcggtgtcaacaacgcggctccgcagtactctcactccttccagtctgttcctgcgagctcgtttacagggagcgcaccgtggccttcccccggattctcgcacttccgtcattcgagcattgacgcccgtcctccaaccgccgaggccaagcttgccgatgatgacgaagcggatttggctgctgctatcggtctttgcaactttggtacaccccggatgggaccgacatcggcgtctcctggtgttccaccagtgcccccgcttccgtcccgcttcctcgaccaggctagttcttcggagaaccgcaattttggtcggtcagggtcaggggctagcgttactgataccaccctcggcaactcccaccaggacatgttcctttctttgtcctacaatccttcaatgtcgtacaaggtgtcggacgagcgcgaagctaggctagggaacacggaacgcagcagtcgtcaaacccgcaacgctgatgttgattttggcagccgccccgctcacgcggatgacgatgacgacggtgtttttggacggatggaggaataaactagtcctcacacccgtctagtcataccgagtaactcgatttctttaaaccgcctcaaactttatacctctcatgacatgtacgaaaccctgcgtgaactttgcgaatgctttgactagttggagttggagaccccctttgcgtgtatg

SEQ ID NO: 9105 - DNA, 859 bp, Emericella nidulans
agctttcaatacccctttcaggaaatggcggtagtcgatatataagccttctgtgtagtagtcttggatttggccaaacggttgctgaagcaggcccacgcttgacggatagtttgattcttgataaggaattgtgtaggggagatggccgctcgggctgtagtcaccaaacagaacgtctgtcaaagagtagccagcttcctggcctgggagatgggcgatcaggacggccttgacgctgtcaaggtcaatccattcttcgaggattataggtccaactgtgtgaatcacgacgacgacctgagagaatctctcagctgcggctttgacaagttcatcaccgttgtgccatgcatgtaggcccgacgtctttcggtctcccggattgccgtcgaccgtgatgtaattttcgccggagtcggaattgatgaagacaattgcaatgtcctcgtcgtttgcatcgacggacgacggaaagctatcggtaataaagaactctgctgtaggggttatgttggcaattgcttcctgaggtgtgatgagatacgggagtttagatgtgccgctgccccaccccatagtgagaacgcccctattgcagcctttgtctgcacaggagtttaagccttgaggatcaggaccagcatctgtgccaaagaccttcaatgagtcattacgtctcaggggtagtaagtccccttcgtttttgagaagtgtgatggcgtccctcgcgatactcgcgctgtgatattgtgattccctgaacattcacatactgattcacgacaccgatgggagaaataacggcgcccggatagagaagacctttttcattctctgtgttgctagagaagttggg

SEQ ID NO: 9106 - DNA, 1710 bp, Emericella nidulans
aggttacactcaacattacgcgaacacgaagttccggactgcaggccgcatattttgggtatgcacttttcaatactgcgcataacatgttttgagtatcttactgactaggtattctagtgcctaccctctcgcttccctaggctacgcaaactggctactccgacactacggatataagctcgtctttatcttcggtctggttctttatggtatcggagcgctgtgcatgtggcctgctggtctgaaccgatcattcggaggtttttgtgccgctacattcgtcatcgggtcagggcttgggtcgctcgagacagcagccaatccgtaccttgcaggtaatgattcttggtgcactatactagttgtaacacctgctaacccacacagtctgtggccctccaaagtatgccgaaatccgaatcaacctagcccaagcattcaatggaatcggcacagtcgttgcgcccgcccttgcctcgtacgtgtttttcacccacacagaagaactcggcgaaccttttaaaccccggcgaggggggggcccttcccatcggttggtatcttcgcgtgtcgcgtaggcagcagttttcttcatgtccaccatccccgaagtgacagatcaggatatggcattccaggtcgccactacgcacgtcgatgaacaggacaagccattctggaagcagtataagttgttccatgccactttcgcgcaatttacgtacactggcgcccaaggttcgcttcccagctcacctactgtaccagattgttgagcccatttgctaactatgccctgtagtcgccatagcctcctattttattaactacgcaaccgaaacctggcccgcggtcgacaactcgacgggttctaaatatcttgccggcgcacaggcagcctttaccgttgggcggttcctaggtgccttcttaatgaaatatatccgcccgcgatgggtcttcctcggctacatttctggtgtcgtcgccttctgcgcagcgtctacaacacagcgcaacgagactggcgtcgccatgctcttcctaaccctgttcttcgaatcagtatgcttccccaccatcgtcgcattgggtatccgcgggctgggacggcattacaagcgtgggtccggcttcattgtgggtggtgtcagtggtggcgcggcgatcccaccgctgcttgcacatgttgcggatttgcgcaatgatacggggtttgcgtttatcgtgccgacgatgtttatggttcttgcgtggacttatgctgttgcagtgaattttgttccagcatatagggacaccgttgataaggtggggagtagcgacattggacttacagggagcgcacttgataatgggggaaagaaggatgggaaggatgttgaggctctgggggttgtcgagaagggggaggtcgttcatgtttaggaaatgggtgttatctgggtggtagttctgcttatttatgacagatatgaattatgactgcatcataccttcctggtccaagacgctatccatgtagaagtagtacaaagtagaaccatatatgtaatttctctgacgttttctaggatatgcatctgtggtcggacttgctctaagcaaagggtctatatccgaggcatacaaacaacaggtgagtaccctcatagtcctaaatttatacattcatattttataatacaataatctagagatacaccc

SEQ ID NO: 9107 - DNA, 765 bp, Emericella nidulans
gtacacattgtccacggtgccttcatgaatccatccaaatggaccctgcaccccacggttgagatgatcaatattcaatccatcaatgcgaatcctgctgtgtttcttccaaggggtcggtttgccgtcctcttctgcctcattgccaagttgcgcgccagtgaagctatgagtttggcgaggatgaatagtaaataaagagttgtcaaaggatccggacatcatattggccgatagaaagtcgtagaagagccactgtttcctcaactgcggaagatcgcaggagaatatgcttaccgagaatggtctaaagttattgggctggtatacggtcacaagcaagtcgctcattttgaaggagtcgatttcgaagtccccgggattatgctcgtgccgatatgatttaggatcgcgaggttcatcaggccaaaacaccgatctgcgatcaaccactccgcgcacccctttcacctcaacgtcgcgaaggagtcctttgccgttgatccacctgccaaatgatagtgttacgttgactgtttctattgaaaggtcgaattgcgtgtaattagtatcctcctcttcctcggacgaaatgcgctgctctaataagtcggccccggattgatcacccagatgtgcagcggcggcagcggcagctgcagtctttgatgagcctttactgacatggcctgtcgcttgacccggtcgcctcgatacaaagacattcttgaaagtaatgacgccatctctccatttagggacgat

SEQ ID NO: 9108 - DNA, 1140 bp, Emericella nidulans
ccatgattttccttaaagataagagagaggaggcggagatcaacagctccgtttcccttcccctgccaataccaggacatggtccgcgccaaagatttttctattaagtggcaaaaaggaatgaaagcgagaaacaaagataccagagcatattaactatattaacccttgcgattgctaatctacgagacagctagtacgctttccttacgcctacctcccatctccttctgccttcgtctccgcctccgcctccgcatcgcctagcatcacgaagcgacgagtttggtgaataataatggcaaggtcttcatccatagcacagactcaagcatccagtaaagggaatgatagtggctctatatcctacgaaaatgatgtccctgtcaaccaggtcacaagcttccatggagttctgaacaagtatatacatgtttccgagacgaagaccgaaactgtcggtttcaattgctctacgcaagagtcgaaacgccagctatatactgcagatgatcccgatgccgacgcgcggacgacgccgaaacggagaaggggagttcatgctcagcctgcatgtcagactcagaatgtatcagcgatgacgactggaatcacggctacccgccgcatcacccgctcccagtcccgctcatcgacaccagcatcctcttctgcttcgccctctctcacagttccatcgacatcttctagatctgcgcctgaatcacaatcaccaacaccgtcagccagaatcccaagacattcccgctcccgctcccgcggcagctcaactccacgcaaaaacacgtcttcgccgtcctctcttcccgcctcgacatctcttctccgcgacaccattccgccaaatctgacgctcctccttgtcggggtgaatcccggcataatgaccggcaccacaggcttcgcctacgcccatccttcaaacctcttctggaaactcctgcactcctccgggatcacatcaattcgccatccaccctcggatacatatcggctgccggagctgtacaatgtggggaacacgaacatcgtcgagcgtccgactcgagacgcgagcatgctcagcaaagctgagatggatgcgggcgttcccgtgctggaagcgaaagttgcagcgaa

SEQ ID NO: 9109 - DNA, 1819 bp, Emericella nidulans
tcatgaccttgaaatgtagcaactctcagagactctatcttcatcactgacaagaactaggtaacgcctgttgccgtgtttaacgcatatgccgacgcattcgccggggcccgggtatatgccctcacttcgccttctcccaagagcaccctacctttctgcaagagtctaccggatctcccacccagcctcagcaagcagcttacagtcaagatcttccctctggacatcacgtcaaggcacagtatcaaccgcggtcagttccgaaaagcaacagcccctctggtagaggctggctcaccgcttgctgagtggtctaccgcattcatggcgcacacattcgccaccgttgaaagactacatgcgaaccaggtcggagatgctgcggaactcagtcttcacgatccagtgtgtgtatggtatgctctgactgccgaggacgagggctggatagccgtccgagaaatctcccgaggatatctagatcgagaccactggtcagtggacgcggggagcgtgtataattgaccgccgtgaccggcatcccgtcgagggggaggaggaaagctcgagcgaccacggtttatggctgagttcgaaagccggaaaccggatctggaggatggacgagtctccagtggaggataactttgggacggttcttatcgagcagctattcatttgaggtacgaggggtcacgaggcatagaaatacaatttggtgcacatgagtttcaatatatgtacatggacataccgacgtcataatcggcttcttgacacgttgagctgttgaagacagtatagaaagggaagttttttttgttttgtttttcttttctcgctacgaatgtattgttttcgcaagagttcaaagaggataggggccgacgaagtttgatatgaaatcttggaaaccgccagcttgccaagtgaatgttctgataagtgacaccaaagctttaaccttctggactttttctcattagcgcttcgattactgggaagactgatttattggcagctttcacgtccgcctactacagtagcgccaagacgtaccgggatgactacatgagagcagcatgctacaaagcaattgatttcaaacacgtctgcatattggagactatggttgatggcctctccaatgccaactttgtggtcacgggccagtgatgaaaggctcaggaccagcccgggtccaaaaaaaaaaaaagaagcaacgtcactgattgccaacatcgcacccaccgcacccagggagggaaagactcacacgagacatcactcatcgtactccgtatagtgatggcacgcagccaggacgataaagggctcggcaggacttcggaaccttcagtgccttccataattccccgttgacgggtccagttccaatggggtcctgggtcttgatcagcgtgctccaggcgccggctgtccaggtactttgattgcatcaacagtcgccggccgagttactgacatcagtaagtgaatgtgaaagggatagaacggtataccaatcactggcagcccttcagcagcatgctcttggtctcccgttttcaccctgccgctgacaatggaagagataacccccgcaaccgacaagaggtccgaaagcaagggacataagcccttgcgacccataagaatagtgcactgaagcacgagcagcagcagcattgacgagtcggtcgagggcaagcggtctcgtgctttgtctaataggttgcggtcagcaatcacgggctgggttggtacgcgtgggcagtccaagcacgcgacaccagctggccatctcacttgcaag

SEQ ID NO: 9110 - DNA, 321 bp, Emericella nidulans
gttcaagaccaacatagggcgagctctatgccccagagctgggacgcctgactctcccttctgaggcccggcaccggagacggacttgtccgagatgatgaaccgccaagagagggtccacatggctggatcgtccacatcaacggcacccggcatgacggccgtatttaaagccgacttctctcgcacgaagcgatacgcatgtccatgttcaccaacgaccattgcacatccgatcttcagggcggaaagtgagaccgctcctcgagccaactctgaaaaaagcaccagactgcgactgaccacaattgcctctaatgg

SEQ ID NO: 9111 - DNA, 1451 bp, Emericella nidulans
atcgcaaactccttaaaccatcaaaggaactagctccttgaactcatctattaccagacaaggcggaccccagtgacgaccgtggcaggtgtttctctgctgggtgagcagctgtcgaacggtttggcgctttcgccagttgacggaacgtactcgcatccgcaaagaagcaaaaccaagcgatgcattgacgattgtttcatcgtaaagccctagcgtctgatctgtcgacgttggatgtatgtcaattgacgatgcatataggcccacagggcgccgacatatgactggtcgcgttgatcctaatggttgatcaattggacgaaagtccatccttcggaagagagtggacaggcgattccgagttaaaatcaatcttcgatacgggaatctcttaaatcctttcagtatctgttcagcaacatcctttgaacgtcacggtacttcagacatagccgggtcgtgccttggcatactcgttggatcttccaactaccacagacagcgccggctcacaagacgatcctcttgaataaggcatggcacgcgcttgccacgcggtcgacctgggcgtaactgatcgaagcgccacagtcaaggatgcggtttctcggatcggccacctatcatacggtggataacagccaagaagtccaaggtactgacaaatcaacagtgctcaagcagctcagcagcaggaatgtactctatacgcagcagccaagctgaatgtcctcgggcatgaactggcaatgcctccgccatacttgcatggagcagtgatcgaagcattccgttcgaggcagttacggtatcgagaagagaacatcgataatcagccgtaattcgggcagcttgctactagcggctgtgattgactgaagatgaaagaatgaacaacttgacgcgaaatgggagaagttgaagctgacggagatgtgttgatgtttttgaggcgtaaaataaacgtactaatacacataaaacagtcactagatagccgtgtcgtataaattaccagcgaacaaaaccaagccagcttcaggctcacttcacatgactctcctcactttgctttcttcctccagctcctggctttgtgtctcagccttaagctgttaaaacttgtatctacactgcttccaggatcatgctgtaaacttgtcggtctgctatctcattctttcatactctgcccgcccaggcaagctcattgcattagtttgcgtacgcaaacgtctttaggctgatcaattagtgaatctcttttgcctcaatctcttccatctggcggattcactctttttccacaccatcgctcgttctgcaaacaatcaccatctcgactctctttttcctgcatcctcttgaaagtcgcagtcaaactactttccgtcttccattgtccggccgtacggaggtgtcaagccgaatctcgcccatcgcagggg

SEQ ID NO: 9112 - DNA, 521 bp, Emericella nidulans
cccgaagcagcatagtgaggggctagggcatgcggccggcgaccgctccatttgcgctttgaggagggaccggacttagggttggaatccaggacttctccgtcgggattgatgattacgccgctccgtgtatccgactgccagttttaaaatacagtaagttttgtattgaaatcagtacaggcacccgccactcatcagccttcggccgcgcctcaattgtcaatcctaccccgcttggcggtctggatctgctttgagtttttgaggatcagggccaggtccaggcacggccagctcactcgcccgaatccagccctggcaggccaagcccgcaatatccttttcggcgcgtacgagctcttggctgcatcaggtaaagacctggaacccatgcggacaggtacgaaatacggagtactaaggatgagtgcctccttgaggcgaactgagacccgccggctgttgcatgcatgatagcgtgggttgatcaatactccctacctgctagcaactgagac

SEQ ID NO: 9113 - DNA, 1644 bp, Emericella nidulans
aaatggtacaggtcctaccgcgacggcaaatgatgcgacaaatagtaggaccgccactgcagagagggctttgacattgaagtatatgcccaaagcaaggaggatggaagtggatcccattccgcaaatgctggacaaaaggcaagtcttgcgaccgatcttgtcggggagcggggaacaggccagggtcatgatgaggttaattgcggagatcaagacagagagaagggcggcggtagtggggaggatgctctggagcagtgagacgctgtacataattatgctattgattcctgtaaattgttgggctatcatgatcccgacgacggcgataatggctgggcggtaccctgaatccatcactacttgggccattgtgacaggaggctgctttggaggcaggttgctggaagggggtgagagcagggactgttgttcgccagcgtcatcatcagatctggtggagtgtccgagcgcctctagttcgccacggatgtctgcgttcctgccgcgtatccgctggaggacgcgtctggctaggtcgtgtttctgatgatcagcaagccaggcaggactctctggaaccagagtcaggccgagaagctctgaagctccgataatcccggcaatcgcgaggataactctccacatgctatccttgctgaggaagtagccaagcgtctgcgtcaagagaataccaacattcgtcatgacctgtgtgaaagcgccaaaaaaccccttagcgcttggcggagcgatctccgaaatgtatatcggaccgacaacaatggctgctcctgatccaacaccggataacattctgccaaaggcgagtattgggatattggaggcaagagtttcggctactggcccaaggacgaagaatatagtagttgcacgtagggaaaatagacgtccatgctttgttgacacgggccctgccatcaatgctcccagaagtccaccgagggtgtatatggacgagaccaggccgaattgcgacgagttcatcggaatacattgtggtaggccgtcgcacgcacaatgcaatgctcttccgttcacagttgatgactgcttgaggtgcattgagctccgcctattatatccaacgttgatgtcagaaatatcgaaacatagccccatgatgtgtcctcttgtttgcttaccagatgataaccgaactgaagtggacccaaagttgtgatgaacaccaggtatatcaggtacggagtgaccctggaacgagccatctcatcggacgccataatgaaatcaagaatttattatgctatgagcatctgaccgattccaccaaactcgagggcgaatggtcagaagccgagaggtgtcacagatgagatgcaggggtcgaggtgacgttggagggacgatctgggttggatggataagtctgtcttatcatcccgttatcacttatcggacggccttacttagcttgatacggggaagtaccacgagtataacctactagacccaaattaactatcagcagcatatatgatcaacgtgtcaatgcagatgctcagatcttctgacccaagctggaactagctccgtgtatggaacggagtacgccccggttgtggtttttaaccgcactttcagcgacccttgtgtgcg

SEQ ID NO: 9114 - DNA, 438 bp, Emericella nidulans
gcaacgtcactgccgcttcaaatgagttttggaagagcaataggtgtgggagcaggaaatggaaactcttcagcgtcaacctttccggcagcgtatcagagatgtgagtcttgagtatcattcgcgtcagcacttggcgtccctgctactgagccgacggtatagaggagcgagcgtctcctctacatcaaccgctgaacgctgccttctgacacttggcccggaaaaccggcatcgcgaagtgatcatattcaatgccgtgtcaatctcctccacagtcacctcttggccgctgacaatatgattttctgcttgtctcatcacgttctcaacgcattgaccgaggtctgctccgccagatacacgccatttctcgagcttctcgcggcgcgataacccgagcagcaagcatctgccaataatcctagccaagttggt

SEQ ID NO: 9115 - DNA, 1428 bp, Emericella nidulans
aacctctcagcaatcctcgaagaagctggaagcgatatcacaaaggtcgtcaaggtgaatgtgtttctggcaaatatggatgactttacggctatgaatgaagagtacatgaagcactggggggacgttaagcctgttcggacgtgagtttttctttctcctcccttgggcaatgattttccacctttcctgtgtttagcattcaaagatcgcgctaatgtctttcatttctttaggtgcgtggctgtcaagacattgccgttgaataccgatgttgagatcgagtgtactgctcacctgtgaagtcctatttctcgagttaggatgccgacacagagcatacaaaagaactagaaaagaaaaaagattgttctctggtccatgcttggtgccatctggccatgtgctgtagcccgcttgctatgtgttttagctaagggtgtttgagcgcatttgtgcaagtcgcctgtcagtaagcgcaagcaaaaccgtgtgatttattgaatcagaggcgtcataggttgcttttcaagccttgacaatcataggaggagcagcatcaattgatcgtcatagaagctcgtgtcgattcgacggagagaatagtgagggatcgtttcgttttctgtttcctgtagtttcaagatgagcgattagtcccttcatacctaagcaatcagtcgacaagggattccttcaatagccctttgaaaccaacaaagggagtatggttgaattacaggagaatcattatcacgtgttccttccttccttcctcccttatcccaccctcgactctcctttgctttctccttctcttctccctttatccctctgccattaccctacattctgccacttcaacaatgtctcaatacctacattgccagagtgacactatcccaatggtaacatttgcccttgacttgatgccacgcgattgtcgcatcactcacatcggaatggtgccctgttaccctagaatcagggagaagggccctagctaacgatcagctcaacaatggtcttgatacgtggggtctgctgtgtaaagggcaactgattcctgaataccaggttgttcaaacctcaactcttgctctaaaccctagtcagctgtcgccgcattcctgacccagatgtcaggcgctttccgccgaggggaatacttgctgctcctccattccgatctcccatgctcgcgttgacgcgcctagaacctgatcgatatatacttctagtagtgtttgccctcgttctctcgaatgcagcgttttattttctgtcggtcctatctagtgaaggagaggaagaggaaaaaaaacccaagcctcccttattaaggcccccaacccctggaagaatggccaggcttaatatacccccatccataaatcctcctcaccagtggttgtggtagttgcgcca

SEQ ID NO: 9116 - DNA, 843 bp, Emericella nidulans
  unsure (1)..(843): unsure at all n locations
gagcggatatcgaaacctacgttgaagaaaagatcgcgtcagatgataaccttctcgtgctctgtaagcgagatccgagtcttcggcagagtattaaggaagttatcgcatcaaggtctgatggaatgtaagtctagattggcattgcaactgagtatcagagaagtcgatattctgacaaagggatcgtaggttcctaatagcccagctttatatccaatcactaggagcaaaagacacagtgcgagctgttaagaaatccctacaagccttacctgagcaactcgataggttatacgacgaggctatgcagaggctcatgtcgtcatcaactgctcagcttgctctgcgagtcatcgcatgggttgtgtattctttgaggccgttgaaaatcatagaactccaacatgcagtcgcaatcgatgaattagaatcagaggacgaagacatcccggaagaatgtttgattgatcagaccaagattattaacgcttgcgttggactgatcaggatcgatgaggagagtcaaacgatcggtttggttcattacactactcaggaatattttgaccagaggggctcacactacttcccaagtgcacaagtggatattgggattgcttgtgtgaggtatttacagcttggcacttttggttccggtagatgctcatctgttgaacaactggatgatcggttggccagaaatccatttctggattacgcatgtcggcacttctgcgaccacatccgagatgaactggagtgtaaagacctgcatcagctggcagttcagcttttcttggacaggcccaggatgtgngtgctgctcaagtttgcttgaga

SEQ ID NO: 9117 - DNA, 530 bp, Emericella nidulans
tatggggctaagaatgggtttccgcctctgaaacaccaggttcttcctcgcgcgactggcttgttcttttgcgtacagcaattgcggggaaccgttgagtgggtatacgattgcactgtgggttacgaaggtcctccgtaagttacgactcagccttagtctctactgaattgacgattgatgttcgtacagaaaaggcagctatgccgacaaatatttcactctccgctcaacgtatgtccaaggacgcccaccgacatccgtcaacatgtactggagacggtttgcggtttcagatattccccttgacgatcagcaggagtttgatgcgtggcttagggcccgctggacagagaaggacgaactgctcgatgaatactttgagaccgggcgattcccatccgcgttggccggtagtattgaagtcggtcatggtgatgcacacagttgaatgcagccgaagacggatacgccgagcgcatgttcgattgggacattggaccgaggtaggtcggatattcagggtgata

SEQ ID NO: 9118 - DNA, 1981 bp, Emericella nidulans
tcaatacacaaagtgttacgttagtatgtcaggtggtttgcttggtttaaagcaatcatacctgaatccgttctgctcatcgtatcctgcgacttaggacggtgaatccttgtaatgatctgcaggagatccttctcgttctcaggcgtcaaaatgccatggcggaggaagaaatcaatcaacacaacagcacagttgggcttgaattccccattagccagtgccttcttcgtctcctcaaccgtgagcaagcagaactcctccacttcagtatcgttcggcttcggaacaacatccgcaggcagcttaatatcgtagacgtattccacctccggctgcacgagatctgtctcaccaccggcacggctatcccgggtataagtatatgacacacagccagccgcagtggcattggctctgacaacgtcctcaggaagggacgcctcctccatagcttcacgaacaagacactcgaacggcttctccccagtactcatccccccggcgactgtattgtccagcatactaggatacgtctgcttcgtcttcgaccgccgcggtatccacagcttcaagccgttttcatcctcgacgtaagcagtagcatggatgccgtacgcaacaatgccaaacagcggactcgcggaccgttccatctcaagtaggaactccccatctgggccgtaaaccggatacagttcgttgcgccatccgcgcagtactgcaaaaaggtcctgcttaactgctctttcgaggacctgagctagagctaggtttcgctctgctggtgctgaacctgcggttaacgtgactgtgcggtttgtggcatcgatggaccaggattcggtgggccagtcgaatcgatccaccacttcgttaagcatgtatcccaggacagactcgcagcctttgactttgaaggagtgatacttcttcatgtgagctgtgtaggctgcggggtcatcctggtagtaagggaatctatatctctgttagtaatgatttacacatggcgaatgagagagaggagttaaacctatcgcattcctccaccagcctaagattggttttcgtcattttgaagagttgaaaatacttttgccgagtacctctggagtaaatgccgcgaggcatccgctgatagtgagatatgtgcctgggtgattttcgtgcccgttagagcggcacccaactaacccgagttgggaattacatctcctggggaccctgcctataactaacggaacaagatcgtcattccagttcacttaacctctttaggagatctctatagaggggactgaaatcgtacttttgcgacgtaggctttgatcaggggcggtattttttctgcgcaatagcccataaccgtccatagctcggtcaaatgtctaacggtagcaagtgagccgaggtttgcactactctcgaatatctttttatggttcgatatcaggctaattcactgaaaagtgttcggtatatcttcacccgctattctgatgtcgtttaggtgggggcaacctgctatgtgctgatcatgttgaattctccccgatccatgctatcaacatcttgtcttgggcggagtacggaggaggagcggagaggctttatggcccagatatgcacatattctgagactgcatctttgactggtggaatatatcccgctttctggtcaatcatgatggttaagttcttccccaaagtctggtcgtacatcaaacatggtatatcgaacgaagtactgactataaatagtcgaatttgagacctaattgatgccgctgcatcagaaggttgccagcacagtcagctgtatcaagatgcgagtttacgactgggcaagatttgccattgctcttgctccgatgtccccgatctatgccgatgaggtggtaacatggccaattcgagacactggactgggagacaagacagttcatgggatcactggagcctaatatacaacggcaaa

SEQ ID NO: 9119 - DNA, 753 bp, Emericella nidulans
taagctttattgagagtaaccacatgcgaagccgtgcaaggaacccaatgacagtctctcctgctcccagtcaatcctatcctgctacatcccaaagatatcccgcaagatatagtcctcaaaccgtcacatctctgactccagaaatggtgatgtttgctgctagatggatcgtgtccgtctcagatagcatagctagggcaggaaacaggccgtaagtataggactataagcagaatatttcacgccaccaatgtggattacctaccgccaatattcacagagttagtgcactgcgctaagaactgtctggaatagggcgcgccgtgatactcttgacttctaccttctggatggcgccagactggcaagtcataagtccgcgaactatcttcaagcccagacgcgttattgatgctacctcataagagacggagcaccttactccggtcatacccacgcctcgtcttgtgtttccagcatttgtaacctgaaatgccgatggggacagccgcgagaatcgcagccgtaataccgatagcggcttcaatagagatcgacataaatatgatacaccgagtgtgcggaatctaaccttagagttatgtatctgaaggatatgggatagattgcaatataagctgagagaacgaggatccccaatctccgatataaataattccctgggaggaaagtcgaaccgaatttttcaaaaataaaaacaggcccaggttactcagaatgggacctttc

SEQ ID NO: 9120 - DNA, 1466 bp, Emericella nidulans
aataaccctactaaagggatcatagaggacttcagggtcaatatcctcgctaacacgatggtcatgataagacttaccataaatcgttaagaaagggttcaatatccccctcttttttatcaagtttgtcgcataatccctcgagttgggcaaggtcttgtttgagggactctaattgagccgaaagttctcgcttaagctttctcttcttgacaatagactcaggaaaaggcgcaaggtttgtggtgatagtcagatcctctggctcattgctgtagtttaccgtcctgagtttcgaagggctactgtctagatcctccgacgcacgtcgtttcccccactttgcatgctgcataccggggctgtcgctcaataaccctctcggacgtccagggggcggctccaagcctaactgagtcggtgttgggggtaaatcgggttcatcgaagccgttgtgcaggacagtgtcttcattcaggtccatgccagttgcgctgcctagctcaaccgccagctggtcttccggagtgttaaccaagctctcttccactcttgtttctcgcgaagtcgaaggggattggaataaaaaatctgaggcgctaattcttttgctaacgcgccttggaggtgcggcgaacgcacccagtccactcgatcgttggctagccaaggcaaaaggtgactgtgactgacggcccctgttgaggctgtttgaggggctagccgtcagcgcaatcgagggcctgagggcttttctgtccctcaagccaaaagccctcgtttcggcttccttctgtttgtcatcctggctactgcgtgtggatgttcttgttggggatctactcaaggcgcgttctaggagctcgggatttgaccgcgcgatgctcgctttcgtgggtgcttggaaggatgatcgtggaggagaacgccgttgcgatgcaattcttggaggaaggggttccatttgcgaaattgcggcacgtcaacaaaagctagtttcctgttgtcgcttgtttgcgctctatgtcaggcaaccattgctgcagttcagcacaagataaaaggtggcagtaggttctcaaaagttatattaaccgagacacattatatatagcaactgtgatggatctctctagacctgtccatctttagaggcctgtgattctaaacgtagacaaacacttcttacgtgactgtagtggtagatgagggatcggaatgtttgcactggttgcattagagccttggagaaagaccatttatcgcggcaatgaccgtttctactcttgctttcaggctctcgtttgctcaatatccgcgttcagtttcctagcattttggggaccatgccttgttaacaatccacatttgctgcttaataatttgagtttttcatttcaagcttaaactcgtttggcaacacccccccgtgcttttatttccaggccttttccccctttgaaaat

SEQ ID NO: 9121 - DNA, 945 bp, Emericella nidulans
ttctcaccacggcaaatagtctgagagactgttcatccgtccaagtcttcgataacggtccaaatcgcatatgtgactacatgccgaggagaagtgatcgcagagaaggaccttgagggtcacaaggggcgtcggaaattggccagcagcgcgaccgcactcggcgcgatccacctctcccgctctacactggcatgctagcagcgggatggatatctcaagaatcagaaagaaccagcatgcaaacaggcatggcgcagtcctcgtttcaatcagggcggtgatgcccgtcaagagtcgtcgggcgattattggatgccatatttcccggatgcccgttagtgtagtgtatgtatgtctactagagaatgacgccgcatctgggaaaggaggccagccagccctgaagattccgtctgaatcctttaggtaaaaagaatcaaaaagaattcatggacgaagcaagggagagatctcaccatcacaactaattaacccatatttcgtgttcaaacagccagtagcgagagcagatccaagggcttgggcaggatgcagcaggccgtctcagcacaagttcctagtggtcgatcacaaataacccgagggtccatctggcatctcaacacaggccacaattgcgaatctggcgaaacctggcggttagatcacggatactataacctaatatcattacatattttcaacaggaacaacgctggcaggcacccaagagccatattcctgcttacagaaagtcctcgactaatcgactgctcgaatcgagctttgtccacagccgtctgtcatccccgctgttcattccaaggagatattccccactaccgtagcaggtggccgctcgtttcgttctgatagggcacttctaatgatcagcagcagatgtcgcattaaagccttgatgagggtctcgaatctgctcgg

SEQ ID NO: 9122 - DNA, 189 bp, Emericella nidulans
acgaaaccccgatgaaactggtaagcgagaagaagataggaagaaacagtaggaataagcagacaccaagacgccgcgatagtccggccgaggttggaaatgtcgccgagaaactcgcgccccccaatgagatgccgcaagatggcctctatgctcccgcgaccgaccagctcagccggaacctgcgcg

SEQ ID NO: 9123 - DNA, 564 bp, Emericella nidulans
tcagaaattctttaaaatgggtattttgcttgctaagcgctgatttgggagccgtggaggcggctctacaggctccctaatattagcaatcccttccagttcgccaactacagacgcaagcgatctcatacaaagaactgctaaaaaaaagaaaagagtttcgactcctctagccccttcaaagacagtctcccagcagcttataatggcattttagatgactctatatattctgcttaaccagccaagtaaaaccacaatatttgaagaaaaaagcaaggcgggaaagacttcgacccaacatctgatgccccttaataaaggctatcgacacaagagaccagagattttctagaaaaataatgaaaaagtgagacaggatttatcaacttctgctgcacctccagcttattaagcgcaaaggcacactccaccaagaggttcaaactgccatttttaggattatactaattcctgcaccttcatgcgttggtttctagttgcgaaccgcttcaggttccaagcccgagcgaagtcgaggtggtggctaatgactggtggatt

SEQ ID NO: 9124 - DNA, 271 bp, Emericella nidulans
gtgctctctaccccccactggtgtagcctctagacatgcagaatcggccccttgaccgacctatggtcatacacctatggccggtgtatgagatggcctttgacgcctccacagaatacactagccgtgagcataaggtggatggcctcgagacactaatgcgagacttaactgacactgcttgcgtgctgctcgctgactactttacagtcttgaaacctggcgagcttactacattaatgaatggtttcaaactccgcacgctggttat

SEQ ID NO: 9125 - DNA, 182 bp, Emericella nidulans
  unsure (1)..(182): unsure at all n locations
gtggggtgcgctgggcggcgggtaggcggagcagcgcgnggggccagaagccgaaagggtgttcgttagatcaatccagagggtgaagatctagttgactggtccaggggtcccagaaaacacaatgtaaacagcgggttggaaagaagaaggagaggttcatggaagtgaggggtggacga

SEQ ID NO: 9126 - DNA, 534 bp, Emericella nidulans
tgagtccaactcttgttgttcgatggcgtattggctttctttgaatgcgaattgagtggattcatcagacatgaaggggctgttagacagcagatgcactcctccagagacatctccaattagcatgttagattggtctggtgagaatgccccgcacataatcccttcctggagactggctacgtcctggacaagcacgtcctcaggagcacgaaggatgttccaccttttgaccatcccatctgaagcacctgtatagaaggagtcgtagcttgcgccccatagctgcatattaacgccagtgtccgcctgctcccgatcaattgtctcatcaagctgatttaaaggatcaccatgtctaagcttgtgcaggatttcgtcaggatttcgcttgtcccagatatatgtgactccatccgtacaaccagctgaaatatagttggtattcaagggcagaatactacttcattcatgtctagagcagggcattccagctccatgacacgagtcctgcggctcagtggctcatacaaa

SEQ ID NO: 9127 - DNA, 1125 bp, Emericella nidulans
gcaccggtgtcactctggatgcgcggcgcgcggacgcaagcacaaatcagactgctgttgaggtcttcagcttcaccgcgtcgcagtatatgcccattgacctgaacaacgcgaaacaccctttcgacttgaagccgctggatatgacgattctttggctcgactatgataaccatggcttgggttctgcgagtgtggggccccaaccgtttgagcagtatcggtgtaagacggaaccgtttgatttcgcttttgagcttagtcttctttcctgagttcttgatgctgtgaaggccgaagacctgctctgtaatacggtggggctgggtataactaatgcagatccgagtttagtttgggagctgtgacatgagcaagaaaaagttatacagcctcgactatagtaggcagtcgacgcaggcttcacattaacattagtattagaaaacagtgactggtaactacctaattccaccataagtgcttcttcatgaatcatcgctatattcatttgattgcgtcgtgacagacacaagacaaaactaaggtggtacaagggaagaagagaaaaatgcggacaaaccctctactcgagttccgcacatgcagtagacaccaagtgggataatagagctccgagtagttgttatgcggtatagagcaataatcccttgccaactgtgcaatagatgcctttgaaccccttaagaatgctacagacggccccaggcattaccgcttaacaggctgcccattgaccaaaacatggggcgtgcgtttctcgacattcacggagcgcgcagtcagagacgccggctcggtaccagtagccagagctgcggtactgttggtagactgctcgatttcttcttcttcctcatcctcctcgtcgctccgctcatccttcttgatgttgctgaataggtagttcttgaggatgcgcagaatcaagaaaagccaaaaggcattgacggcctggagactagcgagcaaagcaaaggtgatgtactggctgatccagcacttgtactgctgtgtctcccagttcagctcaaaaggtccaacggtacggaattcggtgaggacagcccagaggaacttcaggttcaagaagtggcggaggta

SEQ ID NO: 9128 - DNA, 1028 bp, Emericella nidulans
ggcgacagccagtggttcgcgctagggtgggtgtgggatttgagcggccagttcaggagacggttgacgacggtgctttcaccgtaaaagacttgccaggcggtctcgttcatatggtttgctgttatgacgaggcgctggtactggcttgatgaggcgtccatacgtagtttgcggggcccgcctcgtgtgtagtagactgccatgccggtggcggggacgacggccaggtaggcgattgcgacccagcagtgaaggtagatggcagcggctacgaaggcaagcaggaccgcccaaccagtccaggagaagaggcgtgggaacaaggaggccgtggtaatggattccctgtcctcatcttgggcgcgccagacatggatgaatgccaggtcgtgcacgcgtttatcgaccagggccaggttcgtgtgctgattcttgatctggtaagcgggtgttgagccgacgcagagacgcagagtctccggattggccgcaaaatacttgtcgccgtatctcccatccaggcaaactagattcggcgagcgcccgaagcgatccatcacgcattttccatctggagctggcacttcacccagcagctttcttccctcgttggagactgcccacgaccacagagggatctgacctgtgagctcaaagagatgtagcaccaagggcgcattgatgaagccgatccaggtggaaagggggagaatcgtggcaagtcccgagagcagcaggtgggttgggctgcccaggctgtcgttgaggtagaaagcgtcaaacatgatgtatgccccacccaagtgagcagagaatcgagcaaagaattgcctacagtgaacggtgccgtagggactcgtgtggcctgctttatgttatgttgaatcttgtaccgcgaggctcttgaagaaagcccaacactaaggacggctccggacaatgtcttgacagattttatttcctgactctctgcgaggcaagccttgtcagcagaaacgagatgaacaggctgagcctataattag

SEQ ID NO: 9129 - DNA, 1011 bp, Emericella nidulans
agcacaacgcttcctcatccgccctgacaatcccgtacatgctcatcggtcttgtcttctcagtgttagctggtggtggccaacccacgcaagcagtgctatatgctaaagccatcagcacactctcgctcccagaatcacaatatagcaagcttcgacatgatgcggatttctggtcattgatgttcttcgtggttggtatcattcagtttatcacgcagtcaaccaatggtgctgcatttgccgtatgctccgagagacttattcgtcgcgcgagaagcactgcctttcggacgatactccgtcaagacattgctttctttgacaaggaagagaatagcaccggcgctctgacctctttcctgtccaccgagacgaagcatctctccggtgttagcggtgtgactctaggcacgatcttgatgacctccacgaccctaggagcggctatcattattgccctggcgattgggtggaaattggccttagtttgtatctcggttgtgccggttctcctggcatgcggtttctaccgattctatatgctagcccagtttcaatcacgctccaagcttgcttatgagggatctgcaaactttgcttgcgaggctacatcgtctatccgcacagttgcgtcattaacccgggaaagggatgtctgggagatttaccatgcccagcttgacgcacaaggcaggaccagtctaatctctgtcttgaggtcatccctgttatatgcgtcgtcgcaggcacttgttttcttctgcgttgcgctcgggttttggtacggagggacacttcttggtcaccacgagtatgacattttccgcttctttgtttgtttctccgagattctctttggtgctcaatccgcgggcaccgtcttttcctttgcaccagacatgggcaaggcgaagaatgcggccgccgaattccgacgactgttcgaccgaaagccacaaattgataactggtctgaagagggcgagaagctcgaaacggtggaaggtg

SEQ ID NO: 9130 - DNA, 442 bp, Emericella nidulans
atggcatattgagagccacgtgggggactgtctaatcacctgaatgaatgttgactactgatattatgccctgctaccggtcactgctatgtctgcatggaggatatcagaactgctcctgtcaggtcactgctactgataatggctctcacttgtagattgtgaataggactctcacgactgtggagggatgcctcggaaaatactgtgtggtatatacgcagcccgctcaatcagtgtttctttgacgaataaaggctctgactgggaggcccctgcaggagactactatgcctaggacactcatatagatcatctctagccacagggaaccttgtgtaaatgccggggacggcagaacagtgatattggtcttcattctacacggccagttgccatgcactgaactttggattcacccttccttttcctaaactgtttt

SEQ ID NO: 9131 - DNA, 907 bp, Emericella nidulans
gagatatggcctgtttaaaagaggcgatggatggtttggtttggtagtggtggagactgattgtatagaagtgaggaacgatgcttgatgatgatggaggcagaggtcctggaagacagacggtatttatatctcttttgtcaccgattcgtactacttctcgatctttcgttccctcggagacaatccaagtccaagtccaagtccacggcagtcaaacagtcggtctcacgatggctcacaaagttgtgcatctagagtacccgcattgtggctggcagctgcagcctaacggtacgacgtagaaagaatagaagcgcgggtaaaaccccagcaatggcagatcacagcgatccgtaccgagtgagacactattgctcgatcgatgggtgatctgcatgtcggctgacaggccgatagaggacagactgacactgtcagctgccagtgagacatgctggactctagccctagacagctactgattggcgtggggaagctctattttattttaaggcggccaggcttatggtatgtaagacagcacgttgtttaccatagcgacggtgaggactcggggctggacagttggtaccaataccgccaatactattctggtattcgacatatatcggaaacgaacgttacctcgacggtacctcgacagtacctcgtacacaatacggtatgatgcagcgtacagaatagaaaggaatagaacaagggttccgtcatagctgtcatagggctatccttactatttatagctcttctccgcaccacgtctgattggtcaaatcacaactatatcattgccagtctccaactgtgtgtaaacacagtgcggacatgccaatgtatacaaatcactccaacactcaacactccaatacaccaatatccgacc

SEQ ID NO: 9132 - DNA, 705 bp, Emericella nidulans
agacggactgagtgttcgctgatattgaattgtttttctgggacgctggcggtggtaaaaggggtgactgggcgagacagagcagacttaccgaaatggagctaggacagcgaagaaggactgcaagacgcgacagacagcgagagatggatacaaagaccgagagagagaaagagagacgagagagaaagtggagagaagagaaagaggtcgaggtcgagaggaggcctgagtaagtcaaagatccgcagggctctcaggttcgggttcctggacgctgaatgtgattcgaccgcccccaccaccttgcgactgactggggatgccgtgaattgtatccggtggctctgctgggagtctggatcggtatactctcttactgttactctagctactttccctaaccttggcccattctgctgagtcctgttctgtattcagagtacactctgtccccaagacaatccttctagtttcgcggagtggcctgatagcaaaccgacgaatcggaatttccctattttccccttagtcacactaattgcacaaatacaatccttttatgtacactttgcactactatgtagcaccaatcgtcaacgggaatcggaaattccatcgcattctcatcattacaaggacaagaaaaagacccagttctagtatcagcaccagtatcagcaccagtatcagtaccattatcag

SEQ ID NO: 9133 - DNA, 1503 bp, Emericella nidulans
atccaccacagagttcggttcggactcccacatcaatatcgggacggagttgcagggatagagcctttagtaccgaagggaaagttctattggcagcatgaagtgagcgtccagctatccagcgtctcttgtgatgttagctggcaacattgcagtctgattggaggcaaggtcggagaggcacgcaatgggacacatctctgggaaacaagctatcgagaggcagaatttcactgcactctccggcatgtcttctgtgtaacaatgccagcgataaaagtcgaatgtgagccttccgggtcctcgagaaacccgcatgtcgatctagaaaatatcaagccaattacaggcgaaaaacaatcttgagagtcactatggatgggcatgaggccataaagcagaagtcttccacagctattgctactggtgacatccttcgcagcgagaatgcactcgcaagccccctcagtgaggatgagaaacgaaatgaaaagaaacttgttctaaagattgacctcttgatacttcccatgattgccttctccttttaccttagcattatagaccggtagctgctatgctcctactgcggaaataatggctgacatgcgaaggggtaattatggcgccgctcggcttcagcatctagaaagcgatgttcatatgtcggggtccgaattccaggcggcattgagcattttctacgtgggcaccatcctgtttggggtaccatcaaatatgctgctcaaccattttggccggcaatcattgcacatcggccttgccgttctcttttggggaacggtcacgagctgcacggctgcagtcaacaattttgagtggatgatggcttgcaggaccattctaggcattgctgataagttctggagcaactcgactatcaagtcaacggctaatcttagacagaggctcctctatgtgcgggaatcctattctacctctcagtacgtggggctttgatttatgaatcatttcacagtactagctgacgccagtctttcaagaaatggtaaagaaaatagagctttccttccgcatttctatatgtctgtctgcgggactagtggcagctgccagcggtccattgatagccgcgggtatcttgaacggtttagatggccttcgagggctttccgcatggcgatggctttatttgattgagggtataggtgggctaacttcacatttgcaaaaccagtggacattcaaatgatattttgacttagcatcgatatgtgcagggcttgcgcttgtcgcatttctccctgactacccacacacctgggctgccctcacgccccatatgagagaagtcggcaagtcattccatccaagacgaatctcactaacgaatatcgcagctattcggcgtctaacattagacgcccagaaactaacctcgacggccccaaaatattagcattggacggcgtcaagctagcattacgtgatgagaagttgtacatcctgaccttcctggag

SEQ ID NO: 9134 - DNA, 506 bp, Emericella nidulans
tgaagtggccaccgcggatcaaaaccaaatcaaagccaacgacatcaacagtcttccctatcacagttcccgcactgcagccggcgtcaatttctcaaatactacctcccaagtatcctcagagctcaactctaccatcacaccaaatgctacgacgcagccacctttcccctcttgcataagtccaccggagctctcctccgaatcaccagccacaacaagcaccgatagtaataccaacacaaaccccaactgcaacaccagcaccgtcactggtccaggctcctgggcgcgttacgaccctcatactcactctctcccccaagacccattctaccaatccacccaattcgattcaaccactaccacaaacacaagcccaacccagcccacgcaaccccctagcacaaacacaccgtccagctacgatttcacagatccaaacatcgccatgaccatgggcatgcgtatggacaataacatgcccgcagtatgagtatgagcat

SEQ ID NO: 9135 - DNA, 379 bp, Emericella nidulans
ggtcaccgctgctaagcattttggtgttcctcagcctcaaactcacgtcagcagcttcgctgggaacatacaatgtcgaccccgactcggtctccatctccggcttttctagcggcggctttatgactgctcagcttggaatcgcctactctgatgtattcaaagtcggcttcggtgtctttgccggcggaccctttgactgtgcaaggaatcagccggtacatcctttgcctagcgtgtccgcagattgcagtgactaaagccagcatagaagatcacatgcatgaacaacaacaccccttccatcgagattccaatggagaacatccgcctctgggatgggaagcaaattgacaaaatcaccaatctaaagtcgcgc

SEQ ID NO: 9136 - DNA, 757 bp, Emericella nidulans
tcaaccaaaagacgaagacgagaaactcaaccgcggaatcggcgcgcacacggacttcggatgtatcacgctgctgctgcaggacgaggtcgacgggctccaggttctcgacgccccgagtgggcaatggcttgacgtacgctctctagactgtctacgcttgcgttttctaaaagaaatcaggtccaacccgttctcggcgcttacgtcgtcaacctcggtgaccttatgatgcgcatggccaacgaccggtacaaatcgaacatccaccgcgtgatcaacaagtccgggcgcgagcggtactcgatcccgtttttctttagtggaaacccagaccatgtgtgcaagtgtctgccaaactgctgcaaggcaggcgagcagccaaagtacccgcccatcacggtggaggatatggtcaggggcgcgtataagcagagctatggccgggctgaggcgtataagaaggagctcgcggagaaagcaaaggcgcataagatagaggctgcctctgcaacggctatggtttcgtagcctattgggtaaagtagttgtgtacttgttgtcatgtaagctagcataatgagtatgaaatggataagtttgttttcaatactgctaccgcgggactcccatggatcaccaagtaacggtcagcaaaacccccaagcctggctctggcgaaataaaacccagcgtctggcctcacttatccctactatcccatcgccatctagatagctcctccacaccatcgcgg

SEQ ID NO: 9137 - DNA, 197 bp, Emericella nidulans
aactccagataactttgtcaggcagccacgacacttcgtcctatagagtcctctccatggacatcatcatcagtcagcgggatgctcgccagactactcacatagtcagagtgcagttacatcggtgcgatcactaggacggcctagccgcgctatccgggtgcctggctctcgaagtctggttaagacgtctatag

SEQ ID NO: 9138 - DNA, 447 bp, Emericella nidulans
tccttgggggacagtggcggcagttcaggctcttgttggacgctgccggcgctcattgcgaatgtgcggcagacgggtatagtaggaaaaggtatagacctgcgcgagatacggcgcagaaagctattcatatagcgcaaattgagatactcatgaagctctctatatgggaatatgcatgaaaacacggattctttcgggaataatagaatggctcgcatttgattttggtgaaaatgacagaatttgtaatgcttaataagcggctagaagaacctcattgagacagcaagatatcgagtacaaaaacctttttctaagttatttttagccctaagtatcgatattgtcctgtaattacatgtcaagcaaatcgaggcatatgaataagaacgcatgccactatgggcgatctaaatcacctaggccacggatatatattttttt

SEQ ID NO: 9139 - DNA, 1760 bp, Emericella nidulans
cgcgatattgttagacccgtcaacccagcgatgaaccgcgcattgccctgaaccaagccgtcaatctcgttaccgtcaacggcagagctggcactgcagaccaaacttgtccgctggcacgtaccggccccgtcaattggtttatcaaatgctccggcatatgcttcgatcgtatcaagcgccgggaccttagtgacagggacagctccaacttgagctggctgtaaacagaccccctggccctggtcttttgccagcgtatcacgttcgaccaagctgccgctgccacggctctggcgttccttactggcactgcgactccgaaaagcgcccgagacccgagaaagcccggtagcgacatatctgcggaacgagccagccagcttacgtttccccattgccattttgatcacgaaaaaacgatgccaaacacaaggcccgcaacaaggcgggcttactgtgagtaaagtaccctctccagacctctagcaaggcagggaaaccaccgcggtgggatgcaggaacagtcgattgatctgtaatacatgcgccctcattggcgagcaagcagagtggtgcgtcacacagtgattgtctgtgaggcggggcggggagctgtctctagtagaggagcacagacgcaaatgccgagcggcaggagctgtcaaccttgaaggggggagctgtctgtgttttagttaaaatttttttttttacgtgggatacagagctcggagaggtcccgttggcggttaaagcgtggcgtgaggtcgcgcgctgtcctgcgtccagtctttctgtcttgttacacggaacctgaaccagtcaggtgaggcccgtgggacgccggtccacggacgacgtccgttttatctgataagattgataagattaaatacttacgatacatacagtacggtattctgtactcattactcgagtcacaactcaagcgtactgccgtaattttgcaaacctctagccccgcggcatgttcctggagcttgaggcatctgccaatctctagactactggaggtggaatctcagtcgacgactcgctatgccgtgagaatgtgagaaagacaacgagttattgaccatctcggtctcaatcaacctgctgctacgtgtttctccgctgaacgccagcattctttcaacataatggcctccgccgacaaactccccctgatccggctccctgagccatacaatacaacctaccgactccaggtggtgtccgtccagcacggcacgcgcaacgttcaattgcgacggtcgccgcgcgtcgacgatggcctgccgcctccagaaccccttcaccgcgactcgttccacttcactgaccttcgcgagcccgatccctatacgacaccgctcgatgggaacaactcggcatgggccagggcacagcgaagccccgtcacatcctggaactgggaaggacaggatccgccgacggtagcgcagatctggaatgttctctatgcgctcctgacattgcgcaccgagtttgagatcttccgcgctgtgctttcgggcgagggaagggagctgttggctcaggagttacaagcagtcgggctggcgacttcacatcccagcccttcagcgccgcccggtcagattctcccgcagtctgcaggcacgcccgatcagctggtgatataccgcagcacgttctggcagggcgccgggtcgccgttcgggtcgaggccggtatgggtatggagtccatacatctaacgtcgcttcgta

SEQ ID NO: 9140 - DNA, 453 bp, Emericella nidulans
ttgccccgggttcagacgaactgatttccaaaatcctggaggtgaaacccaacgccgccatcgtcatccagagcggtacgcccgtgacaatgccctgggcgcccaaagccaaggctcttctgcaggcttggctcgggggcaatgagtgtggtaacggcatcgcagatgtgctttatggaaacgtcaacccctctggaaagctgcctttgaccttccccgtccgtttgcaagacaaccctagttacctgaacttccgctcagagcgaggccgcgtcctctacggcgaagacatctatgttgggtaccggtactacgagaaagcccaactcccgccgttattccccttcggccatggcctgtcctacacgactttcacacgcgagaaactggagttgaacacttctcctgaaaaagacaaactgcaagacggagaacccataacctgcagggtga

SEQ ID NO: 9141 - DNA, 246 bp, Emericella nidulans
cattaaaactcgtgtaaatctcaacagaatggtcgtaaggatcgccaattgcacttacacacggtgtagatgtctggtcatcatgaatccgatacgtcatatcacgacgatgtcccagagtgtatatcttgtagtattgctcttatacggcgagatgcacgctcccatcacggtcattgcccatatagtcatcagcacatccttgatatccatatgatccacttcggtacaaatgtggcgtctcat

SEQ ID NO: 9142 - DNA, 1417 bp, Emericella nidulans
cccgccctccccctcctcacttcacattatcgcccgtcatggcttccattgtaccacacaatcagcctgaggaggccgttgatgagaccgagttcgttgatgaccaccaccatgctcatcaccgggactccgtccaccaccgtctgcgggccaattcggccatcatgcagttccagaagatcctcgtcgccaatcgtggtgagattcctattcgtatcttccgaacagcccatgagctatcccttcagaccgtcgccatcttctcccacgaggaccgactttcaatgcaccgccagaaggctgacgaggcctatatgattggaaagcggggccaatatactcccgttggtgcatacctggcaattgacgagattgtcaagatcgccctggaacatggggtgcatttgatccaccctggttatggtttcttgtcagagaacgcagagttcgctcggaaggtcgaacaatcggggatggtctttgttgggccgacccctgagacgattgagggactgggtgacaaggtctccgccaggagactggccatcaaggccaatgtcccggttgttcccggtactgagggtcctgttgagcgattcgaggaagtcaaggcgtttactgacacctacggcttccccatcatcatcaaggccgccttcggtggtggtggccgtggtatgcgtgttgtccgtaaccaggccgatctgcgtgactcttttgagcgtgctacttcagaggctcgctcagctttcggtaacggcacagtcttcgtcgagcgtttccttgacaagcccaagcacatcgaggtgcagttattgggtgacaaccacggcaacgtcgtccacctcttcgagcgtgactgctctgtccaacgtcgtcatcagaaagttgttgaaatcgcgcccgcaaaggatctccctcaaaacgtccgggacagcatccttgcagacgctgttaagctggctaaatccgtcaactaccgcaacgccggtactgccgagttcttggtcgaccagcaaaaccgctactacttcatcgaaatcaacccccgtatccaagtcgagcacaccatcacagaggaaatcaccggcattgatatcgttgctgctcagatccagattgccgctggtgctactctcgagcagctcggcctgacccaggaccgtatctccacccgcggtttcgctatccagtgccgtatcaccaccgaggaccccgctaagggattctctccggacactggtaagattgaggtgtaccgttccgccggtggtaacggtgtccgtcttgacggtggtaacggtttcgctggtgccatcattactccccactatgattccatgctggtcaagtgcacttgccgtggttccacttatgagatagcgcgcaacaaggtcgtgcgtgccttggtcgagtt

SEQ ID NO: 9143 - DNA, 493 bp, Emericella nidulans
gccgttgtcgaacaaggagggtcctcaatacgatcacggattcagagccgtgcagagaaactgaaactccggttgacgatcactcagaccgaagacgaccggctggatcggtacttctcgctcatacgcgtgctttaccagtaccatgagccttcgcccacggggaccaccacgaaaacgacaaaaccgacgcagtgggccgttttaatagacgatgatacattctttatgtcgatgcggaaccttatcgcccggctagcgacctacgacgccatggttccgcaatacatcggcgccatgacagaagatctcgctcgactctcggggtctggatatatggcttacggcggcgcaggaatattcctatccatcccccattttgcaggatctacagcattacttcgaaacatgccagtccctcaaagataaaggcgaccgcatgctcgcctcctgcatctacgcacatacatctgcaaaattcacatgggagcgc

SEQ ID NO: 9144 - DNA, 373 bp, Emericella nidulans
ggccgggatggtattgtcgcggcggagatggaggagggcgagctggtccagctgggaatgggcgcttggagataggaacggagaaggcattccgaatcgccgcgatactcggaatgccgcggaaaagttcgtaagtgctgtgctcaggctgtaatagagctcaaggttctctctgcgatggatatctcaaaagatctagacggaatcttccccactaggccgcatttggcttcaagttagggctcagggtcgaagagcgtgcaagcgctctgattcgaggatatttcaccgcctcgtatactctggatctgtttgttcctcaagtctcaggccgccaatcaaggaaaggatgactcttagtagtattttgatg

SEQ ID NO: 9145 - DNA, 124 bp, Emericella nidulans
tcggcgcccattattctcgtactccacagctcctcaggtcgatcgcacctgttccgcatcatcgacacttcttgccacgtgaacttcgtccatgacgtagccgcctcgccgcggtcgatcgatg

SEQ ID NO: 9146 - DNA, 1712 bp, Emericella nidulans
cgtagccggtgcgagactggaatcatcatatcaagctctatgaatcccccctggtaccagtatatgtgtaatcgctctctatcagtgcgccagttccagaccttgatagtgcggtccatctcgccgctgatcaacttggtgtagtcatactgtaagcaccggacccgagactcgtgtccatggagtgtgcgcagctccctctacggtttcagtgtcccagattttggttgtagtgtcgtaggagccactggcaagagtgttatcctcgaattgcagactcatgagcccgttagtatgtcccataaatggtttgatcgagcatcgcccgtatttccagttcgtgccgaccttgaagcgatctttgtacacttccttccatggccggtagcgggtcttgaagaaatcactatctttgtcgactcctgcgtctgacccgagcgatgaacagtgccgcttaacaacagcaacctcgtcatcctcaagctttcgtttgcccgaaggaggtgactctgccgaagcatcaggggatcgtgggcccaccactcccttgtcccacgttgtagcacgaagttcaatctcacgcttcgactcacgcaatcgtttgcgatccagaagcggtaagcccaaccacactttttgcacttgcgatgaatatgttgttcacacattctgtgccaaactacatcatcatcggctagcgcacgccatccgcgcgagacctgggaagccttgcacagagaggttgtatccagatagcaaaggattttgaaagcaatctcgggagggagcgcggtgatgaaatcgattcggatgaggtcacggacggtggcggagatgtaagagagttgcgggaaacagcattgagccatgattccctgcagaatgagtttccgatgtttggcaggcgcagcagagaacaaggaccagacatgtgatatgctctgctgatcaccttgaggaagcgattccagttcctactaattagcacacaaccaccattgagtgaagcggggttactcacccgctgtagcttatccatagatggctcgtcggcttgccgtctacatttctgatctgggcgatggcgataacagtatttggagtttgcgctgctgagatctgctggtagaatcgactgagcacctaagggtgcatattgttcagggatgtgtctggcgaggaagggtgcgacattctggtttgcaaactttgcgggcgcctttgcgttgctgaagctatggttatgatcgtgggtatcgggctccgtctcttttccgtcttcactcgatgggccgccgaacagggatttgaacgactgctcgctggcgtccgagcgatgtcttgccgtcaaaatttgcgaatcgtgattatcctcggtagacattttccttgctgtcggcttggctcaacgaccgttccaggtctgtatcggccgaccgttatgcagcgcgaggtcaatcgttggatttcgttctttctatcgcttcgtggttatggggaaccttggtggttggtggcgacgtcgtgggggtatcgcgagtcagtgaccgaagacgaacaaggagcgaagcgctgaacaatggttcgaggtatgggatcagaatcggacggatttatcactctgtgggctggatatgcggtgtaagataaagaaaggtgaaagtcctgccggttttgacgaagatagattgctcttcgatcacgcaagtgag

SEQ ID NO: 9147 - DNA, 1100 bp, Emericella nidulans
agctttttctagctatcctatctataccagaggcatgaaagctggaagttgcctgaatgatgtcagctgtagaagtgcataatcatacctctctccgtattcaacgcgaggccgtgctttcctactctgcaaggccaactcctcatcaattatcatcttagactcacggccgcgagtatctacttgctcgtaatcttctttgaaataaaaaatggcgatagcgggccatggtctcattggccgcttggccgctggcacccgaccgccgcttcccccgcaacgccgtgtcctccaaacttctgctcgacatctcccattcgaaggttgacagctgagccatttatctattcacctctctatctactgtattggagctcatctatttgcctgagagcatcccccttctcagcgattcgaccagtgacctgtgggtattcgaagagtggaggagcaagtctccccgcaatcaacgactcgaccatggccgaacagtcgctcgaagttccagagagctcgaatggctcaaacactgcgtctccacgatccagcgttgactctcgccctccttcaattggagggcggacccctcgattatcccacgcctcgaaccaccaacaccggcagagctttagcgagtctctccgcgcagcacctgggtccccgcgcgccagacggcaaccctcactcacgcaagccgctatacagagcttgatagacaatcctccagctccgcacaatatgaaccctgtgtttgctggccgagattggcgggaaatctcaatcggggagctagtgagcccagatgacttgaggttcgtggaggtagatactggtattgaggaagccacgaatgtattaccaccagcgtcttgcagcttcactaggctaatggcttgtgggtaatagatcctcattgacacagacgcaccagtattgttgattcgcgagacacccgaacacaaaacagccgttgggacctttgattatagcgatctcaatacgtacctactacttgcagccggtctaaccaggccagatgaagacctgcttcctgcttacgaggagcttgctcgcaaggcccgcgataatattccaattcc

SEQ ID NO: 9148 - DNA, 578 bp, Emericella nidulans
ggactcgccgatgctgagggagaggacggatgcgaatgttcggaattggtaggaaagaagggagatgaagcggcggtggaagtcgcgcgcgaaagcaccgagccagctgatgtcgtttgagccagtagaaagcgttcgaagcatgacgcacgagtgttcgccggtgaggtcgtttggtgtttggcggaggtatacaggggtgaaagaagctcgcttccagaatttgtggagggctggtgtgagaccgtagctgacgccgagatagtccaactgatctggtcgacgctcggacagcttgccaaaaagcggcggcatggagcggatatcgcggacttgaatgttgtcatcgagtaggttcgagtttgcgagctcttcgtcggtaacccggaccatctcttcttgggtgtccacaatgttttctgacaagtcggtgaatttaccttcaaagaagtctaccaagagctccaaagcgcgggatccatagcccatgctcaggtattcagggttcgtggcgatgcggacaattcgagctccagagagactggcgaaatcttcatcttggaactgttggctgacaa

SEQ ID NO: 9149 - DNA, 402 bp, Emericella nidulans
  unsure (1)..(402): unsure at all n locations
cctggggggacgaatactgatagcggggggggaaccaatcggcaactcgaaggaacgtattgagtccttacgcggtgaataaagccacctgaacctgttgacagcgttcccaaacccccgagaactccaaatacacactcgcatttgatgaactccattctgctcgcaacaccgactccatgagcgtatatatcccggggactggccagctgaaacataagtccaatagcatggcctggtgatcacactgtcaggttcatgcttagactgatgcctccctcctgtccacnggctccagctttctacactaaatcgtgtcatcccagggctccatccagccttaataaacgcgcaccaggtcttgcccagactctgagaaactgagatgcaaccacatgaccc

SEQ ID NO: 9150 - DNA, 873 bp, Emericella nidulans
atcaatattgaagcttaaagaaaggagtgagaggcagactgattaggtcattcgttctcctgccaccaaggcagactgtgtaaacgccgtactgtccggtgggtagcacaaagcgcagaatcgacactgtcaagcccctgttcaccttggaaagcgagtgagaccattccaaaataagagtgtagtaggtctgtccggaatgtcagtcagcacgaaagacgtagaacgatgacttattgatttacctggtagctctcccacgcttttcccaaaaccgccaacaagatgctgcgtcttctgcagcaagtatcgcctgttccgctctgcatcaaccatcgacagtctgcctagcatctatagctgagtattagccaaagcttcatccggtagatcctcataggctcttacatccagcgttgctgcattccagaatgaataacaggtatccgcatacttattgcaccgtccattaaagccagcccattgtaaagattcttcccccggtggcagaataatgggaagcgcgtcaatgctgttgttcagatcaagttcatttaccgcctccgatagaccctgaacaacatttgttgggctgttcgagtcatcaacatcatcctcctccttttcatcgtcttcgtcttcgtcttcgtcttcgtcttcatctcccaattcatttgtttgtctcgataccagccagcggacaagtgattcgaactggtgagaaccgggcgagacgagcggtactcgccatgagtcgtctgatacacggtttaagaacgtcagggtgtttacggcacaatatgtatggccggctggaaatgtcgaataagttaatgccttagtaattgaatagtgcggtttgacgtacagtgt

SEQ ID NO: 9151 - DNA, 284 bp, Emericella nidulans
ttcgaaaaacgccaagaagaagaaaaagaagaagcgacagtctgtttcttgtgatgcgaatggagctgaggcttcgcctagggctacctccgcgaaggaggaagacatctcagaaaactccgcggaacgtgcacatctgtctagccaagatgcacctattgagcccgcactgaaaacagcagctgaacagggcgaaccgaaagaaattcaaaccgaagcagctgccacaagggacgaagtaaaggaagctgagaaacttgaaggattttcagccccttgctgag

SEQ ID NO: 9152 - DNA, 1430 bp, Emericella nidulans
agattaaagacagcaagataggataatagaatatctctgtataagtacttatgctagtggggggaaaaaataatagacgaaagttttagtaggagggtaacccaatgggtgtaattgagacccgtgagaggataaatttcatctaaccaaagagaacaggtgaaactaataagtaagggatttttagcgggggagttgttaccacccgtataagtggaacggtaaatttcttacctgggaaggggggagttctaaaaacggttctgggaaataaaaaatgtgtgtccaggctggggtagttttaatccttggcggcccgctagtttcaagcctttgtcaaacacgggggtggtgcctgaagatcatcaaggtttcttcagcccccaagaaggctctcccgaaggtgtcggtcaccgagtgggtatgttatgcagcctaattctatacggtcaactaactatgtaggacttcactcatgaacggggacataacatgggtctgtacgccttctgttagccggaagcgactacttttgctcccgtgatttcggggttcatcgcagagttccatgcttgaaaatgggtgttttactggccggcaatattctgcggcgcggctatggtcgttctgtttttcctcatggaggagacgaactatgcccggcaaagacctagcatagctgaccgtgcagtagaggtttctgcatcagagaatgacaaccgaaaggataatgagaaggacccgatgcagtcaacgccgtcgactcaaagtcgaagtgacccagaggttggagtgatgtataccaagaaggcgtacatgcagaaactctccatcttggggcctcatcaggctaggaataacatgcttcgtcgcacctggcagacagtttattacttgagttggccggtgatcttctacgcagggtgcgtactcagtgctaatactgagcgaggctgacttttcccagattctcatacggatcataccttatatggttcaatgtcttgaatgcaaccgcttcgttgattttgggttctgcgccgtatggcttcaggtacgcattttacctgataatctgtagccccaaactaaccctcctagctcgtcaatggtaggcctcagctatctcgcatgctgccttggcgtcattcttgggtgagtagccctaacttcgatatcctgtttcccagcagatctaagagataatagatccctcttcactggccgcttcagcgactacctaaccataaagctcgcgcgacgcaacgccggcgtcatggaggccgagcaccgcctgtatcccttctccctgtgcctaatcctggttccttcctcgctaatcctctgggaagtcggtgctgcacatggcattcactggttcgggctacctggttgcgatgtgcctgctcgcaatcgcaaacacagcctga

SEQ ID NO: 9153 - DNA, 422 bp, Emericella nidulans
ttgccttcaatacccctagtgcagtgttagtctacaggtctgcactcgacctccgtctccagcatgtctacccctctgacgatcgggacagcttatacagatctgggcttcgatcgggcgctcgctccggtcggctttccaatttcttcgtacgcgagagccgacccgatcgaaacggggcgagcagtatctgtgggagcttcttaagcgccgcccgagctgtgaccgctgactaggagtaagccgcggtactaaccagtccgatccgcacgcagaccgcactggggcggtcagaagacctccgggtgaagatcaggatcgaattccaacaggcagccgtgtctttgtgggagtggccggtatcttaccagctgggtgttaggatggccgactttcacgcgcgaactgatgggggaatgacc

SEQ ID NO: 9154 - DNA, 462 bp, Emericella nidulans
gtgtgctttgtgcgagctattggctggctcccaacttagtgttccagagcatgagcgccccacctgacttgacacataggaagccctgtttccaagagggcagatacgcaacacggagtggctaggaaagaaggcccgacactgatgacgactaccaggcccacgtacaggatgcaagatcagcctaacttgtaagacgatcactcgatatccgaaccctgaaatgctccgcccacactgaaagaccccgtatcccaatcgcgcgggccgaaggctactcacgaggtccacgctctctgggcgggcaatgcccaaccactctattcgagacacgtttgacgttacagtgggtcactggatcttacaggagtttcatcgactgaaaacggttccgcgagttgtcatataaaaggcatcgcccacgggcatgcagaagtttctcacaaatcttacccaccgttg

SEQ ID NO: 9155 - DNA, 468 bp, Emericella nidulans
gggggactctagaatcctacgcgggggaacgagaccttattctattaaaggccagcgctcatacatcgacattattctctcccttcctggagcgatggacagttatcatggccctctgggagcgctaccgcagagtacattgctcagagtaacttgcctactgattcgctctcccatgcatacacgagcgtatgcctgggtggtccggatctacctaaccgagctggcgcgcacagctgtgtcctcagtgcactcatgctctagtacattggtctgtacggacagggagactgcctcttccacatgactctaacgttggcgccgaggatctccgtgatgcagtcggcatcaacctttgacactcgaccgctagagcactccaaggtaccgaggtacggctggaccgttttatgaagtcatgaccgtcctggtctacggcaaaaggagccagctacagtgggtatgaaa

SEQ ID NO: 9156 - DNA, 127 bp, Emericella nidulans
cgcgccgctccgcgcaccacctcgcaccgcctcgccacctcacctcgccacctccgcgcctcactacgcaggccgcaccgcaccgccactccgcaccgcgctcgaacaccactccacaccacctcgc

SEQ ID NO: 9157 - DNA, 1664 bp, Emericella nidulans
gaaagaaaaggtaaactcggtcccaaaattaccccttgtaatatttttgggggagggcaactaggtgggtgctattaaacctctcggtttgtagtgttaaaataaggccggcgagggtaactttacaggcataaggttaaaaggacaagctttcaggggcatttgtcaatagtctggtttaagcggtctgggatagttcgagtagcctgttagcagatagagtctaggtaagggagaagtcaatgcaggggcggtctagggctattggtcaaggcacggtccggaaacgttatcacgtttcgccatgtcgtcgtgccaacctcgttgggtcgagtctggcggaacttccagaggatgatggccatccgcttgctttcttcagcaggagaacctggataatggttctgtagacgtcgcaagcttggaggtacagtagcccggatctcctgcaccgcggtcaaagagtgaaaataccgtcgggtacgctcatcagcagcgtggtgatgtccggtgctctcagcttcccgcttgtcttgtgtcagtttcgtgaaggtttttgcccaccacgatgactcaaatggcggcttaacctttgttgtatgcggcttggtgaggttgtgatatgcctccatcgtgcgcctcccgtcttcgtatatgtaagtactacatgtccaattctccatctggttgaccgttggcgccgtcccagacataggatttgcaatgtcaagttccaggtggatccccaatctagaacccataggaggaaagtcatccatcagctcgaggttggtctcgagaagaattatttcgcagttcagcggatcgttcacgtctgagagtgatgagcttaggtggggaaaggacacgcgccagttcttcagatcttccagcggcatgggcggttgacgttggtcgccttggaggcgggtatacaaatggtacgcgtcgtcaatacggtccggtttgtttggagcgctgacccacatgtcaaagctaaggccttgtattgtgttgttgtttgtgtcttgttgagttgaagtgggtgagtactgaggtagctgcaagtctgccgagtaagggggcatcagcctcatgggttccgggtaagaagaggttgcgtgagtgccgtagtgactcgacggcaaatggtccatcgaggttctccatcgtggtcccaccggttgcgtctgggcagttgaacgatctgattgttctcggacaagtctctcccctgtgggggttgttagaataagttcatttaagaccacatctcgcaacttacaatcagggtcacccttgaggaatgagtcaagtacttgcaagtgactggacacttgtttcctggtccttcgcttcccagtcaatttatagatgtactccgcaatcagttcgtttcgtccgtaggactttccacgttcggaccactttcgtctccccataggcgggtttgcttcaagagctagtgcctcattagcacttactcatgtagaaatagtaggttccgcttaccttgctggaaggcatcctccagttcgtccgaccatactggttcaccatctttcccagtatcccgacgtggccgagccctatactctaagtacttctgtgacttcagtaacttctccccttctggaccctgctatgaggaccattcgattgag

SEQ ID NO: 9158 - DNA, 1088 bp, Emericella nidulans
tcaacacttgctccaaggaagagcttgaagacgagacaccctctaccatctcccctgccgagccgtctccaccgatgccgatggacacagtggatacagagagtaccgagttcaaacgacgtgctatcaagaacaagattctcgccattggccggttgtctcgagtcttccaagtgctgcgtgaggagtctgaacgtgttacggaacttaagaccgcggctggaggtcgacttcctgccggtactttaatgcttggtgcggaaggaattaagcaagccatcacgaactttgaagatgcccgcaaagttgatttacagaacgaacgtctcccgccttctcacgatgaggtcgtcagacgaagcgaagaggaaagacgcatcgcccttgaccgcgcccaacacgaagctgataacgatactggccttgccacagttgcaaggcgcattagcatgtgagttttattgtcctcgtgcggctatcaactgctaataaaccataggtccgccggatcaggaaaatcccgtcgacaacgagacggtagtcgggactagaacatatgacgaaaattggatattaaccccgacttggtctattccccttatagacaccatctaacacgaattactccctcaattgttgtagtctgctgcttttggacctgtatggaatccccatctcataggacggggttaatgtcaggaagaagggcgtttgtctaggcattggaacgactatgatatgatgagctccacctgcgcctttcttttgtccgatgagatatacgaagctgtacttgatatttttactgagatgcaagctcgtggggctatgtatatcctgcacacaagctccaacgtctgcgacgctggcatatgagttgatgaatcatactatgaaagtctctctttttctttcatacaccatctaaaacaccttgtaaaatgcatccgctaagtatgcttctgtagggctaccgcgcagtcacgggtcctggcccatctgccaagaccggctctgacttgaacctcttcaaatggagaatcttcgcgccctccctcttctcactacacatagcttttttaatgcct

SEQ ID NO: 9159 - DNA, 546 bp, Emericella nidulans
aacagcatggagttgccaagcagcgcactcaaaacgcttctgtcagcggcgctgaggtttcagctgagaattttcctgtcagtgggaccccctttgagcagcagcaccagcagcaggtgaaagatgccccagtcaccttgccccgtgcttctagggctacttcatcgcgaccttcttcacgcgccagtgtgaggcacacgcccaagccgctagcgccggctcctatatcccagagtgagctggagcaacttcttagcgcaatccctgagagcgatcccgtcttgccaagtgatggtgcggccgcagagactccagctccgaattctgtcaacgaggaaggcaaacctcgcagcggtgccggtgccaggcgactgaaacaagttaagcaagtccaactacgcctcgaaaggtgcatccgcgagggacaggcgccaccctattgtgaaaactgtggggctattgagaccctacttggcgcagactcactccaaagtcttcgaggggagcgaggaagacgcgaatgagcacaccaaggaccctttggta

SEQ ID NO: 9160 - DNA, 533 bp, Emericella nidulans
cgggtatttaagtctatgaacccgcccggtcactgctgaatctggaatcgtacctcatggtctgatagggctatactcactcgccgctggaagagctacacttgtcctagtaagacctattcgagcgctaacagggttcttgaccgcgtattgatcaccatgatctcgttgccagtcagagtactgcgggagtctttccttgagaccccaactctactcctggctctggatcgacaacttgtttgacagagcagtgctagtgcaaccgaccattcgaaggccagacggagatttaccggacctgctaggcgagatgtgtaacctgtcagatggccacggcccgactcatgctgagttcgttgcagtgatgcgaaaagaggtaaggcacagccttgctcacggcatatagcggatacttcaagaatttatggaggatgctcgcggcttgctgaaagacatattgatttcgacagtccaccatgcaccttaatgatgctggtgatggctttccacgcccttaatcaaagacgatc

SEQ ID NO: 9161 - DNA, 539 bp, Emericella nidulans
gatctatgagcctttgctagggatctggacaccgtctgctctggcgctgctggaagagaacgtcaagaagggcattctaggtccaaagtccgtggtcgtcaagagcagaggcaagacgattcgaccgcagaacgagaactggctgttcaatatgaacacgcctgccgaatacaagcaggcccagacgctgagcgaagagatcacaacaatcacagaggatctcagttcataagtctgggttatagcgggtatatatcgacgcgactaccggctcgcatttcggacactccgctcgggatgtgtgcccagcagttggcctgcaggaacggcctcgtcttgccgggactgtggtcgtcaataatccaaacttgcccagactgcgtcgagatcgccggccggaagatgtctggtgcttcgcggaatgtcaagactttgcctgccgccccgttacacggctctgtttctccgttggatagccgtagcgcggccgccttcggcttctctgggctctgtcgctggagagtcatgagatatggcag

SEQ ID NO: 9162 - DNA, 1357 bp, Emericella nidulans
ccgaaagctggagattacagtcgagtcatccactttgatccccacaccatccactcgaggttccgaacgactccttgccaacaggaacgagagcagatagctattatagacaattgaagagggatcaaagcctagacatttcagttagagtcaacggccccacttgccgaatcgaaagatggagactcgcacccgataaggtgatagcttcctctgtatacagcataccattaaggtgaacgacgatgaggtcgtgtctattcaattgggaatcgatatcaggttgtctcgtcatcataagcctcatcagaaccattcaacacatcaatggccattgaaattccgcaagtccagcgtatcgaccgctcagacgatttagccatcatttaggctatcatccgagacggatgttgtatcataaagaatttcacgaaagtggagacagtcgaaatagtaaatgaagagacccggccataccttgaagcagataagccatggaaggtatgttgactaccggagggacgagatgttatgtggtgaatgttaataagttggcagggagacctatttcctccagagactcgacgatgcacaaacctcgtggaagaagcaagactgtgcgggagaagtggattgtcgacccactcattcgcaagttgaccggaacctttattgacaaggccacgtccaagtactacggagagaccaaacacacatacaccagtgaagccatcctatccattgcaatgaccttcgacatctgccctggagtaaaagcacagagacttcaccgcgacgatcagaacttccacgtggaccatgaagaccaaacgaaatcaggctatcgagttgggtcggacgttatgatgagctttatggttcctggagtaaagaccacattcgagaacggggcaaccctggccatcccaggctcgcatttttgggaattcgatcgtgcccccaaactggtgaagctatctgtgccaagatgaacgttacggattgctgggtgatgctaggaggactataccatgccgcggggggtggggggccgaatattactcggaatgagcacaggattcttaacggattattcttctgccggggcttctaccgccaggaggagaactcatacctttgcaattctaccgagggatgtgctttcgtggtcaccgggaggtcctgagaattatgggctatgaactgtcgagcccgaatattgggtttgtccattccaaaacgccattacagcatctccgtgcgataaaatagaggagttttgggattttgatgcttcgcaggaggcgaagtagggttaggcatgaaatttagctaatgtataataatgtattgagtt

SEQ ID NO: 9163 - DNA, 979 bp, Emericella nidulans
gaaatgtagaatcctctggaccaggtcttcctgatcaactgaagcgagaatacgatagagataagtgaggactgcagctgttgaaccgccctcaacatcagacgactctagcagtgaagggtatctgacaggccgtggttagaagcaacatagatactgtgtattaggactcacagcaattgttcaaggaataagacttgaaagtggtctaataaggtggcaactacttcggctgatttgcagtgatcgatagtgtcttgccagaacaagaggtaggccataaaagaatccattgatgagccaagcgcgggcggcagcgctgtctcctgctgcgcatggtctgaatgtgaaatgacatgcggtaccacgggctccacatccagacaagaacctaaactggtgaagggttaataaagccaattgatgagaaattaacaacacttacctgcccaactggctgtacaaagcacctagcccggtggccatcaaagtcgccagatcactctcgatcagccaccgctctaaatcttttgaccgcgacgccgtctctatcaggtaaagcagcccggttctcgcgaaatcgcccgctctccccgcatgatgcacccattccaccaataggtagaacagcgggaagtcatccgtcctcatcgtgcccgcaaactcgacgctaccagtactttgctcctcatcgtccgtccggggagcaaaccaggcagggagaatattaggttggagacggatattgttcgcaacgccaaacagcagctccactaaccttccttcaatatctgccgattttttatccgcacgacgaacgaggtccaccagtgcgcgtgcaaaaagcctgttatcgaccaccccgtcaacttcagaatcaataagagtgttgaagaggaccgttgcggagcggagcatggcctcatcgtaggatgaaagagcaagctttgtcacggtaacaaaaatttgagaggatgcg

SEQ ID NO: 9164 - DNA, 551 bp, Emericella nidulans
aagtaaacagcttcctggtatggaggcatcgattgcttcgtgaattgagggctggcacagctgctcaactgccctcctagcacagcttttcggttttgcaagtgtcgactaatgttatctccatatgttcggcgtcaacgaaccgaaatacgatacgaacgccgcgcaaaaagtaatgagcataccgcttaaagaacgagtacaaaggatcaaaagagaaggaactgccctcataccataatcctcgagctcttctagattccttttgcattgcatgaccttctgcaatcctctttgttctcagccatcatgctacgttgctatctttgtcttgtcctgtacatagttcaggtttcggttccccaaccaggagttctgcaggcaaattactgtatctatatccgtagatataggtaccagtgtacgaatatgtacctcgcgagctaccagcaattggcgtctctcagttaagactgagccagtgagactgagccagtgaaaaaacagatactgttcctcgttcgaggcatttccatattggttctctctaa

SEQ ID NO: 9165 - DNA, 2052 bp, Emericella nidulans
  unsure (1)..(2052): unsure at all n locations
caagcattcaagaacatctcagacgctccttactttaagtgctctgggtagtccagacgatatgttggagcgcggtcatcttggatgtatactaagaagcaagatcactgcgcatgccctgattgttgtcaagggatatttctaaaccagcaagactaatcttcaccgatgatgttcgttagctcggccatatcgattaagacgcaggcgctgagtttgccaaagagtacgttcagttgctgagctatgtatggataaggtccctaaactgagttgtgaatatgcagggccttataaggcttttgggccgcgggatacatcctgatcattgcagagtccatttcgtcttcctatctgcgacagtgctgataagcatatacagatgacggccactggcttgaaaggggaagaaacggggtgctagctatgctattgcccagagtgtcggagtgatattatgttaaataaccttacatccatccagcaatggcacccagcaatgaattttattcctatctaaactggcttacctattttgtatctaatctactactaaagtctgaatccaattcaatccaaggcttacagtgcgcgaacaaacaagccatcccttctctgcgagtagcgactgtaagtatcaccaaacgtctcgtcctcaccaacacacatccggtacgccatctttgcatactcctccgcctgatccgcgagctttaggtgtggcaccaaatcacggtacaagggaggagaggttcatccagcacatgattacggtgtctggcaggagaccccattttttgacgacaagttcagcatcagtgctgttgttcctgttttggttgactatatgtcctccctcaataacgtagccaagagactcaagactcttgagcccaaagtcaatggctttgcgtgaatttctacgtgcggtatacaacnttgcgagagatagcgccgggccccagagggcaatacgagggatttcggacacagggcggctatacgtgtcttcgatcgcggagaaaagagcctcgagtcgcacgggatccggaacgcgagagggggagtcaaagagctttttgaaggtgcctaagaaagttctccttctcttcaactcgttcctgttggtttgagcaatgtcggtacagataatgcagctgcacttgaacccccagtgctgtagatccatggcctttgcggcggaaccgccgatcaatggcgattcataccagaaggtcagctctgtgttatcagggagatcccgagttgcgcggatgaccatcatatcgccaatgaaagagcgtcgggcattactgtcgcaagagtggtttatgtacgacgccagcggccagataccgcatgattcgaacaccttttcaccattttcaggtcctctgacgcgaatgctctcgatgtgggattcgcgagaggaagcagggcaaccgaagcagtttagagacatggcgcgttcgacgaggaagctagtaatgttagcccagccgagctgattcggttgttagggttgaagacttacgtgtccaccacgggcaagccgtcgacttccgatacatcaacaggctggaaccccccatgataaagatcccgaaagacttcacccaactttggattcttggaaagcttttgcacaagcagggacataagctgtgcctgagtacctattgtcatggctttcgcctccaagttgagaagcaggctaaggttccgtttcggattctttgctgtgtgaaaggtatgcgcaaaggctttctcgcagaggagcaaatcaccggctttgacggcagcagttgtgaagaggcctcgtccgcgagaatccgtcatcttcacagcgacagggccgatatatgtggcgtggtcgagctgcggtggaacacgctttgctgcctcacgctgcaggcgcttgaactgatactgacctttctgctgttcggcaagtcgtgcattggcgcggctgaactcggtcttcgcgatggtattttctggaaactgtttggcgagaatctcgtgcgtttcgcagcactctcgaagccgtct

SEQ ID NO: 9166 - DNA, 1794 bp, Emericella nidulans
ctactacgaaacgtacgtactgggcgccagcactttctgagccccttgcctcgccacttggactcttactaatgtgttttctgtaggctcctgtcacgcgcacatagcaattacttagcacagattaacatccacatgaatgaacggcaagagcagactgcggatgtattagggaaactgaccgttcttggaaccattgtccttcctctcaacatcatctgcggtatgtgggggatgaacgtgaaggtccctggccaggatgtggatagcttgacttggttctactcgagtacgaacacctcctcccttcaaagcgacctctcaatggctaacatctgttttcagtcaccggtggtctgattatctttgcctttgcctctttcctaatcgcgaaacgggtgtacaatatcgtctgagtggcttggcgagttacgttaccgatacctctggtggtttcttggtctactgtcagatagttgcttttgaggtatatatgtatttaagagccggttactggctagaagctgttggcgttgagtgactatgggctggtctcatcttctgatagataagcaggtatttggagtacataaagccgtggccaatgaataagatagccgagtctgggtcgatgagagattacttgattccatgcaaaatgctatagctgaggtttcttagtgtatctgacactagcaccgcttcataaacctgcttactgtgtgtattgacaagcctcatgaggtcatcgtgatggcgaaacgctgtatttgtgaccattattaccaggtcgtactcccaattaggctgtaattaataccgttgcctcgtcccgttatgtaatgtccgaaatcttgtcagttactcgaggcccagaacttggttcatctttatcctcttcgcgctcttagatcttccatttcatcttccctactctgtatctgcaccaatccttggactatcatcttctcatcctatcgtcgctcatcggtatccttgcggaggctgactaggcttacagcggtggaacgcccgcaacggccttgcaccagtgcaccaacgtactccatacgactcccccaccgctattagtgggctcttctctgcctgcggccttctccccggattcttcgttcggcttcccactgctcgcactgttcgacgtgggctcgtttcattgggcctcgactccccctcccctgagcactggactacaattcgtccccaacagacgtttacgaagaatcaagacgcgttgagtctgttgacacttgactgttgctaaatccaccaatcttcgagtcctggagcagtctgccgccgccggatcctccctcctcaagccggcgtctccctcggatcgacaagtggtttccgcgagctaacggggccgagcctggttctagacaatccaccacttcaccgtcttctgatcaagttatgtgtgttgctgcaatcgcatcgtactccgcaccgctgcgtcgctctggtttccataatctcgcgctcatactattcgactattgaaagaccccattccacgatcgacagatttgctccttgagagtccgtgattagccccttcaaaattcgacttttcgggatttccacttcatcagcatgtggctgttggccattcgcctgccaaatccctcccccatgtaacgtgctctgtgcggcatcagctcacattattgtcatccaacggatcggtcgctttgctcgttggctgattttccaggctagaatagccctttagggcggcttctcttgttttgattttcgttgctctct

SEQ ID NO: 9167 - DNA, 1510 bp, Emericella nidulans
atcggattagccaatctgagttaggctccaaggacaacctggtctcaaacgaaacttttttttttctcgtatctgtcttgtgtattgggcacgttgagacggagaaatattttgagagctagcagggaaaatgttggaaggtcaaagctggcacatgacgttgtacacctacagcactggcctcctgctacggggggaatccacctgccgagccctggagctgagtgcttgtgaaaggacagcggccccggatctgttcagggtttgtcagattcagctagtagataggtattaccggtacctggaactcgcctgtacacgagagactaaaaggatattagcctgttaaactgattctcggcgacttgaagatgttctgacttgcatgttcagggctcccttcgggtgtcggagtctggaccgctgaggtgatgtcgaattatcgcacccgctcaccacgggggcggcatttccgcatttagaccatggtccaatgacatcatctctgtacccacccggctgactaaccttgtcacctccaattccatggtttgggctgattatgcctcacagcatttttgagtttggccttctgtagcgtgagcgctttgtgcctaggttcggggtcaggagaccggacatggctttttttttttcttctggagccctaataatttatcaaggccacatttcatctaccgtaaggtggaagggaaagcagcatggcaatcagctgctggtccagatggagtagctgctcagagagccccgtggtcggctcccagttgcgggtggagcaggtcattaccaggtgtagtcagtggtcagtggtcacatcatcctctgaatctctctgccttgctgttcgcccgttagtcaggaaccagctgaggataatcggccttgatcgctcgactttacttccaagctcgatcccaagtaacgttctgcagtagaaatcagttcgacgagagctttattatttaaattattatttacgagatatttcattatctcgaccttcacatttataataattacttcggctgtctgatcgccgaccccgcatactcactagccccacaaagtcacgtccaggctctcttgtaagttgtatcggcggcgtaagtgtaagataccctgggcttccagtcatctgtttccttgactgactcctgtggctttctcctcctctcacttcaactcactcactcgctcactcacattactgtctttctcttgctattcccaatttctttgaacttgttcctccttcttaaaccttttctacaaccgtctattttctcgccctctcctggtttccgtctttttaattgcttttcttcccatttctttcattggtccctggctaatttttcccaggtccccttgcccccaattttatcctaccagttgcaatttaccggcttaaatttttgaaaagccaacttcgatcggattttgttattttccaagatttgtgtattttcaatttccgtcatagtcttta

SEQ ID NO: 9168 - DNA, 662 bp, Emericella nidulans
gaaaattcactaacgtgccaagacgcattgggaagacaaaatcgaatagcgaccatagctcggtcaggttgttctgcattggcgttcccgaaagaataatccgatgtggtgttctaagctctttggcatgcatggtgatggaagtgttgggattgcgaatcttgtggccctcgtcgaggatagtacctccccattcaacaggtatcaaaagtgaagcgtagctctgcaagcccgaataagtggtgactagcacatgtccttcttcaactactcgcttgacaacttttctcgccgctttcaagccgctgctagagccaccagaccagtaggttccatacataagtgcgtcctcgcggctgctttcactctttatgttcaccattccgctgccagaagtatgcagaatagaaacacggaatggaggccaccagcggtgaaactcgttgacccattgtttcattacagtagctgggcagacgacgatgatcggcttcgtcaacctcttgctataatgtaggccagccagaaatgcaatggcctggattgttttcccgagacccatttcgtcaccgatgatacctccaactagctgctggtgcaactcccacatccattggaccccggttttctggtgatcgaaaagaaaaggatggatctgtatg

SEQ ID NO: 9169 - DNA, 531 bp, Emericella nidulans
ccccgtacccctcgccggagcttgtcggaaagaacggggggcatgatatcaagggcctgcaggcagtcgggttcactgctaccgtaaactggatttgcgcagacgttgcagagactggcccgatcacgaaccaccggcgtgtcccaccactcgcgcctgtcgggcgaggacagaagacagtcgagatcgaattgaacgggtagtgccccctgtcgggcattaccgacaaccacagggggagagggacctacagtgcctcgtactagtttaagtggcgggatgcccacacggcatactggggatggacgggtcctgtcgacagatggtcgtcgccgcactaattccacgggcgttactacgaatgctcgagtcgacctcagaatgcccgttcctgcaaggtgggcccagacgaacccagtgccgggcgatcgggattcggccgccgtgcaggaggttactataacccagcgcgccccccaggttcctaagctctctgctaactcgaatcgcatgcaagttcacttttccggg

SEQ ID NO: 9170 - DNA, 462 bp, Emericella nidulans
gttttaatctattttccatctaccatacgggacagttatatcttccaccccctgtagagtgtccattgtataaaaacgatgatccgcaccgaaaatcacaggagcccgaacaagacgtaacacatctaaagctggctgaataaggatccataaagagtcagtaatccgtggcatctaattaaacacatcctaccaagaacataaaatttatactacacaattatacaaatctactctagtaaacacccctcaactccgtcagcacagctttctgcctaggcggactcattttttcgaaccgatcgacgctcataacaaaagtaccccgtcctgcactcaagcacctcaggtgcttaaggtaacccaccatctccttcagcgggactttagctgtgattgtgcgcggtcgattcctagcgtcggaggccatcgacccaccaacaacggtggaagattgaaagg

SEQ ID NO: 9171 - DNA, 823 bp, Emericella nidulans
cgacaaataccgccattatcgttggcaggaaccgcagctgcaacagccgacaaggccaccatggagatcagagtcacgaggacttgcatcttaaaggttattaaggcgagtcgtacgccaggaacagttgaagccaattaaaaagagacgagggactgggagaagagatgagagaatcgagggtgttgaggagaggaagaagagctggtgggatgcgagggggggaactatatagacacaaggcggaataaaatcagaattttcctaccaccaatataactgtctttcatcttatctatgaggtattcaagcaaatattcacgcaatattaatgtaataggcattttccagtgagagcatccggggcaaggtgactggaacagggctgttggtgcaggaaactctggtgcataagagtagtgtcccaacccctctgggcaacttgtagggatgttcagggatagttagtggtttcatttcctgttgctggcagttgaagagctgggctgctcgctcattgggtaggttttgttgtcattcacacatatgagtggtaacagacagaatttgccctgtttcgggcgagagttcggttgctctaggcaggacaaagaaaataaagaacaaagacgcagggagacgtaatcagcactaggagattcctatgatctttgagcatattgcaggaataagtgacaaaagccatgccagcagcaaaaagaacttcttttgatcaagcaccagaagcggcttatcaattgagcacacagaatagtaatcgatggcgagactgctaggaccattagctgagctcaaacactag

SEQ ID NO: 9172 - DNA, 529 bp, Emericella nidulans
atgatgggtggactggcttgtcgctcggggctaatgcgaatgagacccgagggaaacttatggagaccatgacaatggactgcggacagccggtaaccaagtcatagctgagaaacggaacttgagcctacactagtacggatgatgtacctgttaacgctaggacgtgctgtgcaagatgccaggcacagcatgtggtatgcaacttgaaagctcggcctatcaggatgaacaggcaactgggccctatgcattcggaaaggtgtccagaccgaagaggtctggcacacgacgggtactgattttcaatttcagggaattcctcttgccagtgccctaacgaagcaaaaaccgtacgcaccttgcatcgcgcctaacacccctgtgctagcaagatcctctttcgtcttccccaaaggctgacactgaacggacacggcgggtcaagaaggatgacataagggtgattccaacgggaacatggttctgtcccaacaaatatatgattggagccttaaaccaaggctgc

SEQ ID NO: 9173 - DNA, 459 bp, Emericella nidulans
aacaagtacaacaagccaaacaaccaccgccaccgccacaacagcaccgggcccctcccccacgcagtccgggctaataaaaacctgcacaagcgactataaggcacaagtaggggacacgtgccaagcgatagtgcaagaaaagtacccctatgtgaattccctgaccctttttgtgcgctggaacccggccgtcggggctagctgctcgaacctgctggctgggtactactactgtgtcgcgacagaactccaccagcccatgccagggattgtgagtaactgcaaaagggattatcaggtgaaggcaggagatgactgctggtcaattcagcagcggtatgggatcacggcagcgcagtttaatctctggaatccaatggtggggagttcttgcggaagtttgtggcaggggcattttgtttgtgttgcgatttagaatggcaggttggaattaga

SEQ ID NO: 9174 - DNA, 193 bp, Emericella nidulans
cggaatctcaatggggcaggcgcagcgccagcactctctcctccaatcccaatcgtccatcaatctcaccgcaccgggtgaactaccacgggcacagcgcattctcagcgcagtccacgacgtgttgctccttctcagtgcaagcggagtagttcattttgactctccctcggggtaaggaatgacaggcttc

SEQ ID NO: 9175 - DNA, 1219 bp, Emericella nidulans
ggtataacagctctgcatcctttcattcgcctagtcatggcgagtttttcccgctctccccggccctaatccgaagtggcctgatgccttagcggccattagaaaaaatgtgtttgtgccttgatgccttgatgccttattcccggcggcagaagtcacatgattatatcaacaccaaaatgttatgccggcgaccagaagctagcatatagagaaatcgcagccaagaaccagcaattcgtacagaatgcccccatcagccattcccccattcctccttccccgaggtgttccctcagcacgagcaatcctattcctgtcccggtcctcccgcatcggcaggctcccaccgacgcaccgctgcgcatcaacaaattcctcaagtgacaacagccaaaatccgcgcgtcctcgcgcaaccagataaatttcgcccgccctcacatcctgcgcgccgcgtcgttccaacacgcaatggtaaagtcgttaactaccccggtcccaagttctctgagaaagaagaggcggagcgggcaaaaaagaagtacccgaatatgttcccgcccgaggggacggtcatgtttcggtttttgacgagtcggtggattcatgtctggattgcttttgtgcgtactcatttacccgcaaactcgtttctgggttgggacgtatgtgactaatatgtgagttggcagggtgtgttaacatctcttgcaacatttacgttcaccacaaacttcaaagcaactagtcccttcgcgcaccttcttccgccctggtcggcactactgagtcacccgattgatactatctctcaagcgctctcggtgtttcggatgcatgtgcaacatacctctgtggagacgcgggagaagcggatgagggccgtggaagacgcggagaagaggaggcagttccggattgcccatgggctggaggagccaagtgagcaggatcttgcgaaggaggagacgcgggcagagcaggtggatgatcagtcacctattgctcctgaagctcgcgatggtgcgggtgccggggagtacgtggattgggaggggaagaggaggcccatcaagaagtggttggggatttggtagggttgcggtcacttgtgggtggctgatgcttgatgtgaatttgggttggggtatgtggtcagggtgctatgcaggtattgagctagtcctcttattgaggcggttgctgagcaattatgt

SEQ ID NO: 9176 - DNA, 1653 bp, Emericella nidulans
  unsure (1)..(1653): unsure at all n locations
ctaaccataaacaactcagttcgcctatctcttttacgacataatcttcacgtacattcccaatgttttccagacaatctttcaaagttgccccttagacttgcacacagacgccttctacccctcccgcgcgtcagagataaaccaccgtcttgtgcagattgctaacggcgacgccacttccctaatccactccgttcacgcccggtactcagagacacagccctgcgccatcggcctcgactggtcgttcccgcttgaggatttgctcgaaatagccgaatgtttcaagggggaagcgctggctgccatctgtaagattatggcacaggagtatcaggcgcgcggtggcggtgtgccggatttatttctttggagtgttgaacgaaaagaggtgtgttttgtggaggtgaaaagtgctaatgatcggttaagtgatacacagagattgtggattcatgtgttgctcggatttggggtgaaggttgagctttgtaatgcagttgctagaaaggttaggagggtttgaagcgggcatacgcttgagtttacatggggtcggtggttaatagctcgtagatgagatttagacatatactatagataatcaagagacaaatatgcgaccccagcggcaatagtcatatatcctaccacgataaaaagcaattagttcaagaacgttttctttttatttcaccgacttgtggtaggtcatagacttgctagcattgatgatcctaactaagcccagcaccgtttctctcctttcaagcaaccatccatttcggaatgatcactatacagaaagagacgatatttgaacggcgcgacctcgacctgtcgagaaagctcaacccaacccagacctggaatatcacacactgagctgatacaaagctcaccgcttaagcaaccatggtgctggcagtagcggactcgtacttccaggtgggggggaggaccaccgacggtcttgaaggatcgggacagacggtggataccagactcattgagaatgaggcggaacttgctgtccttgtccttgcttgttgcgcttaaggtgtcttgccgaccgntaactgttctgaacaatgttatattagcggttgcctgtacctatacctcgtatctagaaaatgtcttaactcatattatgtagtgtgatcatgtgttattctatttgcatgagtgcaatgccattggggtgttcttcttgcgtgtctttttcttatcttaaaatatggttctgtcgttataatgacttacttctttctatttcctaatatactccatttattacctattttttcttccgtaaaatttttcttcttcattgttttattttctactttatctctctacctttaatctttttacatttttatctcattactttttgcttattgtcctagatttacctcataattatatttcttctattcttatattgattaactcaactctattatcgtataatgtaattcacgttttaatttattgctaactctattttattttgattatttgtttaatgattttatatacttactttccttgtatatatatttttattttttttaatcttagttttctttactacttcttctattgttcttggttaattctaattatgtagttctcttttgcttt

SEQ ID NO: 9177 - DNA, 520 bp, Emericella nidulans
tctgtcattcgttctcgcaattttggaagaccaagatgttcagcaaggtcttggaaaaggatcttgataaagatacggctgctcgacgttgtttcttcttcgttcaagtggatgactgacagaacatgccagccaagtgcatctgtactcagcatatggccgaagaaacgtgcgatattgcgcacgcgattggtttcatatcgatgtatcgtgtcataatatttggcgaatgcgttttcaaacaggtctgaccagaggcgattaattttcgcgaatcgttcaccaataagaccatagaacttggagtacgtccgctcttgagagcaacattcgatgatcatagaaggaagttcaggttccaggcccgctggcaacgagattttcatcaacttatgacaacattcttcaaagtcaatactggacatgatagtcaagtaaatcgttcggcgcagattcacaaggtccgtattgctttggtctttgatgtccatctgtcgttcttcttcggactcctcgtctg

SEQ ID NO: 9178 - DNA, 944 bp, Emericella nidulans
cttcggatatctacaggggtactctggagaatatcagtcaggatcgagagaagcttgagaagacggtgccgttatggctaggcgatctgctgctgaaggtaggctgtctcggatatttcgagtcgttcatctctaacctatcagaaccaaatgcctatcaaggagcctgtcaaaatcgcatttacgctaaggccctacgatgacctattgccccctgtcgtcaaaccagagacgtaagtgcgaattgaaataagccgcagaatgctcgttgacaatctgcagaccaagcctcaatggcacatccaacaactcccgtctgaatgcgaaccggatgcttcgagccaagaagatcctggcgtacgtatcagaacgcattgaagagccaaccaacgacccgctgcaggacgcactcaaaccggaggagtaccttgagctgtactgccagaacaaggtgggcttcatacactatatatagcgttaaagaaagatttgctaacaaggaaaagctcatacccccaaatatgaccctcgccaccatcagggtcactcactggcgaaacgccactgacatggtccttcactacaaggccaacggtaagaaggcgatccggctgataggatctgcgaatgacgccaacggtcagggtgaagcccaatccaaccagcaatctcagtcggaatcatgtgcggtccctaatggtgaggaagcgagtgcttcacatggcagcacagcttcaggttcggtgtctacaaacattaattgagtgaggctttcccttatactctaatgggttggcttgttagagtatttcgttcttttccttcagcttctttgacccgcgtgggtggtaatgatccctgtacggcggcactgcgatacctctgttttaccttcttagcgatgtttctctctgtgtcgatattgtccgatctgtatatattag

SEQ ID NO: 9179 - DNA, 484 bp, Emericella nidulans
  unsure (1)..(484): unsure at all n locations
atatgctcgcgagaagaagaaccaggagtgaactgacgatcaaaggactgacgagtcgagaggaaacgcgcaggcaagacagggagaccacgcaggagatccccatccaagcccaccctaacctctgggctggggtccagcgagataacggggacggcttcaccctcgcccggtacgacaaccacgatatcagctttgacgccaagcttgaatccatccggccaatcttccacgaaggcagggacatgcacgaggtgcagattaagctcaactttatgcggccgtactccatggaccatcgtatacggtatgccaaggtcgacgtcaaccttgactctcgcggcagggncnngcctaacatccgcgggatcatgccgcacgggacctggatggaggtatcggagcaggaaatcacctcgggcaagacgttcacagtgggtgcgtcggggagcggcggccctcgaacgtcaatattagcatggag

SEQ ID NO: 9180 - DNA, 467 bp, Emericella nidulans
tccgcatcggagaagaatcttctgagatggtcggccgcgcgggtacgacggcgctcatcatcgtgtttaatcaaggctagcatcacgctcatcatgacatttagcccgtcaaactcatccacggaaaccaaaatagtgctgaatgcgtcatcgagctctttccgctgttcatcgtccttgcacgtgataatgttgtccatcagcgtgttcaagatagtgggcacgcgacgagccatcgcagagccagcgacttcggccagagacgcgagtgctttggcgttgaacgtggaaataggtgatgtcagtagagtcgggatgaggttgggtagaatgatgttagcacgcgtctgctccgtgaggagagtcaacaaggctgacaatgcttgctcagcatctacgtcgctccgtagtaggagcaggagatggggcagcacctgatccacagccttcttgcccaagatttgctg

SEQ ID NO: 9181 - DNA, 1160 bp, Emericella nidulans
tatgtcccatgtcatgaacacggtatcatgaaactagtacacattagaagagatagaaaacagaccgtctcattttcaacactgcaactcccatgatcgctatcgtactcggacaaaatgaagaaaaatccatacgcctgatgctttggtaccaaccacaaagaaacgaacagaaatgcagatttgacgacatccacccatgggattctgattagatgatggagccatcgaaacagattcacactcaattgccaatgtccatacgacctgatgcggcatcgccggggaccctctccttggtctcgactagctcatcctcatcgtcatcctctagctcctcctcttcgtcatcctcaagatatctaacctccaccccagcatcgcgaagtcggttcctggtctcttcgcggtagcggtcctgccagcgcgcaagagcagcactagcgtggacacggaaaccgtatatgcggggctcgtagcggcggatgctcttctccggcaggagagcagggtatacctgaaagagcatgctagtaaaagaggttccgaaatatgcgccgtcaatcgatgcatgtcgcgacgatttggggttgtagatgtcctcgcacttggagcagtagaggcggacggtgctcatgttgggcacatcattttgaccggtcgggaggagagggtggccttcacacataacgcgtgggcactttccaaagtcgcctttcttgtatttctcgacctaatgacgaattcgtcagtaacacctcaaaaagtgacactcgatacgtaccatcttcgcgaggccacgggtggtgacaatgtagcgagcatggacaaggccatacaagtggcgcgccgatttctcaatttgttctcggaggtcgtcgtcggcatcgaggtcgaaaacatccgtcaccagatcgagcgcgtactgatagtagggaacctcggtgttcaagccggtaaggttgaagcggtcggtcaggtattcttcgtcgatctcacaaaagtattcgttgccgcgggatgagataaactgtgaacgccagttaggtttcggtcttggaagtgtgatttgatatggataacgctcgcgtagggagcgcatagcatggccggggtcagaaaacgagtcacagccagaacgagactgggactgtaaccct

SEQ ID NO: 9182 - DNA, 797 bp, Emericella nidulans
gggggggggggggaaagaaatgaagcttctatagttggcggctgatacgaccatcatccatcccacgtcttggctcgcggctgaatcagtctgttcggtcttctacgcgacgctgccttccagccagatgaagtggcagacacgacgaccctactcaaacatcaaatcaagagttgtggccgcaagctctccagaagacgaaaaagcattgcgacggacggctcatttcaggggcgtcttcaggaatgatgtggtttgctggaaacctgctgcatttaccacagctgcaccatgacctgggacgaagcccgcaacgagctgcaaccagaaaaagtttggaggtctaggaaataccccagcttcacgtcatgactggtcccgagtcactcttggaggaggcaacatggaaggcagctcggaaagattctgcccagcttttgattatatttagcaagcaggtcggctgccaggctattactacaatcactactgctagaatcaagggaaggagtggctattggtgttatgttctcttttgcggagacaagaacatttttcttcaataaatggcgggcagtgccttccatgagaaaggtacatgccttatataagtatgctaatcgactcaaatgtcttcctctcccactgcaaacagttgattgggaaattcaggattactctcacaatatacaggacacagccctatccaaacccactagccagcttcactcttctacgcccggaactcaacccgacctcgcccttgaacggcctatcatctttgtaaactctagcct

SEQ ID NO: 9183 - DNA, 1189 bp, Emericella nidulans
ccaatgcttccgagggctgtaaaaacattaagggactctttctcgcagtactccaggccgaaattcaagccctcgaaaacccgcacagtgagctgtggctcgaacagtcccacattctgaaggctcttaccaacatcgccccccacatcgagcccggagatcatcatccgcacgttcctcttcttcaggattcgattgatacgcgtaaacgcctccgccgctgagaagtcaacgccatatacccgacaaaggtccaatatgatgaacctgattggaagtctactgaatgcttcatcttcaatcagtcctcgcatcgtgttctccacatccacaatcgttccgaaaaagagataaccaccgagcttgaggatcaaggtctgctgcccagcctctttcagatatcgctgttggatcgggggccgacgaactgtggacccagcaactttgcccgagtacgtggcacgaatggcagatttgcgcgatgtttgaacaacgaagctcaaacacgccagaataatgcctaccaaaatacccgcaacgaaatcccaaacgcccatagtcgcaacaataatgacaacctagaaaatcagctggaaccacataaactgcggactctaactcaccgtcaaatactcgtgtcgatgtaacttcccccatgtatcgaccagcgcctcttccatcaattcaatccccagtaggaaaatcaaagcccctacgaccattacagggatgaaccccactatcacaggtccaaccagcataattcccgcagtagctcctgcaagcataacgccagctaagcgggagtttccaccactgtcgatgaaaagcaagctgttggtatatacgaggtaattctggaacatgttaggctaagaccctcagaaatttgacggcgatattacctggatactaccggcaaaccctgaaagagcatttgtcacaccgtgagctatcaactccctatcgacattcaggttatcttcgccggtggagatcccagcgccggcacgttgattggaacatgcagaattccgaaaaatgtgagcgcaaacattgctgggatggtgtcgcaaacgcgggccagtggacagctgagaagtctaactagtcagacaggatcggacttagcagtggcagtcgcttaccatagagggtatacaagtggtaccagggatttgatgatgag

SEQ ID NO: 9184 - DNA, 235 bp, Emericella nidulans
  unsure (1)..(235): unsure at all n locations
gcttcttcgcgccgtggcgcgtagtcgcggctgggccgtgctcttctgctgctgtccctcgtcctcctgcgcgcccttccttgtcggtcggggttgtctgtgggcggtggccggcggcctcgtcgtgcggtctttatcgcgccccgtcggggcccgtttggtccggcttctccncggttccttcctgctctgggttgtctcgcccgccggtgctggttggccgtgcttcggtggg

SEQ ID NO: 9185 - DNA, 838 bp, Emericella nidulans
tacatatttagactgaatgaaggttgtgctcacagttctggcaagcctggttctcatcgtcacgaagtgtaccgttaagcgcagccagctcgcgaagttggttcctcttgagctcgttttgtccttcagggatagaggcagcctgcttatggttagatatatcatccagcatagcatgaggatgcttaccgtttcgataacattgtgcaccagcttctttgctttgttaaccttctcttcggtgtctgccataatcaaacaatgaaggtcttcttcctggttgctagcgtgagcagcgtcagatcggccttttccttccttgacggagcctttgccacggatagcgatttttgcaccggactcggtctccatcttcttcaaagtgtttccacgaggacctatgagtaagccaactgtaaaaggtagcaagagctaagtgttagttcggtttgttttcttctgtattttgatgatgagagcaacattaagcagcaaagcaagggttagcaagaagcgagccgaaaaagcaccgctgaagagcagcgatgtcttgatcgtgagcccgactcgagcaaagagtgggtgcaaaacggttaggagttagagggttagttatcatactgaagttaatctctggatagtcattgactggcacatagaccttctcctgggtcttagtagggcgcctatagtcagagggcgggtgatagttaggaatggtcttgatcgccttttccacgagtttatgacgctcatcctcgaggcgcttgcggtacgggtattccctagtgtttacacgtcttccaaagttatcgtactgcggtgggggagaagggga

SEQ ID NO: 9186 - DNA, 786 bp, Emericella nidulans
gaagcttcaaaaaatttcctggtctgtccgtgcaagacagctgagaaccactccaaagggttctatgtataaaccttatcggctaatatggcacacaattcacgaaaagacaccgtcgagaaggttgaggtcttgcagcctaatacccacttgtgaagctcatctggggttgaagatattgttgttgagtgacatagttagactcctgttggtaggggttgtgagtcacgtattggacactaggcgagggtgttggcgacggtgagcaagcgctgggcactggaactgctttaacgtagcccgcattgccattgacaaaggcttcgttctcgggagtaattggcggagtgatataaccgtgaggcatgttggtgggatgaggagccttttggggggtagcaagtccgatctctccttcgtatggtttggattcggagttgacaacgtcggatggggggctgggaggagtgtagcttgcgatcgaagcctggcgtgcgaggaactgctcaaggattttcgaaactcgcgaataatgagatgacgagtacttcctcgcgagcacttgcgacggctggtggagttgctgcgacaatccaaccaatgtcatcgagtcatactgcgaggcccattcagtgtgacgaggctgagggcggttgaggatgcatcgtgctagggcaagggaagctctagcaaggtcggatgacggcttggacacgaactcgcggtgaaatagcgagatttccgcaatgtagagcgcaagatgctccacctccgggtcatatgggg

SEQ ID NO: 9187 - DNA, 1663 bp, Emericella nidulans
tcctgacaaatatccaccgggcccaaccaagacagctgctgagtcgctctccgccatcataaatgaagcgtaccgcacgctttcagaccctctccttcgcgcccagtacctcctgcgcgagttccatggtattgacgtcacggcggaggatggctcgggggctggtgcgcagcgctggaccccgagcttctgatggaggtcatggatgtgcaggaggcgattgaggaggttggggaagggcaagaagcagtggagaaaatcgcggtgatgaagaaggagaacgatgagcgggtgaagggatgtgtgcaggcgttggcagaggcatttgataaaggggatgtggagggagctaggggagagtgtgtgcgcttaaagttttgggttagtgttgcagatggattgagggagtgggagcctgggatgggcgggattcggttgattcactgatgggatgcggccctgctctattccgagcctctacttagaccgtcgttatgttgaactatatctcagagctagagggtccgaaattaaaactctagaatcaagcgctgttggcagcttgcgttatatattctgttatcatatattttacagcaagacttacagccagactagggaaaaaccaatcggcaactgccggttcctagatttaggcataaacatttccactaaaggccctaacctaattaaaaccaacctcggaacatagcatgtcggatatgggatagtcccgcaataagcaagaactatcaagcatgagcgaatgccaggtgccaagtaacgcgcaacatctaggcagaccgaatggtgtgccctactagaatcagtctcatcagagcttagctatgtaaaaacaaattgcggacagagctaagtcgtcaggataagattcgagacaaccgcgaacagagccaaagacatgattttctgcaataccatgtgtttgaatatgtttctgatgcagcaaaaccccctgcgagaccgccaagcaaggatgtatcagataggtataagcaacccgtacttcgaggcagtcttacgtcattgcagacctgactgtgttcagcgccgtagctcacaatgcagatagtaacaatacttacctacattggacggtttgaccgctacgtcggcggcagacggacaatgggtggccccggtcacacatcgttgggtctccaaggcgtaagggtccaacccaaaccatcgggcaacgatcaccagactcgagagcttttgagtcgccctgataagaccctcgccacgaatggccacgaactcgcgtgtagctagctcactgctggaggtccatcgccgttgcgatccagacatactagttttcagcgaggagctttcgagaccatccctggagcctggagaactgttcctgacgaatgaccccctttggaaagggttgatgtcctagattgttagaccactaattgaaggcctggcacctggagatgtaccctgtccccggagctttctttgcttatcgaaccttgatggagtgttaccccggtgccaactttctctatgcctaaccacaccaatagtgtaggggggctatttttctcggggataataacaacgtatttttatttttattcctaaatactgtgtcgaactacattctctcctttcattatttttattattt

SEQ ID NO: 9188 - DNA, 1477 bp, Emericella nidulans
gaccttccagggcaacctggatgacgcaaagtggctctggtaacttggcggcgtcctcgtcaatcggtgggacgagcacaaacagctggtgtgctggggcatcgctcatcagttggagatcattgggagtgttcttgtagtggctggcgacataaagagccatcatctgctggaggaacttttcggagacaggatggaacgagaacagagtgtctcggtttacctggagcagctggcattgagagggatgagggcatccctgagtgttcatttttgacttcggtagtgtcgcatcgagacatagaaccctattcaaccacttctcgacagagtcaccaggggcgtatctgataggttcggacagagtgatttctcgcagtgaccgaccacctaagcccttgtcggagttcttctcaatctttccagtcgctcgcgaagcaacatcagtgtcatccccggcaatctttgcaccgcctcttgattgttcgcggagctgttggatcagttttagagagagagacctgccagttccctcgtaaccgtttattgtggaagccatgaaaactagatacgggcccatcagctttcggacgagcggtaacggaatggctgcggcttcatcaatgaccaggagttctgcctgtcctagcacatgagcgtcctgaggttgaatgtattgaattgtctggcgatgttggcgatggatgttgacgcgaacaatagccttgttgaaatcagggttggtagactggagaatggtgtaatcggcgtggtcggcatagcgagagcatcaaagcccttgaagatgaattcaaacaaagtcttcaagttctccggacttggcgaggtgatgaagatgttgctgtaaccgtaggcaattgctcgccgcgatagcgacaccaagagctgcggatataccgcgacctctggcggcagtcagcgtaacagtgcttcgaagcgttttttcggcaatcgcatcgacgaaagtgagcagtgccttagcttggtcaacagttcgtgccaggttgaccagggacccaacaggctgggactctgccagatcatctttaatcttctccagttccttctttgtacccttgctagttccatcagtctcatcgggtggtggaagcggcttcacattctttccgccggaaattggcagcacattcatctcgtcgtcgatgaccaagcaggagtcgcagctaccaagggacaggatgaaacgctcgttaaatcgtgcgaccacatcatcgtgtgcctccgttcggtatctcgagtgaatgtccatcgataacgtgtagagctgttttaaactgttcatgctcttcaatagcatgatcactgtaccgccgccttcgactgtctcgatggttcgcgcgaggagatttggtgtgatcgcctcaaagtcctggaggatacacatgccatatgtgtttcccagaatcttctccgtttccttatagtacacataacg

SEQ ID NO: 9189 - DNA, 2059 bp, Emericella nidulans
gcggccatttgcacctttcacgcccacgttgctgccccacagtttctgctcctcttctggaatctcgccttgatccgcccaaatcccatgttcccaactgacactgacagctctcctctcccttttgcttgttgcagttgtcgtcgtcgtcgtcgctctctatcgtctttctctccaaaatccatcgctcattatcatccttggctaatttgtcaactcattcctttattacttccttcgttcattttcgcccctcactctcttttcggaacggctatcgtcatagtttggtgtggctgttgaggtcaaattgtcaatagtcgccattgggtccctcacacgcacaattactcgcaacgcataatcctaccacgctactccgaagaccaagccgtccttacgctccaggcacgctatcgaatccagccaccttctctaactgttcccttcacaggttagtctcagctggttcgatcctttgtctcgtttgttgttggagtctgggagcacccgtcccacaactagctccttttgatcttgtccctgcagcgcttcccctctctgttcccccatcctagactgcaagtttctcctgttaatcgaccttctcagaaacactcgttgacagcctctctccgtctcgtcgaaaccgcaaatcttcatactttccaaactccaaaactccggaaaattccaacaaacagtatacgattacggcaattggtatgcgtttgcccttatcagttgttcttttgtacggcttgctcttgggtggccgcggagcttccggatcatgattgaagcgcatctgctaatcactgggtactgcagctcaaaacgccctcgcggtgctaccgagaacagttccttgacgagagaagaagatatacatatcccacacaatgggcctgatcgagaagttacaagcaagtatgtcttccatgttttacctgaatacctcttgtctctatcctgacggcattcgcgcgaccgcacaatcccaccgaatatcttcctggcgcaatgctgataagtaaccaacgcagagctggaactctaccggttagagcagcgctatgcgcgccggaaacaccgcagcacatttactggcgtgcagtatgttgacggtgaatacatatactcgaacagctcaaactcatcatctgggacaatctcaaaacattcacatgggtcttggaaggtcccatcctggggctcgaacgacccacgaaaccgttgatacgaatctgagcagcattggtgtttcctgttcatgacgatgcatcctcctcgttatgtccctcgtggaggccgtgattaatgttttctaccttgccttttctctttcaattatagaacaaagcttatgttttgcacgcttttattttgctggaactctgattcttattgtcatctggacaaaagcccacttcttcccaacgacttttccaagatgcgttggatgggttgtgatgcttccaaatcagactaggagctgttgacgttcacaaattcgttgtcgcatattgcagacctgtgcctgtgttaaatagttttgatgagtatagctttcgctccagttattacagatcaagcttcacgttggttaacctttgaaaacaattaacgcatcttggtacttattggttgttcttttcgtcattcgctgccggatatctaaaacatatgtatatatttcggtgcccaggcttgtgtgcccactttgacaatattgttactacatggcgaaatggatcacaggtcttgacgcccagagcggtgtctcaaggagcagacagtacagaacggagttgaacgccatctgtggaagtagaagacacattgaaagctgagctacctcaactaaactgcgtcaacgcttattcttccccccgccaattcttaaacgtcccaaatttggcaagccggatttctgccgttgtggacctagaattcctccttcccagcagcgccaccagcaacaacacttccagcgttgcaccatcagcgggcgacgcggcctcctgcgctgcaaacgcggcgcggcgtatcggggagg

SEQ ID NO: 9190 - DNA, 372 bp, Emericella nidulans
  unsure (1)..(372): unsure at all n locations
tctaaggaacggatcatgtgatcccgaaattttgcacgaattgcgcatctcccctgccgatccacttttcagtaagagaagtgatgctggcgtgagcctggtctcacattcactcaatactgttgaataccagctatgactcgtgtgatttgttcaattgagcctatgaactgatggaggtatcccacgcatcacagtggagtagccctgcagttcatgggtggcaccatggtcagttgagccgagaatgtacgttaaggaacggaaagtcattggccctagcttacttctgttggaaggatggccaactgctgtaaagaacgagtaaacacacccagattacgtgagntagtacttcgtattcgagggcca

SEQ ID NO: 9191 - DNA, 173 bp, Emericella nidulans
cccaacactcgccctgctcgccttgtcaacaaccttcagaatccccttaacactattttccactgtctctggcggcccagcgtcaaacccccactccttcgcaacaaagtctcccgcccttgtcttcacccaccctggatgtaacgcaagagcaacaagcccatccgcttcat

SEQ ID NO: 9192 - DNA, 836 bp, Emericella nidulans
  unsure (1)..(836): unsure at all n locations
agtggaaagaacacaaatggaaagaacacaaatggaaagaacacaaatggaaagaacacaaatggaaagagcgcaagtggaaagaaatgtctggaggaaataaaggctcgaaaacgagaagggtaaagcgacatcgtggaagaacacaagatacacgcgtagagtgcacggtggagggaaattcgatcggacggggaaactcacagggtggcctcgataccatgctctacggcagccatgattagaggacggcaagggaaatcctcgtcggacagaatgggcttgacttgtcgcagaaggtaaaaaaggcagccgcgacggaggcgagtcgcaccatattatactcaaggccaggtcgcgtgcgagcaaagcgggcccggctgtcttatctccaagaaaaatcaccaaacggcgttctgtgaaaaaggccatccaaatggggcagcaaccacggatgtaaccccaggttcagacaagcgagtcaagcctttctcggctgtcttgtctctctagtaaatgggactgggtcggtggcgcaacgtccggagttcaccggcctcaaccttttttgccatcgcctcaatcgcacaccacctcgaaacgtcagttccaagtctgtccaacgccggaccttagcacaaacagcaatacccaggagtagttatcgcccagctctctattcgtccaggattccagcgcaataattcatggtgtccatgccagactgcgaccgaggccaaccgcatggggaacgtcttaaggtacataaacgtttcgctaggtaggggcccggataagaatcttctttcanatgccagataaggcggatcgcgtgc

SEQ ID NO: 9193 - DNA, 971 bp, Emericella nidulans
gatcagcatggcagttgctgaccggccagtactgctcactgaattctgggatccatccatggctggcttcagctccagctgagtattccttcgctctctctattaagcagccagtaaccaaagacggctgattggggccccctccccaatatattgacctgctgataggtattagcaaacaacacaccgtttctttccagcgagaatgaagtacgagtgtatttattactataatcggatacaaccctcttgctatggcatttggacgtagtacttcacacatcaaagtcctgcaccattggatcccaggtcccattcccataagccgaacccccatacgtcaagtagccatcatcgacttgtcccgtctttgccagaatgtcctcacggtcgccaaatgtaaacaccgtctgcatccccattatcatatgctgcagcacgtggcaatggtacatccaaacccccgggtttgttacccggatcctccacgctcgccagccagaggggacgagctggctggtctttgagcggtaccgatagagtaccgatgtgtcgcgctggatcggatgggttccgcgtagccgtatctcattcgccgtcgcgttgtagagaccgtcgccgccgccgatgtcgtaaaagtgccggccgtgcgcgtggaaggggtgtgcgtccacgccgccgttctcgactgttcctcggttctgccagacgatctcgagaacctcgcctacccgggccggaaaggtgcgggtgatgttgtcgaagccgttgccgcgagttagggcccggtggtagctcgcgtcgaggtcgagcctgtcctggtagatgtcgaccaaatatggagacttgggaaacgattccacccagtcatacccgttcttgagccagatggtccggtcactgacgttcttgtggacgtcaatgactattctgcgcgtcacctcgtcaagtgttggaaagtcttcatttgg

SEQ ID NO: 9194 - DNA, 1318 bp, Emericella nidulans
tctatcgtccaatacggtactcacgcttttcaagaacgagatgtatgtcactgactgcttctctggtggcgaagaatatccctccgagcaggaaagtgagcgcatgatacacggaaggaaccctggcgagcttccaaacaagtccatcagtctcatctgcacagttgggggtctttgcaatgccgccgtattcgacactacaacacttggccgcccgatacacgctgttaagatcttcggcgaccctactgatcaggccattctccggcttgctcagactctcgggcccgtccagagcttcattctcagtggaagaagttgtttgagatacctttcaacagcaagcacaagtacatggcccgtgtttcacatctaccaaccaacaagaagcggggtacgtgatacttgccggccgttgcgatgacctggagctgagcatgatactagatccattctcatcaagggtgctttagatatgcttttttcgagatgtacacacgcagttaacagaactggcagtctgtaatgctattcctaagtgaccgcgacacaatcgaaaatatcagggatcgtttgtcagctcagggcaagcgcgtcattctcctagctcagaactcaattccgagcgcctggactaatcaggctttggatgagagagtcgttcttcaggcgaccacggacagtcttacctttgtcgggcttgtcgctctcgtcgaccctccggtacggttttgattaaaacctagtcaatcagtaactgctaatcctttacagcgagacaaaatcactaccgtgattgacacactacgcaaggcgaaaattcgcattatgatggtatactggtgatagcaaataggctgtagatactggctaatcctcttaggtcaccggagactacagctcactgctcaggcaatcgcagtgcagtgcggtatcatcagaacaccccccgagttgatccatgacatcaaattgctggatcactataactcggccgctgtacgcacatttgacgccattgtggtgagcgggcctgggttggctgttctcctaaacgaggactgggataagctgtgcacttatgacgaaattgtctccgcccgaacgagccctgaacagaagctttgcattgtaaaagagttccaggctagaaacaacaatgttgcaatgacgggggatggcgtcaatgatgccccttctctggaagcagccgacgtgggagttgctcttgggagtgggtctgattttgccattgaggccgccgatattggtcttttcgactccttcgctgccattggcgaaggtgtaaaatatggaa

SEQ ID NO: 9195 - DNA, 515 bp, Emericella nidulans
gagatagtgttggtgttcgggaggaagagggagacaagggagagatgagatagggggagcgcacgaaacggagtcgactcgagaatccatttattgaagaggattgtcaggttggaccagaagatccagtttctgcattgtctgatttagctggctgcatgtctatggaggatagtccagaaattgagggagaagcaggaggcatacagagtgcagagaacgatactccatccttgaggagcgggtgtagtatacatctcgtgaaaatggtctccgagatggaagagagaccatgcctactctacttttaagcactttctattaatatgggccgtgctgtactgcaatgcaacaatggctgactcgtctctgctagatgcaaccctaactctctggttccaagtggacagacggtctgcagacacttccagatgcggccaaggtacaaggtaaccatacattatcatacatctaaatactctgagcaaacgtacctagctaccaggtatgcgtgc

SEQ ID NO: 9196 - DNA, 1081 bp, Emericella nidulans
ggaactcctccggcgcgtttgccggactgcacaggggggtcatggaccgaatatcgcgtggctcaatggggttcgttctttcggttcgaaaccctccacagacctccagggggaggccacattcctacgaggctacagctaaccagcccgttcctatcctcccgggctctgaagaagaagccctatacaaaaaacacctcccttttttcacacccccatcactatcatctcctgaagccgaaccaacctactttaacgcgctggacctcatcaaccaaaccgacctccaaaattacggctttatccccgagctcgtaggccgtattccggtcaatgccgctctatcagctctaagccagcccttactcgtccgcattctcaccgaacctcgcaactccctagttgcccaatacaccacactcttctcattgtccgggatcgagctccgctttacaacacctgctctgcacaaaatcgccgccaacgcattcacaatgggcacaggggcgcgtgcgcttcgcacagaaatggaaacaatcctcagcgatgcaatgttcgaaacaccgggatcaagcgtcaaattcgtccttgtcacggaaaacgtggcagagcgcaaggaaaagcccgtgtatcttggccgtggacagggaagtcgttttcactccatgattgcggcggaggaggataggtgggaagagaggatgcgccaaaagaagcttaaagacaggaaggggaagtctccgcttacatttgaggatggtccttccatctcctctttcaaggagtatcggagtaaggcttctgtgtagttatcctccgtttttgtactcgcatctctgctctccgactatgtcctgggatgaggctttgttatttgcccatgaacatatgtgatgaactgtaacctacttatatttaagttagcattggcgcgagatgatgctgttagcgttctgtacatttgcgttctgtatggcttgtttctgttcacacaaattcgcggtttgattcctttgcagtctacatggatatgaaagcactattttgaatgaacacctatgattttattacttgttcaata

SEQ ID NO: 9197 - DNA, 1837 bp, Emericella nidulans
atcattttaaaactacgaatggatcaacgagctgtttttcgagaacacatattgccagacgataccctgttatgcttacagggacgggtacaagccctggcaaccggccctcaattcctggcacgtgagaccaacatattccaactattggttgtagtgagccttcacttctcatacctggctcaataccacgaggaagaggaatgttctttaatgtctcgatatgtggtagtatttctgaaccctagaactacggctcgctgtcatactcttcagaaatggcaaagaatcagcctaagcaattgtcaccatcaccatggcgtaacatgctaaaggctgtttcatgccctgtgacacgcttctgatagaccgaataatatagatgtaggcgataaatcggcagtggcttgcataagaacgatgagtttggcggtttcctaacacgcacaaacaagcgaggaaaccgttacggtgggtatcaaggtgcgtgccagggcgacgatatcacgctttcaactgctgtctcgctctctcagtgacgctgatgagtttccgcggaagatcgatcactcgacgcgtgtcttcggaggactgggtaaggtgtatcgaccgcatccgttagaaagtcaacgatgaagccgtggatgttgggaaatcgcctagataaaagaccaaagcagacgttttatttgagatgcatatgtttgtggtagtgaactaagacagcggcgaggaagaagggcgattggcgaggcatactggaccgaagcaccttttacctgctcgagcaaacatttgaataaagacggacgaaaaaaagtacccgtaaagtagatatcagatgcctttggaggataactgttagaattgggttggattactaccaataacacggatacttgagcgaccacataccacagctaccaacgttcattgcgcaccgtgcagctctcctgacttctataaccgggaactgtgccaacgaagtgatgtaaattgtccatgacacgattggaagccgaatgagagagagtagtagcatgagttttgtgggacagtaggtggtgggaaagaaactgccagccccagtgaagaactacctaagcctgttacggaactattgtttgcgcacttgtacctgcacagccgtctcacggtttctgaggctaatgtcaggatagaaccatgcccctgagctttttctgttcagattctggagctaagcgcgtgcctttccgtttagtttccggcatgaagatcccaaataaggagcaccgacagggtgctctgcacaaggagagtatccaaggttggtattactggttgatattactggtcccaatccttgcgatacatgaccacttctgctcgctagtaatcgagagagcgacttcagcttgcctggcgcaagcctgtggaagcaatggctgcacctcacaaatgataagcccaagactttctagcttgagaatctcggcacttcagagtaccgtgttggtagtgtccacaaacgtaatgtctctccaaaggtcaccatctaactacttgtggatgtcgtctaatccccgacaagctgaaggccccggcccacactccttgcatacagaaatgggactccgccaattgcgttcttttcacttcagaatttgtaaggctcagcgttgcaggattccttcggactctcgaagttctaatctagccgggatggcatacaaagcccgtagaatatattctagcgcacatatagccggaacacggaactgaagatggtggtgcattaggcaatagacgccacagtaaacttcgaagttggaggtcctctatagcaaatgccccg

SEQ ID NO: 9198 - DNA, 1354 bp, Emericella nidulans
tcgcaagccctgatacaagggatgaaagcccaatggcaaatatgggaacacctctgtccgcaagaatcggtacatgtcaagctttggcgagagcgttcatatgaacccccagtccaaagaatcgcaggaagaaatagctcgttgggacagaacccgcgaagaggaggtagaaagagagaatcaggagaaaatctgccgagctgctgaggaatttgccgctgaagagtcagaatcaatacatcaaagggcctggtatttcgtctggaaccatcccgagtcgcaggaagaactgcctcgcttcgacggaactcgtgaagcaagcgcagagacagaggagcaggaaaatattcgtatatctgctgggaaatttatctctgatgattcaacggagaatacagattgtcagaaggcctggcggtctgtcctgaactcggacgaacaaccttttgacgtgccaaggcaaacatatagcggtagagcatacaatggactttggccagtttgttgtgctggagtaaggcctaacgaggaatctcacggagtgctcaaaactgatcctgttggcggagctgggattggcctagaagcggaggttagagagaaacatgagcatgattgtgatactgacgcccagtctgagactgatggctattgtaacatcgcatctggattaagtttcgaccttgatgcttatccgaacgtcgtccctgatactgaaggtaacgccaagtttggaatgcaaccagtgaatgtgctcaaagccgatcaaaacagcgacgtcaaatccgagattaacattctcctaagcaggattgagtatgagcgccgcaatactgctgctgaagcagatattgagatctttcttcctctcgagaaagagctccaaactggttctagcctccatgatgcaacagatgccgatgttaaaaccaccgtcgaggaccacacttctattcatatggcatcgcaccagcgcagcatagagaaagacctgcctgcatccgaatattcggcagtctacgcgatgattggtgcctggccctgttcaagtgaagacactcgagttaaagcaaacgcaatctctagcggagacacagaagacgaaagcgctggctctatttactatgactttagtgatgcaccatcatatcattcaagtcattcagaaaacgaagatcaccatgacctctttaccgaagaaatatccagcgtggatcacagggatgtctttccaacccctgtgtggtatgacttcgccgagttcgaccaaacgaacgtctaccccccattagctttttcatccatactttgctcgaaatagctgacaagaatggccttagccaaaggattttac

SEQ ID NO: 9199 - DNA, 499 bp, Emericella nidulans
cctggcctgcctggcctgattggctgcggtctaggctcgaggcgctgctcagaagagcgcttacatgaacaggcacaaagacttagagaagatcactgaagcagacagagtgagggaaaaaagcacaaaaaatagataaaaattaaatatcaaaaattattcaaaaattgaagatagagaattaaataacataaacagagaaaataataaaaaacaaaaaaataagaaaatataaacagattaaatgaaaaaactgtttacctgatatttgagccattttatggatatccgactactgtgctatggaaacagtgccagtacggatgggtactggagtgcactccaagtggagcccacactgagaactgcgagtccagccagtggggacaaagaagcctcttagaattccagtctctagcgtctttacagagtactttgaagtatcaagtaatgtatcgagtaatgtatcgaataatgtatcttgcaacgatgtcgatca

SEQ ID NO: 9200 - DNA, 1451 bp, Emericella nidulans
  unsure (1)..(1451): unsure at all n locations
gagggcatagagggcatcaagagccaaggtttctggcgtatacagttttactgggcaaggaagtgctatacagcacctcaatccacgacgttcttgtcctgggcgtgacgctcaaggacgggaaggtcctgccggatccctacgacatcacgagccccagtcaacaagtgagatcgggagaccgattagccgccaggctaacaaagaccgggctgcgcggccgagcagactcgagagttagtaacaacctttgacaaacaaataacggagccactccttgagccgccattactctgcaatcataaacaaccataaacaatatataagcttgcaacaacgtcggccgacaaccgacctgagaatggactgacagcccagaaatatcccttttggcggcagaacttcgggtggctgaaacaagtgagcgatctcatcgtcaagacactacgaaagtggaaatgaagtggaataacttgcccacgctcatgcacgagatccacatacaccatggggttctgcccccggaccttgtcgcgtgttgcttgtcgcgtgctgcggtctggagatggattcgacaagcagggtgaatgagccatgctggagttcgtggtgagacgtcaccaggttaatgtccgttcatgccattcctcgaatgacatgtcgacgaacattcttggaatttgcggaattctaaacgtaagcgaatcccgtggtcttggggcaagagccgatgaaagaccgggccggcgcagcgccagcgcggccgcaggcggcctgaggtcagcagccgagcagagaaatctcttcgccggtccccgccaagtctccggatttctccgtatttcggtccgagtcattgattgcggagccccggaagtccaacactacaatgccgactcgtctattggcagcccgtatattgaacagcgcatacttagcacatcctctagattcgctgtcaccagtcattcaagcctttcgtgcatcgtcgaaaatcttgaatgtcaatcttgccatgttgagccgacgacgtctccgcacagtcagcatatggccctgtctggttcaaccgtcccggccctaattttcgcgcggacaaattccgaggtgcttgtattggtaagaccttgcctagtccaaagccttcgcaaatttgcaaaattcgggcgcttaactagaagatgttccgcgtttgaccatacgtggcatggaccgggattagcttttcaactgcgctggcctgaatcccccaagtgcctaaactcctaacgcttgctgcttgctatgtattgtcaaaattgtttgccgtaatctgaatatgtcacattccttttttatagtataattttttatttcnttttttntnntaatctctttacttttcttacatttatatttaaacttaatcttcttttttattataaaattatataaataataattaataatat

SEQ ID NO: 9201 - DNA, 908 bp, Emericella nidulans
ctcaaccatcgtcggctcggcatagacaatttctttcacagccttgacaatctggaacgcatacttccggtgaattttcttcccgttcttgaaccgctcaatcatgtcgtcgatgaactcctgcgtcatctccgaccccagtctcacaccgtcatatccatcatccacagcaatagcgtcaatatccaaactctcaaaagccgacggcgggtctgcaacctcaatagccttctcaaattccaaccggcgcaccagcttctcgcactccgccaattttaacttcgcatcgcggttacccggttcgcgcttcacaacggctttgaaatctcgcatcgcatcgcgatagttcagaatcgcactgtttgccaaggctcgtcgccagtacgccttgatgtagttcggatccagctccagtgccttcgtggcgtccgcaaccgcgaatccatatgcttcgagtttgatatggcactacagtcatgtaatcacaatattagccatgattatggcgccatgaagactccggcgggactgaaaatatcgcaacgtacctgagcccggttactgaagaatgacggttctttgtcatatttctcgatcgcctgggtgtaaaaatctacagcagtgggccactcatgctgagcaaaggccttgttaccctgcaccttcagcgcagtagcttcctcaacatcttgggaggccatcgcaagatagaaatcgaccggtttgtcggcggggggcgctggaggggttttcggtaagagagcacgcggaagagagtacgcgggcaaggcaaaggggggaagagtagagaagagtagatgtgatgctaaagagcaggatcactagaagaaggtagattggggagtgaaaagtaatgaatctataccagttctgagaagtacccaatg

SEQ ID NO: 9202 - DNA, 125 bp, Emericella nidulans
aaccagcgaacccactcaagatcccaacccatatcacccaattcgaccaccaacacaggcaggagaacgatgacaattaccggaactaccccaacccagatcactcaaacacgtcaaacagtaac

SEQ ID NO: 9203 - DNA, 1252 bp, Emericella nidulans
tattatgtcaagcaagaagtagatatgggtcattttgctcatatcaaggagccttgacttattgctgcaagtgaatgctatgcctataccatgctggtaggtaaaataagtcttcacttttagatctcagcaatccattacaggtatacagcttctaccaggaaccgcttgccgggctagacaacacaagcttagtgcatctaggagatgtacctcagtacatctgatgagaataatgttataacaagcagagtggcttcaagcagtgctatttagtgaactgggtttgtccagaaagcttatgttgtgatttacagatatagcatacctgaaccagcactcatttctctcggcggtgttgttataattgaaagacatttccttgacctctcctcccattttgattctctgcaatccctgtgagaggtcatcaatctagcaaccctgtgtttagaccagcatgatcaataacaagcacttactttaaacgtgcattcacactctcattgactcattcaaagaaacagatctcagacctcattgttcagtacttgcacaggcaatctttctggatcaactacttgtggaaggaacacaccacgagcctttgaaaagtctccggtaggccttaacatgagaggaaccgattcttctcgtgggctgagcagccccggctccacagacggtgttgcttctcccaatggatcgccggatacgaagctcactgcattctccccagaggatgtgcgttcgaaaacactctctgaatcgagtgcctgtggtccactggatgattggaccggcttcaaacagttcttctcgaagtatgtaacttgcagatgctgatatatggactcttgctaactggttgcagtgcctgttcggacccatttcttgtctcagcaaatgtgtctactcggccccagctttcgccaaccgctgcgagtttcactcccattggactgacagactctgcgagtgcgaaccgagctcactttatgaccaaggatgtatcacccagcaacatcagtctcctgacagccgactccaaggctgactctggaagcaactccaaggtcagccgcccggagcggtccctaccgaagtatggtgccattgggagtgatagaatatatagagattgcggtgttcaggccaggaaggctgccgagcaggagggaaatacacgtgctttgcttattgagaatgttcccaataatctaacttatatgtctctggctggctttttcaa

SEQ ID NO: 9204 - DNA, 680 bp, Emericella nidulans
tatatgcatcctaacgggcaactagcagcctatgaatggaatttcggagacgtcaaccctcccgttcacgcctgggcgactttccgtgtttttaaaatcgagcgcaagatgtacggtcgacaggatcttgattttcttgaacgcgtcttccagaagctgctcttgaactttacctggtgggttaatcgaaaggacttcgatggcaagaatgtttttgagggtgggttccttgggttggacaatattggtcttttcaaccgctctgaaccccttcccactgggggagttttggaacaagctgacagcaccggctggatggctttttactgcttgagcatgttgaatatcgctctcgaattagccaaacaccgacgaatatacgaagatagtaagtttaacggcactgctgctgcatcttgcatatgctaacaaggacaagttgcatctaagttttttgagcattttattttgataagcgacgctatgacgttcagatctggaggaaaagagagttctttatggaacgaagaagacgggtatgccacaagagtcagtttccatacatagtatatctaacaaatatagattctattacgatgctatctcatacggcgagccgtggacacagcaacttccggtgcggtcacttgtcggtctcataccactatatgcggtatcaa

SEQ ID NO: 9205 - DNA, 622 bp, Emericella nidulans
ctgtgatgacgaggcaacaaagcgcagtggccgttctggtacaggacgattggtgttaatggccacttgagaggggctatttgctgatgctcttgtaacggaccgacgaggaggtggaggaggcggtgccggtttcgagatacccgctccatcaccaccaaagtccggcaactgggcaacccggttgttggtttgtgatgccccacgattctcaatgctagagtcgctcttatctgctgaagatgagcgcgtggatgcagtttcaccagctgatatagagtcagaattacccgcgctgcgcctcggtagagggatgcgggcttccgcgtaaatgcctcccttgatggcttgtccgccaggtcagcggtgtttgttaccgaacggagggcagagggcttagatggtatagcagggggagttcttgtgttcatgggcttgtcggacgaatccgacaagtcgatcaagtcttggctcccagcggggctagcccatggagctggatctgaggagatacgcggtggccgtggcggtaatgtaggccgatttggggccaaatcagagtggtcagtcagctcaggggtgctgttggtgcgggatggtgtgttttcagatggttgacgga

SEQ ID NO: 9206 - DNA, 1237 bp, Emericella nidulans
tttgaaaaccgtagcgcgcttgttcaaggtcttacgggagtttgtgctttgctgctgcccagctgcctgcttcgtgacctcaaggggcttggggttggtcacattgttcagcaggcccttgaaacccgacatggaaacgggacgttgggcgggctgtgacagcgcggtcgacttcttttccgtagccatagatcccttctccagcaatttggatggtttcctgccagcaagggaggcatcgtctcggttgccgtgaactaggctggcggtgttgctgacatctccaaaggcggctctgcgggctccattcttactggcaccgttctggaaggttgcggacaatgcagtagtagacttcgttcgttggtgaagtgtcttggtcgcggcgaggggaaagggagcattctcgtcaccacggacacggatgcgttggggctatattcaagaagattagtcagtacctgtacatcaacaacaagcagtaacccaagagcagagaggtattgtagatacaaggagcgcgtgccaagtcgcaatgtcttcaggcgagtaaagcagcgcaggccgggcaaggcgaacgaggagcaataacataccttcgcgtccattgtgaagcaactgaagccctcttaggccttatccagtcgtaaacaatatattgaagggcacccggataaccgcctcttttctagcttcgagagtgggcgttgttgttaagaagcaggcctgaagatgagctgatactacttcaaaggccagcccaaacaaacaaagctgcgccaagtccgagagacgcactggacctgggtaaaaggtgaatactgctctcaccgcgcggaagcaagaatattaatggtgggagaaggagaagcacagctccatgagacccagcagcgaagaaaacaaaataaaccaccctcacgtctggagtgggctcgaaaaatgtaaacaaagttacgggggttacggagtcgtacttacctaacctccttgcccatgccaccattccttttatggttagcgccatctagttgaggcacggtgactgttttggatagcttcatgctaaaggtaggttgatatcaccaacctcgtctatattggtcttacaaaccatccagaatagccatcagctcgtgcagaatatgagcccttgctttctgagcagccaccttcactcattaaataatggttgcttctcctaacagcgacgttgaacctaatcagtgccgtctcc

SEQ ID NO: 9207 - DNA, 1333 bp, Emericella nidulans
agcggacaaaggtcactggcttgggcttccccgtagagccgctggtatggaaaacctggcaagaagttaggcgactgtctgttctcagtagcagagatgtactcaccacaagtggcttgtctgacgcatccttaaaggtatccccatagggatattcgttcgcaagcgtggtgtctgaaagaaggtccacgagccctggagcttgcacggcagttatctggctgagggaggtcaactcagtgatcgcggttgagaatgaggaatcatataggattgcggcactctgggtctcctttatgagatgctcatggattgcaacactgttccgtggggatagtagtagcagctatcgtccgtccgcgttagctttctgtggaaaaaagacaaggttggattaccctcgaaccggccctcactgcagcgagagacagaatcaggtgcctagcatcgctggggcccacgtagctataccaaggtcagacgtctagtattagtgcaggagatgaccaatagagattaagggactgtacgcgatggtgacgtctctggctttcccatgaagacactcagccagccaccaggcctgacggttgacgatgctcgccagctcctgatacgtgaggtcgtattgaactggtggatcaaaggagatgatctgggtgaagactactttggtagggttcacagcagccacggcatcaatgtagttgagcagtaatctgcgtccagcttgcttggattccttgaggcgagacattgctgacgatgacagtacaaggagcggatcttttgttcaaaggagaatcatgtagggtaagaaatctcaaatgcgggggattacgcagctcttaaaaatactggatggattgatctactcgcagtatcgagttactgtggcgtcaatcaaggtgccctgaccaagatgactgcaggatctacgggcaggttgacatgctcgcctaatgagtggtaatacgttcgtgcccttggtcaagtaggatttcttcccggtcctagtcctggcgagcagcccggtatatttgctttttttccgcctgagcttcagatcaaaacctttcatggcttggattgcatgcagatgaccccgcagatgggcagccggagtatctacacgccgatatggtcccagcaaggtgcagaaagaagatcccaatctgagagcctagttctatggcccattggatcagtgtcgctttcagaggaagcaggtcattcacctggccatccgatcccgacgccttgcattacgtccgttcgagcaagagacacaggcatgaagcccaattcagcctgcgttccggctcttgttttg

SEQ ID NO: 9208 - DNA, 1944 bp, Emericella nidulans
ataacttttggtttgtatcgccactgacttaaaatcgatatgcatgaatctgtcaccttatcccaagacatttggcgaagcagaatctcttctaaagcaattttgagaaaaccttccatattttcaacaacgatgagctccccagtattgcttgacagaaccggaatacggggcttatggttgcggattgtttcaacgttgcaggacttaagaatccactccacgtcccgcttctcatatagatgagaggcatgaaacgggccgtggattggcaccataacagctttattctttcctgaaatgaaagtatccagaaactggttgagaacaaccgggggaccactaatggtcaacgtgtttgcgcatactgcgctaatgtacggccgagacgaaggagggataacctagctggtcaatatcgaagtgttacgaaatccttatagggagactcacatttcggcgggtaaatttgtctatcaagctcgttccttcggattcactcaaaccggacacaagagctgaccagctgagtggcgctgcttgatcttgaccaaacagttttcgcactcggtaaacacagagtcccaaccggagggctacaacaaccacttcaacagctggtttgagtaattcgccaatgttacttgcacagctgaccgcggcacagctgagcaaacctgtacacaacccaacgagttggctctgggagtgcgaagggaatgtatgaccaaggtcaccatagtaactgataccgtcagcaacagtttctattcagcagactataggctataaatgtaacatacttgataaaacatcccaattgatatatgcatgtcaacacgctctcgatcgcagggtttcccggagattcacagtgccgtgctagtagatcaccaatgcttgtgaatcgaggaaatgtgctgcgctcagagggcggaagatgagagatctcttgccgcactgcatggtagcttctctggagaaagctcgaaaggagagagtgattctttgcctgtagcagacgacggagaccgacctcaaaatcacctgtctgatctccgaagagatagacacggtatgggtcctccatgatcaggagaaggagagtcaagtccgctgatcaggcaattgagttcatcccagaatcagcggcggaatacgccggagtcttctatgagcagacttttatactgatgcagtcctttttgccttttcgcgaggtgggccacttcctatacctggttgcaacatacttcgagtccgctccgtacatctctgtgctattcctggatcgtaggcaatgtagcatcggcaagccgttctaatcaggttgttcgaatacaaccctcactgttttgtgggccatcacgcaaggctcctatttggtcgattcatgaatggaaagatctagatcggaatcagtcttgggaaccaagtggaactcttccactaatcctaactgtgcttcagccttgcagggcttccgtcatgatgaaagaggcaacggtctgttttcgggtccaacactcgttcggattcccgatgattgttctacgaatgtgctggacggatagattgacctttgtatgcatcggcccgatagcaacaaaaacctgagaatcaaggaacatgagtcgaaaagaaatcaacagatttgattgcgacccttcccgaggtctcaaaatcaagttctttgctgtgtttccggaaaggagagagcgtcgtacctgttaccatatattaagaacagctatttttcctattatggggcccctgtcattgtcgtatagaaccctgatataactggtttatgtagcctccaaattcttttatcttttttttcttatcgtgtattcctttcttcataatggacaccctaacttttcagtttttttttacattgagcgtcattattttttatgatatttatactccttctatata

SEQ ID NO: 9209 - DNA, 1697 bp, Emericella nidulans
agtagagtaaggcaaggttccaggatttgaatacggccatatctatggctttccgattcctctgtgaggattactttagttgctagcatgtctggctgtgccgggtatttatgcaccgcatcgtcggttacagtcacatcggctgaatagtcaatgagctacctacaaacaggctatactaagaaataggagctccaattcgcgctgatgacgagattccaaccttgtcaagcaagatatcaggctattaccccgccggatctccaggggcaggtggggttggggtagaataagtgtactgtttgatccgctctgggtaaactccggctactcataagtccataggtaggccgaggtttcagtaactgcagtgtataagtagatagcggccaaggcagccacagggaccgccgcataacataaggtatacgggaatgctgatcatatgcagggcaatatagatattcctccaatgagcatgtcctgggcgtactgcagtattcgcacctttatcgagtattgatgtagcatggtcaatacttgaatataaatcattagtgttcggttacgctgggaaattcttaagacgcataatgtattccgacttacttggtagttgggatggagtcgtgggcaaaagtttcttgggagcaactgatcaaataacttgggtttactctgtaatactgctctgcgcggacgattacaagaccagctaccagcgagctgggaatttgacaagtgtcgaggtagggtatgtacccatccacagtggtactctcttgtagtgttaagcttgttgcagtgcaaggtcacgtctcatgcggcagtctagtgctctatcagaagatactgtagcacaggagacgtgctgtgcagcaagggcaattataatggtaaggtagctgacagagataacattaagtgcaacaaaataccgcaacaagaatcctaatcaaggacggacacctatcaagcacccccattacttcgtgctgtcttcgcagaagacaaactgctagtattgagaacaagactggcggtgaccccaacaagtcctcatgacacccgactggttgtacattgttagcactcaagctgggaatgccgttggcgttgtgcaggtacccggaggaccagcgagttttacttcttctccaaagaccactactaccaaagcacgcttgacaacgacctcaagaatacttatatagacgcagtcaacaatctcaagtccagatcgaagggccaagcgatggtcagacataaactattgatggcgaacttaacgctgccaatagcgactatatgtatttctttccgaggagaaagtatatcaagtactagagtcagagacaggaacatctcgagcccttctgatattccggggcctagccttttccaaaagagcgagtctgatctgccttgattccagtctcaactgttgacaaggacgtctattatatcttctgtgacgaccggtattgaggcttaacgacaatgggcaccattacgacgatctggaggccggtcgttagcccatcgccagaggtttgtttctcatagaagcctaggtttgctgtattattcccagagttcgaagcgcttgcatggaacctcgtcgagtcgagaacatttaaaggaatggcctcagcaaggcatagtgtagctactttccatgtttttatagttcaagc

SEQ ID NO: 9210 - DNA, 1415 bp, Emericella nidulans
gctgggttggcctttaaatcaagctcctgcgccccttccggcttgtagtagttgctggccggtaccacctcgaaccaggtctccttaaagcgctcgtacccaggcgagtccgcatgagtggtgatgagagcatcgtagatttctctgattttagggtcgataaggggcattgcgcggtgcgcggcaggcccgatcgtgaggcctaggccgacctccttgaattcagcggccgcttcataaatttgcacagggttgtagcgacgaaggaggccagctgcgaggctaagcccgccaatcccgccgccgataatggcgacggtgaattgtttgtcggaaggggaggacatggcgaccgtttttcgtggggggtgggtggttgatgaataagaggggtagcatgggtagtcggccagcaacccacagccccgcgatacggtagcggagagattgttggaggtaacataagatgtcaaagtgtcaattggagatgatctttagtctctatctgccgggctgatgtgggggcgtaatgaagaattaagggtgggggctggcgatcagcagccggcatcggagcagtccgatatatgattcacaattatgcatgttaaggtacgccctaccttttagaggattgtggctgtaattcaggatatgaaaccatttggtaagcccgaggtgttttctcaggcttatcctctgctattaccagatacctaagtgcgtagacatgttcagtgatcacgtgcgatagttggtcctgttatatagcgatataattaaatttagatatgttctggtaaatttgaggcacgataagtatatatatttgaggcccagaaccgccctgtaaagtgaaagtgaacaacctctttcccttgtacagcgtgtatgagccctaaactacgccccctgatacacatgcctcaaggcccaagcaaagtcaggcatagctcacagactataactctaaccgaggtacctgtagatactgctcgtaccagcttgctaatcaaactatgccaaatgttaaatcgagctagatagctgagtggagatccggaaatacagcctctagatagcaacagccgcactttaatacagcattgattgattcaagcccgtgacttctctgagctgtcccaggactgtcagggtatacgagcattgagcactaaatataggttatgtgctgcaggatgcaggttgctactttgctatacgatattggcctcgtatcgtgcaatcgaaccgtctctggtagcgtactggagcagcatggtcaggatgtgcagtggacgggggaagaaagtacagatataaatgctgaacactggagaactgggtttgcaatgtgtagctacagcttctgcggctaatgagccccgatttatcacgtttctgggacgtgatga

SEQ ID NO: 9211 - DNA, 1347 bp, Emericella nidulans
ctcaaatcacttggtcaccgcgaacggtctggctctcggtaactccttatcccatctatccgactgcttgctgctactctctgcattcgtcttgcttttgagttttgtcaatgtcttttgttgcatcggagctgtgcgtcttgcgctgcatttcttgttgatttgaagccgttcattgttttgctgctttgctgctttgctgctttgctttgtctttgcttcttttctttgcgaggtcctaccactggcactggtgtttgggtttattgtgagtgcacctacccgtcacattccttaaactacatgcctcagactcaatgctgacattttggctgaatagagacaagacatggcttcgacgcaggctcccgccattttcgaagatgcgcctcgttctcccaccaaaccgtccgtccttcgagcgctcctgggccatagacgaaaccaatcggccgacgatgccgctcgttcgatgccctacacaagcggttcttcgagcagttcctccccggtggagcagcagtatcctccgtcgaaccaacaaccccttggagagatcacccccaatggtacaccagacggcatgttctatcctggatccccgaataaaagcggtaaggggctgcacaagaagacgaagagcgccgtttccttgaaatctctcaagaactatatcgagcgcaagccagaaaagacagccgatgatccgagcagcaaaccgaagaaggcgaagtctaccaatagttttacggctatcctgaaacgctcccagcacggacgcaagagcgacgaggtcaaagatggccgtgataaagagaatagaagcccttctgaccctgcggataatataccttcccctgtctggacgcaatatggcacgccgacgcactcgttccgtgacgagtcctcgccggccaatagtaacagacggagaactctgcaagaggaagtctcgctctacaccccaaagggatacggtcccgcccagcagcggaacttctacgactaccaccaaccatccctcagcagccgaaccaatgtgaagcctcgtccgaaatccgatttctttgctaacggctctaaagtgaaggaccttcttgggcctttccaggggctctccccgagcaagcagtccctcgttgaccagcaggagcccacttcgaagatggagtgcggaaggcctagaggtctttcgactcctgatgctcgctctgagacagagtccaggcaggcaagcccgaagaaaccctcgcgtgtgcaggaagtgatttcggcattcaatgcaaaggagcgtgaggctgatttgcagaagccgcttaatgctaaggatctggaaagcgaatttga

SEQ ID NO: 9212 - DNA, 1924 bp, Emericella nidulans
  unsure (1)..(1924): unsure at all n locations
cctgtttctctccgcatcaggggcgcccaggcatggtcttaaaactccccctgtaagacctgggttaccatgtaatatcagccacagttatcctattccagatctaatgcgtcctcgaacgagaaatcctgccgactatgggccaaacccaatcacagtacgcagtgatccagattacgcttctagcctaagtttctgcctgtcaactcgtggtatgttgaagtcaacgggcctgtccatgacagaccagaccgtccactcgcgaaatgcagaggcccctgcaggtggcagtgccagatgcagttggggctctgtagaatcaagtatatttattgaccgttgctgctgatcttatggcattgtttcacttaatgtgtttgttataaagtcctcattgactgccatctacaccttcgtcgaggcccaatctcaacatggctccgataccatggggaatgttgtatgtgagcgttgtgggatactctgtcctcacctccaacttattcacattcttcgtccttgcgaccgccctcacagccttaaaaattgtctacgcttcattcctgtacccagaatatctgaccccaatcaagcacatccctacccctccggtgagcttctccgcctatctatctaacttcgatacctagctaacagcacagaaacggtcatgggtcaggggaaatacggatacatacgtcgtcatatcaccctttgaaggtatgctcaattggaccaaatcggttcccaacaacgggctactacgatactatatcatcggaaacatcgaacaagtccttgtgacaacacctaaagcattaagtgagcttcttgtccagaatgcttacgactaccaaaagcccgagtctattcgaatttcccttgcccgtattgccggagaacatggtattcttcttgtagaaggccaggagcacaaggtgcattctaccgtgttatagtagctctgagctcgatctaattcttcggcagagacatcgaaagaacctcatgcccgcattctcttatcggcatataaaagatctctacccaaccttctgggctaagagcgtggaaatggtgaaatgcattgagaaagacttgcaggatcgcagggacactggtgatattactgttactgttcggccctgggcatgccgagccacactcgatattataggactcgcaggcatggacagagattttgggtccctcgctgatccgcagaacgagcttgccgcccagtaccaccgaatcctcgaggacccgcctctctggctgaaacttctattcgccgncgcgttcgtcctgggaaacgaagaactcgtcatggcgctgcctgtaaagcgtaatagggatatagccgaaggagccaaatacgtccgacaagtggcgcagcagctcatcagcgagaagcgagaacggatcaagcataacccgtaaaaagcataggacgtagggggaggtaaggatattctctcagttgctctaaacagcgggaattttacagatatcgagctcatcgaccaaatgatgacgttccttgctgccgggcacgaaactacctcgtcggcactgcaatggtcggtctacgctctctgcaaacaccctgatatccagacccgactccggcaggaaatccgctccaatctaccctctgtctcttccaatgatccaaagcccataaccgcagaagctgtagactccctcccatacctccatgctttctgcaacgaagtcctccgcttccatccctccgtccccatcacgtttcgcacaacgacccgcgacactacacttgctggtaccctgcttcccaagggcacacaactgaccatctctcccgaggtcatcaaccaagacccaaatctatggggaccagacgcacacatattcaacccagaccgatggctgcgccctaacagag

SEQ ID NO: 9213 - DNA, 552 bp, Emericella nidulans
ttctccatctcctccgcctcctcctcggccttcctggcctgcatctgctgcacccagaaccgattcatcacaccccccagcactaaccgatccagccaccaaacaagcccaaacaaaaaccacccccacccccaaagcccgactcccagcatactcgcaacaaggaaaatcggaccaagtatcagcatactcaagacaacccaaacaatcaacgccacagcagcgaaaagcaacgtccccgccacgaaaagtataaacggaatccccacacaaagaagctgacaagccaggaatgtcgccgcaatcggatgttccatggcagtcttgtacatctcagcctgtctcgctggggggataagccagttgatgaatcggcggacggcagtctcaaagatatccacggcccgggggataaatgatttcagccatgccgtgaaggaggtctggagggaccccaggaggggatggtgacgttgtttctttcgtttgtaggcggctcttctttcgggaaggtgcatgggagggtggacgaggtggtgtctttgactgtgt

SEQ ID NO: 9214 - DNA, 537 bp, Emericella nidulans
aaagatcctgcaactgctgatgataaaaggggctccaccaaggacggacagatggatgagcccaaagtagtcccagcgtactactgctgttacctacttcggtctatgggcaccggatacagaacccaagcgttatatattggctcaacgccggaccctgctcgacgtctggctcaacataatgggctctgcaaagggggcgctcgccgaacggcggatgaaaagcgacggccatgggaaatggtgatggttgtagaaggttttatgagcaagattgcagcgttgcagtttgagtaagtttgtattgtcagctctcttggaatatttatcctaacagactttagatgggcatggcagcacccggcggctactcgacatctcacggcagacgctccaagcaaggagcagtcgaagacccatgaagggatcgaagatgatgatgcagtaaagaagcctcaacaaaagactaaaggcctgacagattccagagctactggtgagcgtgaagacgatgggaagaaaaagacaaagaggaaa

SEQ ID NO: 9215 - DNA, 151 bp, Emericella nidulans
attttattttctttcttgtacttggccatatctctgatcacctagcagaatgtaagatgatggtcacaccgaggctattcgtcctgtgaacgtactgatcgtcgagcacgagctcgctcttagacgttaactggacatattctctgctcca

SEQ ID NO: 9216 - DNA, 312 bp, Emericella nidulans
aatttccctgcagcggctttgacggcgaccgggttacttgtaagtgctgtaagagatgtggcagcttcgtataccacagtactcgtggacgcgtcgaggagatcgaaaataaggcgcaggtatctcgcctgttcccgttagcgaaaatgtgttttttatttatttccaagagctcaccttattctgcgagttctgcacagcatcctttctgatgaattcaagctccgcgagttggagcaattcgtctgtgtttggaatgctgtcaaaggtgtagccaagtactcaagaaccttctggtggcttatagacatg

SEQ ID NO: 9217 - DNA, 906 bp, Emericella nidulans
caaaaagaagctggcgaagaagatggggcttgggtcagctactttaggaggaacgctcattcgggacgtcgttgagggggcgagagatcaggatgttgggagggtaatccaaagggatggggatgggtttgttcctctttaatcgttagaagaactgcacaggaactgtaactaggcttatttaaggattcgctgttgtcgatgcaaattggttctgttgtactattcagctgacaatagctttaagataaaagcttttgtgattcttgtctagaagcttcagagtaagtccgagatgtaattataagtgtaccaatcactagagacgttgctgagatgctacattttacagacgagagaatactgcggacccttgttcactttacctattcgtggacatattgagcataaatatgtactaaccataaccgtcctaaattttaactgcttgaaggacaagcagcattcaagatttgaatgctgcctgcggtctaatagatctaatttagttacccagccagccatgctcacccttaatgatatccgcagcctacacatcattagcaggaaactggacgaggatttagacataaaacgaaccttctctccagctgcataaatagatgccatgggcggaccagagagttccttcggccagtgactgatatcaatgacacgtaatccagtagtaccgtacactttcatctcaggcgagagtacaccaccgagttctcgcggcatcatgggcgctgagcagcattgatgcccattcgaaggctgcaagatctccctcattaatttaattatgtcctcatcagtctgtactgcgggaccaggcaccacctccgtcggaccaagagccgccagagacggtgcattgaacagttcgcgctgtttatggaggag

SEQ ID NO: 9218 - DNA, 2185 bp, Emericella nidulans
cccactgctcgctgcaaccttctttctctcccactcccaccgtcgcttcgacctcagtggttcagctagagctaattaccggcctttatcctgattcagcgggcgccttcaaattgttcgaacgatcgctggccgtctctgccttgcttgccgcttcaggggatattcagcatcgtccaagagccgccgagcggcctcccgcggaatctgagagaaccacaatgcgcaccatcaccatcagatagcagaccgcgaaatcctgtgttgaagggacgtctcagtaccactcagtactcttcgtcggtgctgagtggccggttttcatccctatttcttacccctgacatgatcttgtcgggtcagacgacgagacagccctcgtcctgcatcgtcagcgtacgcgatgtctgttcaggtcgtctccgatcccttggctgtttccctaacaacggaggatcgccagttctccgctacctactggaagaagagattcgatgtgcgacctccttctccgtaagtcctctgtcccaaacgtgcttgatggcccggccttcgaaccctagcattcccagcaagccccgcccgtatcgcagctcgctcaagccgctgaaagctaaacggagaatccaggcaccctgccatagcgactctagatatagagtacagtgagctggcaaaagcgtggaaacgactccaagagatcctgcctttgtcagaacaggttctctttgaagaacgcccgcaaaccttgcaagatgtccaggtcctgattagggacgtccaagcctactgggtttccagcccacggcagcgtcttttcagtcgttcgatggctctctgcgatacattcttggccacgtccggctcacatgcgttgccgttaaaggcccttcctagtcatcagtactactcttctcttctttatggcactctgcaaaccatcatcaaagttagtatgagcctcctttatgtctgacttcagcgggtcgggttctaatgtgagatgtcgagataggcatcttcaaaatatccgagggtcgttaacggggtgctggaagccctcgtcaacgtgaaccggtcaatctatctgcccgagagcggcgagcctctgcagattacaaacgactcgatacctgcgctcgctaacttctattcccacctctttttcttcctgggcgagttgatggactggtatgcgaggagattcaagtgtcgactgctacagagtctccacgaagacatttactctgatttccgtaacctgatattaaccgtacagagtagcgcgaggggatttactcacgcattcgttgatgcacccagcctcaacgacagtggctgcgatgagactgatacagtgatgcagcatgctgacctgtatttgtgggaaaatgctaggctaagccaattaggtcgacgaaacatcgaaaggcgattcgcggctcagaatgccatgactcggttgctgatatgggagatccagcatagtgcagaccaacgggcacagttgagagacgaaagaggccagcttcttgtgcagatgttcgatatggcgagcaaacaattacgctcaaatggccaccagcacggcgctatggttcgcttgacgacagccgctgggcaagactcacgtgagttaagatgtatcacttgactgatgacatatactgattgatttctcaagttaacaacattacgttggccgaaaaacagaagcacaagtacacccgggtcgaactgcagctaggctcagcgcaccttcaagactactttgacattgacgatcagttggcgagctatgaacctacagatgtgatggtggaggaggatgtcctagatgcactaaaacaatggtcaactgaaacttatccacagatcctgactctgggaagcgtgccagagtccgcttgcgcaagcccagtcgctttggtatcagcttgttacaccaatctcgcgcgaaatgcaaactccccagtcattgcgtactcttgttccgtaccgccaacggcgaaggacggaatgaccttattccagcaaggtcttatagcgcttgtatacagtctgatccgacaactactagagtatctccttcggtagtaacggctcatcacgcatatgtaaggcagaaatttcgccctctgatgtacgctgcatcggggcagagtgcttctctggccgtacatgg

SEQ ID NO: 9219 - DNA, 764 bp, Emericella nidulans
aacaatcaagatggcgtagataatgcgcatacctccgcaaaatcatggcatcagcaacatcagtacactgaaactcatcgaaacatagcacactcgatttctccgcaatatccgcagcaaccaacggcagcgcatcgaaatcattgccgaacttcattttcaccacatgcatccgcctatgtacatcctgcataaaattgtgaaaatggattcgcgatttggatctgatattgctcggcagcgtctcgtagaacaaatccataagcatcgtcttcccgcacccaacatccccatacatatacagacccttgggcaggtcctccggaatcgatgactccggcttcgccggtgccttgccgaacaaagagccaaaaaacgacttcttcggagcggcgtcgagagactctatactcgggcgtacaacagcaggggccttatacgatttgagccgttcatacaaatcttgtagctgctcgatgatctgcctctgataaggatcatctctcagtctgccctgctcaacccgcgcattatactccgccaatggaccggcagcctccgcagcggatgccttcacaggagtcgcaacttccgcagcagtcgctgcggaccgccgttgatgcgtaacgtgattcacgaaccccgggttgcaccaaccatagccattatgtttacgtgacggtgctgtccctaagccgtgaaagttccttctgcagcctgcaacgaagactgcctttgatgtgcgcacagcgacagggcgtatc

SEQ ID NO: 9220 - DNA, 585 bp, Emericella nidulans
acaaaagactccgttaggataggactgggggcgtcttgggaagcaaccaaacagttgcagtcttgtttgtgaccactattcgaggaccctgtcagaagacaaccaacgccaattaacctgtatgatacgtttgttcatgctgaactcggccggatctatagatttcccaaattccaccacgcggacccctccacatccccaaccacgggcatcgaatcgtgatactcaacctcgtccatattcccggagaactggctcgagtccgcccacagccacggcgtattcagcatgagactatcaacgggcgcaacaagcgggtccctctcgcggtcgcggtcccgatcacgaagcgacgtattccgcagactctcggccgttgccgtcgtcggactccgataaagaggcatgggcacagcctggccgccgtccgccgtgttaacactgacttccggtgaggcagtgacgatgatgtcgagattcgaaatgtcgttgggactaggggtcatggttgttggtgctaacgaggggtggaggagccctcttccttcggtttcgaagtcagtagatacgttaactgcaggatgt

SEQ ID NO: 9221 - DNA, 739 bp, Emericella nidulans
gcattgcctcaggtggatggccgtgttaaattcctccgctaggcgctgcacttcgtgggcatctttatctgtaacagcaattattcgccgaattcctttggcaattccactttcttccaatatgaccagatccttgatgtctcctgtcttttgcacatgagttccaccacagaactcaatgctaaagtccgcccaacgcggatcttcgacgttcttcaatatttcgtctaattcagcaccaacggaaacaacacggacggggtcagggtaggtctcgccaaaaacggctctcacccccgcaatatttcgggctattgaaagagggacctccttggaatacaccaagcaattgcgtcggatatattgggttgacaaatcctcgatttttaccaattccacatccgtaacaggtgacttgtgggaaaaatcaaacctcaatttttccgcagagaccagagagcccttctgctcaatgccgtcccctaagacccccctcagtgcgaagtttagtatgtgggttccggtatggttgttcctgataggccaccgtcgaagctcatcgtactcacagatgaccgtgtcatcgaccttgaaggagccatatttcatataacctgtgtgtaggacgtaaccagcatactgttggacatcgacaacttcgagctcagcctgtccgtcgataacgattcgtccagtgtcattttcttgcccaccctgctcggcgtagaagttcgtgcgg

SEQ ID NO: 9222 - DNA, 418 bp, Emericella nidulans
aatagtgggagaattgacgggagaattgttgggtaaaagatcggatggaacgggctcggctctttcagtcactcgttcattctcgggcggtataccaatagttgtgccgttttgcatgtcttgtagccacggagacaggggccctctttatagctgaccccatatttcccgacgaggacgcggttggaaggggtaaaattcgcaatcacagggtacgggaactggggtgaagtgccaccaaaagtctggcatagctatcggcaacgtggcgtggtttggcagggaaaacctcgattgaatcgatgaatttgccgaagaggtggttttttttcagtcgtcaacgacaagtcaattcttcaagccgcggacgtgtatgttagcttagcacgcgcccgtcttgcgggcacttagttacata

SEQ ID NO: 9223 - DNA, 353 bp, Emericella nidulans
gggggcgcaggtccggaccttggcgccataaaagcgaggaatggaggcctggccgggcaatccaggggatagctggatcccgaacggaacggctaaaagactacaatatcaaacatggtcgattacaagcccaccaagcgcactgcctaaaacaactatgaagtagcactacctgaatatatgatagacggcaccctggacgggactaaggctaaaaaacagtacgtccaccagctatcgtgcagctatcaacgcaccgggtaacaatagcccgcggatcagaccgtacctcatgatcatgcccactgtatccttggtcttgctttgtccgccacagtgcatagtatgaccta

SEQ ID NO: 9224 - DNA, 451 bp, Emericella nidulans
  unsure (1)..(451): unsure at all n locations
gnattgncttcncganaccgacgaccncgaacgaggataaccttttctagcccagcagcgaagaagcgcacaaacgcgagacagcgcgaancgncagagacacccanacacaacgcccgancggggcacangggaagcgacaggcgagcanaccgcgnggcaccagcaggaacaggaaggccgcgcccggaaacaacgagcgcggacggangcacaagaacngcccagctcggacccgaaaggccaancgcggagaaaaagaaacgggccgcacgagccaggaaccgcacccaccagcaggaagccgagccccaaccgggggagncacaaaacgaacngcagcacccgggaacncgnnccgaacngccccagacacaaacccaggagaagcncggnggaaaacgacgaggacacgaagccaccggacggcngcgccccccatgcttgcatg

SEQ ID NO: 9225 - DNA, 520 bp, Emericella nidulans
gtggatacacccctcttgcctcggctgcagtaaaaggcaatctaccgatggttgaattcctcctggataagggagcagatgccgaaatcacagatgacgacgggaatacagtgctgatgctggcggtttatgaaccctccggtgccgtcgtgcgctttctgatcgaccggaaagtggatatcagcaagagagacaactctggacggacagcacttgaccttgcaagaagaatagagtcaagaacaattatagccatgttagaagccgcctagacacagcggcctatccttcttagccgaccgaactacaaagtacgttcttcaatacgcgcgtcactttttaatctatatatcctcaactgcttcacatcgtataatatatgcaagtcaacctttgctttggagatctatactactgttatccgaactattgaactagtattctctcaacctctgctatattgtcgtcagaaaaggttggaggctcgctctacacgggcgccaaagcgaaagccaattgg

SEQ ID NO: 9226 - DNA, 997 bp, Emericella nidulans
tcaccgcccgcactcacacgacctctactgagcgcactccccggagcccgcgcactgtgggagcgtcgcgcctcagcgactttggctccctcgatactaatacaaggtcgggacgcgagccggagagtgaggccgacggcacgctcgatgagccgctcgacgaagacgggacagagctcgatagtctcgatgacgagctccatgcattcggagagcccttgcctggtccggagtcggctccgcgattcgatagtctgcgaggggatcaggctcctgctcaactgcccgctcacgacgggttaggaagtttcctggcgtctagccagactgtgcaaaaccagctgtggcagcacgagcagtataaccccacacgacggccggaactggggcatcggcgccgctcaagcgtgcagcgtcatttggacgccaatgctgatcaagaacataccgatgctgatcgagagcggtggcagcggatcgaacagtggaggatggagcagagtcgtgctcttctacatgagattgagaaagccactcgacggcggcgcaatagtcgtttaagcggatctaacgtcgaagctgtcacgcaagctagcccttcagatcgctcagccagcgttcgagcggtgcccgagggggaacacacaccatctgccgaacccgaagtcgaggaggatgaatcattctggcatcgcatcacgcgcaaggtcatacgtgacctaattggcatagacgattccttactctcagtcatatttggagaggccttgcctgagtcggaggaccaggaggaccctgcggagatggctgtggaaaagcaaatagacgaaatactgaaccaggaatcagagacagcgacaggcggtgatccgtgggagactaagttgcttcaacgtatagcccgggagctggggaccctcgtcaaccagctttgcgagcatccaggagcattcacaacttacctcaacatggccaacgacatccctaaccagtatgc

SEQ ID NO: 9227 - DNA, 1324 bp, Emericella nidulans
cactctatacacaaataaagatgtgcgcattaaattttccataaccagccggctgtattatgtgctgtcaatacccgagctcagaaccggcattatccttgcattgttctagatagggctctgatatagagagatcctcatatgaaaccactgcaatcaagatctcagcgtgccattttgctgctttatccgctgcgagacagctcgatacctacattccctcttcgactgcctcgactacaccttactgaacgtggtacaaactgggagattttgccggcctgacccaataatcattgcgatttcgcaacgaaagagtgaagtagactataccaataacgaccccaactgacgtcacgtttatcaccacgttcgccatcctgggtattctccaatacaaccacctcactgaaaggtattgagtacatgccccaccggtgctcagaacgaggggcaatggcgacattattgggtggattgcgtcagtgctgatgattgcttagccgggagctgtgccgaatttttggcacggacaagtcgagacgaccatcttgacgctgcgcttcggtggcatatagaaactaaatatagatttagatggctcttcttacatttctgtttgaggattttgctatgttcttgtcatctgctctggtgttacaagtagttggttcgacccggccaaagaatatacatatatagcccgtcggctctacggagacaaataattttatcaggataggaagtatactcagttctacctaacgccttctatgtatatcataaccgatcccaaaactgcattttaaccaagatcataacgcataaccaaccgtagagtgcaccgtctagtctaaactcatcacgatcctcttcccactcgcatctccccgtttgagcatctccagcgcctcattgaccccctctagacccccctctgccctaatgatctcaggcaattccagcgtcccggactcgatcagtctctcgagccaggaaaccatcgactcgcctacttcaggactagaatggaagagcttgattgggacagtgtggtatctgatccgctcatcgcggtcactaccaggcggtagacccgtcagcccgagtagatgcgcgtgggatctattttcgctaatgctcgggtccagtgttgattgtagcaatgtggccgtttctttcccgacaatatcaatggcgtaccgaagtttacctcctgtcacaccgcggataatctcgacagcgcgggaagtattgtgtcggtcaactaggatgtctgccccttcagcgtgaagctttttgccgcggcgcgcaatgtcagcga

SEQ ID NO: 9228 - DNA, 106 bp, Emericella nidulans
agtgttgctaatgctcagcagctcaagcgcatatctgcgatagagatcacacttcgaggggtcccgacttcgggcgttataaggcgccagaaccgtggtaaggcgt

SEQ ID NO: 9229 - DNA, 495 bp, Emericella nidulans
agaggccgcggccgctctagaactagtttatcccttgggctttaggaacccgaattttcgatcccgataccgacgacctcgatcgggggggagttttaaaggggtaggtcgctgaagtccccaaaaaacaggggcttgaagaaaaaaccgctctgggcgcggcacgggggaaaaagccaatagctaacataacaacacaaaatgggacgaactagactcaagggtaaagcgcaatgctctaactgagagagcaaacagacaggaaatgcgtatacgaaactgacaacatgcctaactgggaaacggggtcgccagctacatttatgaaccaggtcagagggaaaacagagcggaacaaactgcagggtgtctgaccaacgacttacataagaacgaaaacctctagaacagtagatcttatagtgccgtagcaaccgacagaaatggtggaacaagggcgaccgcaagatcgtgggatactgtcaaaaaagaaca

SEQ ID NO: 9230 - DNA, 1751 bp, Emericella nidulans
atgagcggcaactaagtggtctgcgtaaggccatggatgaggagacggcaaaacatagagaggagctagaggcaatccgggagcaaggcaaaacgctggctacggaaaatgcgtttctcaaacaggatcttgcggaagaagtttcacgagttcaccagataagagccaaaatgcgaacagaggagaaatcagcacccgtgacaccaaagaagcccaaggctctaccgtttcgcgacgggttcgacgacgaagaaatactggcggtctcgcctagcaagtcgggaagatcaaaacaagcaacacctaccgtgactggtaaaaagagaagacggacaagccagggtagcccgtcacgtttgcatctgagcccgcacagagagcaaaatctagggatcgcggggggtgcggtggatgaggccctgtcagagtctgcaatcgacttgcctatgaaggagtcctcgcaggaggccgggcaccaagatacgcacatcataaaacagatcctaaatcatcggacggtccctcataaaaccgacattgaaatcatagctgagctggcctttccttcggaacctgggcggacattgtacagcatcctcttggaagagacaacgcaacttgacctcggtagctacgcgatggaacacatgcgggcaataatttcgttatggtcccgagcacttaaagagaagttctacaagccgataccaatcttgttggaaaccacaaggctcatactcgccattgacgcgacggccgtcttacgccagatcgatcgtttgatacctgtgctgctggatacgagcgacatcaacggggtcccacgtttcaaacattcaccctatgcaagtcagagcttcggcaaagtgacacaaacaccggcttcccagcttgaaccgttggtggattccaccgaggttgtcagagtgctttatcaaatagcctgtcgcagcctgagcgatgaccagcttgtggaggatctgtggcgccatatacgctactcttttgtgctgatgatgctaagttgttcgcagcctgccagcgacatcaagctgaccttaagtctgctcatgaccagtgtccgtcccaactcgtttgcatccattcaagagtccgaacaagaccagaagtcgaacgagaactgggttgtcgaccgcgtcgctagtctcatgtgggaaacgctacaaccagacgagggccagccgccgtacactcgagcggagatttgtgacgtgcggctggaagcgttagccttcttgatgacggtgaccttcaatcctattgagccgaataacacgcacggcagcctcgttatcgcctcgcatcatacggccttggcaaagttggttagggcgatgcacgacgagttggatgcactctattcatatccaccggaaagagatatgcactccgccatggtcaacggcctcatgcgattgatctacagtattatacaacgccatccaaaggaagctgacttacagttaaagctgcatcgagtacccggcggaaagcagaaatttctcgtggtgttgacgcggcttgccttcagcgaaggaattgttctcgaggcaggcatcgaggacgagacagtggaaatggcgcactcgattctggacgatgcggtcaatccgcaggaagcagaagctttacttgaggcattcccgcatgccaagggggaggatacagaggcgaagaatgcagaagatacggagatgatggaagtgatggaagaggatttggcgttatag

SEQ ID NO: 9231 - DNA, 220 bp, Emericella nidulans
aagggcccaaggaagaacttaccaccatctcgacctcatgccatactccagggcgccagccaacatcgcccgcaacagtgatgtgacgaagccgggaagtgcagcgtcaacattctcaaagacgtaatgttcgcaagtcgatgttcgcagccgacattcttcctcgtgacggaccttacaatcgcacagttgcgaagctaactacacgcaatggatccat

SEQ ID NO: 9232 - DNA, 1023 bp, Emericella nidulans
acggcagaagatttcctctccacggtcacgtagattgtatccaacggcaaaggaacaacgtccataacgcggatctcaatcaaccgtagtgtatgcggagactgccgggtggggtcgagcttgctcaaagcacggacaaacggctgcagggaatcagcagagtcggggaatatgattgtcgacttaggcagcggcgattcatttgagcgaccggccgactgcggccgaactggcacaatagtccacgtcaaagcctcaacggaactcgggccgggcaagtatggagaaatcgcgatataacgtataccggagtcatcttgaaagtcatctacatcatgagataattagcacaacccacaaccgcaccgccgcaccgccgcaccaccacacaacccacgaccacacaactagtcaactgcacacccgcacacctgctcaggatatcccgcagtcgcactcaccagttggatctgggggctggaagaggtcgttggccagatcgtctgagacgacgccaacactgccgcgcaaacggtgatctagcgagagacgcgcagagagtgccgttttgttccgtagccgcttccgagcgaagtttcttcttcggcgtatggactgatcggagctgaactcgtgtcgttcgaggtccataatggggagcggagtcggacgaggggtgtgagcggagtacggggaagagatagcgagagaggggagaaagagaggaaccggacagggacagggggtatcgatcagcagaacattggctcagcaagtagacaaccacatcagcaattcaagtgataattgaggattcaaatacgccctgaaggttaatttgaagtttggatgcgggaaaatgagtagaagatggagaaagtccggggtgaccttactaccagcactgactcggcaccgcccgccgttctgccttcacgttcccgagccgaggtttaatcctcgctccaggtcacgctcacgctcacgctctcacattgctctcgccaccagcgatcaacaact

SEQ ID NO: 9233 - DNA, 1567 bp, Emericella nidulans
tccctcagaggtctttctatcttcagcccgaattggatattttcccctcgagtcctagagtgtcccccaatcttaggatgccccggtggacctgtgcccgtttgacgaaacgcgccctggattctgttactgctgccgatcatgttcgattgcgcatcagacggggcagtctcaatcttggggcttcaatcttcattcgtttgtgccttgcatatcatggaatacccttcgtggcagtagcgcatctccattcccctggaccgtcatttttagtccttccgagctaacaatttgcacggcgccttggctgcgcctttgcccttattcagtgaccaaacaggatatcgaagagcatttcagcacccatggtactggaaagatcacagagatcaagcttatgaatggctttggattcatagaatacgaagacgcgatggatgcaagagatattgttcctggtaagaggctggttttgcagcttgagtcacattgctaacctgtcaattagcattccgtatgtgagattgtagcccgaattcaagggccatttttgttgaccagaacccagacggaagtgatttcaaaggcgagcgcctcaccgtgcagtttgtcaggggaccccggcgcatggaaaattttccagttcccacggaccgtccaaatctccctcgttcgcgacgtactattttccgtatgataatttccggtctcccggaaacaagctggcaggttagaagccctctcaatgtccttctcttccaacatcccgggatttaaataccaccccaattccatcaggcccaagagcatcagccgctctgctgtatagcacccgttggaagcccactgctacagccttaggtggctggcctgatatgacttgccggcgtgcattcatttggcaaagaagttccagtacagggttacaaaccgcacctcttgacgaccgacagccccaaactggatggaaccaattaggcattatcccggacatctttcgccttcctattgccggccatagattttgccttttttttttttttttgcaatttcttggactcagccggatacattcctcattcctggacaggaacttacaccgcggattataggaccttaaagactttgcccgtcagtctggcttggatgtcgtctattcggagactggccgtgagcctggaagagggtgggttgcgcccagattacctgaagctgggaaacctggttaacacgattcaaggattgtcgaatttgagactgccaatgacctgaaaactgcggtcgagaagctcgatggccgagagtttaaagggaccagagtaacctgtgtacccgatgtaaggaccaccttgtgcccaaggattggataaaatcctcatcatgttgcgcctcctagattcagccgtacgatgatcgcccttaccgtgatccataccgatcccggtccccccgtcggggttatccaccgatggatgagtatgacgcagatattcggtgccacgcggctacagcccgcgtacgcattaccgcgaacggtccccaattcccatgcgccgggactactatg

SEQ ID NO: 9234 - DNA, 1504 bp, Emericella nidulans
cctgatgtgagctctagctgaagtgaatggatgaatgattgatggcatccagttcgactgaaggattatagtagactgtagtgatcaaaacacaagtaccgtggaaaggttggcagttccccttggatcacgttactttggatcggccatctactgggcaaccgtccaacccgactatcaactcaattgtggttcttcttctctgccatctcttcgctcaaaatggattccctcgcagcgcgcccgacccaacccaattcccagcgccatccagtcgggtcttcaggccttgaagatcatggggtgtctttagcctttcgccacccggtttcctaccttccccgcttctagagcggcccctcgaagactggactcgagccgtgaagccaaagtaccttctcaaaagaattatgcccgctttacacgtcactccttcacatgcaccctgcgaccggtgaccgccttttggttattgagaaggcggtgagctgttgaggctcaattagggtgtaatgcacgtctcaatagcgcggagccaaatcgcacctgcttggcctcctctgttaatttgacctgcgcagaggaatcctgctgttcggggaactccgatactggctccttgttccggcttgatgtattattgggactcaaggcggactcacttgaccctttccgcctcggccgtccaacctggactgtgcccagaaggttgaaactcaagatccacgatattctcaactcgaactgacgtctggcaacttgtggcccgcgatcataggcaatcacaggaaaatatgaatgtctcatacagggacactgttttctacgggaacttctacggaaacccaagcctctcccgagtcctgcctgacagggattagccttgctcaggcttcgcttgctggcccgtgattcctatattacaaacgcgagatattagctaccgttagcggaattcccaggtagccgttttctaagagctcttgaagagctcttgggtcagtgcgggttcacccaggattaacgcttcactttatcctaaccatgcagcgggtctagttcccgtccgtcatcgcagaaacatacccctggcatcagactcagtcggggctcagtccgcagtcgtgggtgaacacatcttatatgaccttttgggaagttctcatacggcttcagagcagtcgcggaaaatgtccatgaagcaatttcttaaccctgcctctgccggttctagggcgtggtgcttctcggccttgacctcgaaggcaaacatcccgttgcttcaacatgcggtctggactggttgaggattgtgcacttgctgggttgaacggggttgccgagggctctggaacacgcacgatgccgtaattcctgcacaatcatttttcttgacagtcgcagagacggagcttgtcagagacttggagctcagaatacgcgcttgccctatcgtcatgaagggcgctattgcactgcctgctgcctagacgcctcaatcgag

SEQ ID NO: 9235 - DNA, 629 bp, Emericella nidulans
tcaccatgacctctcaggacggcgctctccgacttcagtatcacttcgacctccccttcctcaacccggccctcctgagcggggccctcctcgcccctggcgtgacactcgcgaagggaacaaagcgttcggtctgctcggcggcacagcgttacagctgtatttgcaggtagaagggctcaagcgggagatgaacgtgggtatgtcactcctttgtgacccctctgatcctcgtagaagatattctagctaatcaagggcgacctgcgagcagagcaaatctcgcaggcgatgtcgcaagtcgctggaaagaggaacctcgcgcagcgcggtttcgatctgggcattgacaagtggatacgcaataatccgtcgcagggtagctatatctcggataagctgatggcgacgaccatggaggcgattgtgggcgcttacttcgaagaccaggggaggacatttgcagcgttggagaagatcgtccgtgtgctgggcttggggtggccggagagggagtagggtattataagtgccatatatgggaatagtgcctgggcgtcgagtgattcggggatagaagagacaattcaactacggcagaagatgaacaaagaagatgattattagcg

SEQ ID NO: 9236 - DNA, 630 bp, Emericella nidulans
cctacccgtgaattggcggttcagatccaggctgaaatcagcaagttcggaaagtcgtctcgcatcaggaacacttgtgtgtacggtggtgtccccaagggtcctcagattcgcgatctttcccgcggtgttgaggtctgcattgccactcccggtcgactcattgatatgctcgaagctggccgcaccaaccttcgccgagttacttacctcgttcttgacgaggccgaccgcatgttggatatgggttttgagccccaaattcgcaagatcatttctcagattcgccctgaccgccagacatgcatgtggtcagctacctggcccaaggaggtccgtcagctcgccagcgatttcctcaacaactacattcaagtcaacattggttcgatggacttatccgccaaccaccggatcactcagattgtagaagttatctcagaatttgagaagcgtgatcgcatgatcaagcatcttgagaagatcatggagaaccgcggcaacaagtgtctcgttttcactggtactaagcgcattgccgacgagattacacgtttcctccgtcaggacggatggccagcactttgtgagtaccttcctttcataagcagaaaaacagcttgctaacta

SEQ ID NO: 9237 - DNA, 1000 bp, Emericella nidulans
gatgtctcatacctggtatacacctccggctcgaccggcaaacccaaaggcgtcatggtcactcgtttttcctgtcgtccttcatcgagtccatatctgagtttgcatgccgcattgcaccagatacgcttaagctgggtggcacaggtcgctatctagcgcaagcaaaccgcgccttcgacccgcacctgctggagatgttcttcccatggcgccatggcatggccactgtgactgccccgcggcctatgatccttgatgatatcgggacgactctatccaaatggagcattacacacgccagtttcgttcccagtctcgtcgaccagagcgacatcacgccccagcaatgccccaacctgcggttcatgacagtgggcggggagaaaatcacacagaaagtcctcgacacctgggcctcagcaccgaacgtggctatcgtgaacgcctatggtcccacggaggtaacgattggctgtacatttgcgcatatcaacccgtccacaaacctacgcaatatcggcccccctcttacagcttgcacagcgcatgttctgatccctgggaccatgaagtacgcacttcggggccagactggcgaattatgtttcagtggtgatcttgtggcgagaggatatctgaatcgccctgatgccactgccgcaaattttatcactggccccaacggtgccaagatgtaccgtaccggtgatatcggccggcttatgtctgatgattcggttgagtaccttggacgtggagatgaccaaaccaagatccgtgggcagagactagaactcggcgaggtttccgaagtactaagagcttcttcgccagttgccgttgatattgtgacgacggtagcgaaacatcctgacctcggcaaggtacagctgattaccttcgtgtcgagagcaaagaagcgcactgtcaatgaggaggtgcagtttctattctctgatttcggtacctaggccaagaactgcgcgatatttgtgcg

SEQ ID NO: 9238 - DNA, 785 bp, Emericella nidulans
ggtaacgggcgagaaaagccaggagcaggagggcgacgtatcgatggaaggtgccgaggacgagaagcgtgggtcagaaattgatcccaaggtgaaggccatttaaggttggttgtttttccatcatctgtgcccatggagagcactaacaaagttatttcacaatgccgctcagacatcaagacgaactttattttcctcgaacgtgcggtcacccattttgaccccaggtttacgctccgcgtcttgaggtcgatatctgcaatgcgcaaacaaatcacgtcagatgtgcttgcagaagccattgttgccgcttacccaacttcaagtgcgactgcctctttcttgttggatgcgattgatcagccaggtgcttctgaaaacgtcgggtcaagctcgaatatggaagtagaaaatgacaagacgaagccctcttcaaaagaggttctccccgagattgacatctacttgtctatcctagtccagatctatctgtacgatcggaaggaaattcagaagggcgccaaattctcgacccgcttgatcgaaaggcttcgagcgctcaaccgccgcacgttggactcccttgccgcacgtgtgtacttctattattcgcttttcttcgagcagattgctcctcttcccccgtctcctgctgcggcgattacctccattcgtcagccactacttgcagctcttcgaacggccgtcctacgaaaggatgtggatactcaagctaccgtgatgaccctctcctccgtaattactttctacttctcatatct

SEQ ID NO: 9239 - DNA, 1490 bp, Emericella nidulans
acctgtcccgtagttggtttttagtaatttggcttgttgcagtgaggcgcataccttgctcgtagcacgacactctgacggtagaagattataccattcgatcccgagacggctcaccgcgcaaatgggccggaagactgcgcgtccatctggttagggcacggtcgagttgaaatatggttagttcatcttcgctcgtgtctctgttgaagtacaaatcatagacatcgtcagggctatcttctacgacgggcttgtagagactcagaaggatatcgttcaggatatcgtagagctccagggacttggcgtagaatgccataatagatggctggtcagctggttgttctacactactctccgaggctgatgcgatatactcctcatcgacggttgctggtagaggaacggagccgcatgacgctttcgagatcatggcagggcggccgaacgtcattgagattactctagactaccgttagacattgaccgcaatcagaaagcgacgacgcacctgtccatgagaacgcaaccgtgccagatctttcgcgccaactgctgttcttgtgggctgtggagacaagcaatggtctgtggtaaatgcaagcccatactctgggcatttcggacagctagaccggtaacaatccagcactgatgggctgaattggtgctctgaagatactgtgccatcagtagcaggcactggattagggcagccgaccccgagtcccacaggttgaaatgcaaaaggtctttggcacgtgagaagaatgcagccgctgaggcttcacgctcttctggtacaatgaaatcagcaagttggcaggcaagagcgaagatgacattgaaggtacacattaacatgttttcgtcggattgcaagggttctcctgtccatatccgtgagtattcctccctgagacgaatgctatcgacgagtgggtacagaggaaagacataatgccaatacacgttcatgagattgtctgcgattttccgagggggaagcacgtagtcatgaatagcgctttgcctttccttctgaggcgaaattaaactcgagcggggacggctctctgcggcaatctctggagtacgttgacttggagaggagactctcttgtccaccgcagtcttgatctggcgcatgaaactcgcggcacttgagctgccgaagaattcttgtgaaggccgctcttccacagagcccatcatggcattcactccgtccgtggattcagatggttcagagaaacggcgagtaaagtctctcgctccactcagcagggagttggcgttgcctccttggttatcagcaggaaaacctgacaacggagagcggcctggatcggcacgaaaagagatcctagtctgaggcggtggtaacactttagatgtataggatggacaaagtggtatcgttgttgagcctaatggtctgacggggctgtagcctgtacgaagacgttagacttgtcgaagagatc

SEQ ID NO: 9240 - DNA, 178 bp, Emericella nidulans
taacccgcgccgtgattgctcagatcagcgatccgaatattatgcagcgtcatgtacgctatgcatgggcttcagcataatctacaatgatcgtagggcggatcgtagacttggtcgtcgcacctgcctatcaggttacgcctcgctccgcatcggtccgtcctgtgacatattgtca

SEQ ID NO: 9241 - DNA, 517 bp, Emericella nidulans
accaccttcggtctgggtgctgaccagaccctggcttttgaagtggtcacggccaacgggcgtgtcgttacggcctcacgcacgaagaacactgacctctactgggccctcagcggtggtggcgccggcaactggggcgtcgttctctcagtcactgtcaaggcgtacaagagcgcgcccgtttcaggggcgtacctggccttcaccacctccaacctgtctgaagacgtctataccaaggctctgacgcagttccacgagctgctgcctgccatggtcgacgccggaacgaccgtgatctaccaaatcctgcccggctacttcctcatcaagccattgactgcgtacaacaagacgaccgccgaggtcaaggctgttctcgcgcccttcctctctgcgctcgacggtctctctatccagtactctgtctcttacactgagtacgagacctactacgaccactatgagaagtatatgggccctctgccaaacggtaacctcgaagtcggcaccttca

SEQ ID NO: 9242 - DNA, 1050 bp, Emericella nidulans
atgggaaccaggtcgattgggctctggagcaggttgatttaagcccatggtagtggatgtcgggtaggtaaaagactgctattttcttggtatatggagggttccggatgtactgagatttagcattccccgaaagtgacgtttccaagcctgaagctgtaggttccatcttgccgctcagatgatttgatctgttctcagttggttcatatggtgtttggggaagacgagttctgactgtcttcatacgacaaggcctcgagggtcaattccggcctttcccttttctggaataggttgcctgaaactcgaactggatgcctaagaccaccgatcgacaaccttaggatttctttgagtgcaatgctagcggctagttttcaatgaaatacgagaagccttgggcttttagtcattacctacgagagttcaattaacggacctagctaaataagggtatctactgcaaacagcttttcagctttgctgcgaaagtcaaatccgcaacacaaagccccaatggaattttgagggttgtcttctgaacagccattacaaaagcaaaagcaagactcaagacgtttcgattcaagtctggaaaacccatctaggatccttgtctccctggaagtcaccctcaccgtcaccaatatcacccatcaatggcaggaggccgtcgcgttccctgatctcagccttcttggcgttctcccgattgaggacctgccacagaatatataccacgatgatattcgcgacgaggtaccccaaagaaaatccgtgcccgaggaagtatcggggactggtttccgtccggtatagctgtgttccgataacagctccaagattaccgatggaaatttgcatggcgttggcaatggctcgctttgtctgaccagagacattattggcgggccaagacagaacaatagctacggcagggtagataccagcgccacagaaaaatgtgccagtataggagacgccgggctttccttccgcgagcagaataatgtagccaatgcaagcaatgcttgagagcccatgatg

SEQ ID NO: 9243 - DNA, 1287 bp, Emericella nidulans
  unsure (1)..(1287): unsure at all n locations
cattggcgactgaatcccgctagaagagcgctagaaggctggcagaagtttcctaggcttcgatcctttttctagcgtcagactagcagggattccacacacaacttgccaatcgcagccgggccgctggggggctgtgtgtcaagcctgcatgcatggccgtcttttcctgtcccggtgggtttggccatttgaccaggtgatgaatccgccatggatgtgttcgtatcgcttgggtctaagtctctagctaatgcatgtgcgaaaccgactcgagagacttcgaatttccattataaaaaccctccctacgcccagtcacctgcttccgtcagtcttctcaactcttcgtgttgcccacactccatgcttcaactttctttccccggatttcctccactctgcaccctccctccgatcagatcatagttcttcaacatgtccttccggccaacaatggtaccgtcttacttccctccagctatgggctgcccatactgactatgccttcacagtcgcagcccatcgcctgccctccaatggagcactcgccctcctccttgtcctcctactcctcttactcccccagttcgtcctactccgccgtgagcgacgactcgggcatgagcatgttggacatgtacttcctgcacggtggccgtggacacggcgccagccccggcacaagcacgggtcccggcagcgtcgtcgatttcccgctcagccagcaatcgttcgatttcgagccttcgtcgctggacagcaatggcccctacttcgagttcaacccgactttcgtatacacacccgaggcgtttcccgtcatggacgccccgacctcctacccggcgagctcgaacccgggctgttcgcccacctccatgcttgtcgagcagtcgatatttccttttgacgggcttagccaagaccagttcagtatgtaattcaaacgggcattttgacatctagatgctgaacgttatgcgcagccaagcaaccctacgatgcaagaatggggaaggccttacccgccagggacctaagcgcccttagactggcactaccgttttcaactgnctgtccgacggtggcaagacacatgtttcgggggacactgtgggaccgcttgccacaccagtggcaaagggccccagcatgaacgtaaaccagtatgtttcctttgccgtaacctttaaaacttgtaactgtttgggcgcgttaacccttttttttttcatgttgtcccacaccacgggaccccgtgtaacaaaaatcttatcttttttt

SEQ ID NO: 9244 - DNA, 1035 bp, Emericella nidulans
tgtttgaagctggaaccagtggcacggaaggttttgagctaaaagttttacaggtaccacactggtggctaatttctcctcaacctcagactatgactgcgcccgaagtcctcttaaaagagataggtaagttccgggatccacgcggtgggacgaggtagcagtttctgaccccactatctacggagctgtctcaacgctctcagcaacaggattagtctaagtacggtccacaattgaccttcacgctttgtagcatgatgggtaacagcgggcttcgaaagcctcaaggagtctgtgaagcatgtttttttttttttattatgcattccattgggaaagcgggtcatctaacaccgctatgtcgttatcgggaacttgtccctcaagcctatggagttagacttatttccaaggatccattcactgcctcggagagttatcgagtgagataactttatattctcatcttagagtacacgtgatgaaatacagaattctaaaaggctcaacactcattatgaaacagtctcttctttcccatgcactcttaattcactcgttcctccacgtctttactgtagatattccactgctgcatattgcatatcctcgataaccattgcaccacctttcaattagcatgcacacaccatacgtgatttgtcctattcggggacagacaaggagactaagtaccgtgtacaggcctcaagaaaccacagtcattactcattagtgaagctgaagaaaattgagttgcgcatctaggtgatagaaaccgtcccagacactctccgcatgtacacccgtatctgaggcgttctttactaaggcctaaaacccccggttctgatagcaaggagagacaggacacagcggtatcagggtaccctctatagtggtctagtacattcaagacccttgatccaacttgctcttgcgttcgcgtggtctctaatttttcctgcaatgcttcaggaggggtgtaccattaatatcccgagccgtcttcaaaaagtccgtgttggggac

SEQ ID NO: 9245 - DNA, 1785 bp, Emericella nidulans
cgctcgtactctccacaaactccggcgacggctctgccgatgacttcgacggtgactccagcgacgatgagttcgatgagttcagcgactcagcagagacacggaacggagactgggatggaaatgaaaatggaaccggctggtcgctatccctctaccgagacagccagtgctcgggacaaccaatacacttcagcggaacaaacagccagacctgctcaagttcgaggggtggattttcggaaacggcattcattgcaaatttgaatggttgccgggttttgttttatgagcaggagggctgtatgggccgtgggagagtcgggggttcgcatgagtcgaagtcttgtagtattcctggggcgtatgaaaatgatggcgataatgacgacaaagacgaagacgttgacgacgatgatggtgaagacttcgataagggaaagctgagaaaccgcttggcaaagagggggagcccaagctctgggagcaaaggacagagtaataatgatgctgaggatggtggccgcaagggcggcgatgagaatggaaacaggagcgttatgatcaagtcctttaagatcatctgtggtagcctatcttgattctgtcttgtcagtttcgcttctgtcttgttggtatacttaatgccaagttggtactggatgatcagtagagatgcttttcttcctcatatctactattcaactagaagacagaataaagaggactaagacataacaacaagagagcacgcaatatgaaaggacaaagagggaatcttgctgcgctgctgagattggagacaggtgtcatggataaaagcaggtataaggaaaggggatgaggaatttatgcaggcgctccagccacagccgccaacgattagaaagatgctacctttaacctcgagcgtaaaacaacggaaaggattcttcggccgaattaagaaagacatgaaagaaggaaaggaaggctgcgaggttgtggagagcaccgccagccacgtccgtccaccgggaattggtagcaatcatcgaaggacacggaatgttggttgcattggctcttcctttctcttccgaagaaagctattaacgtgaagaaacaagtagtcgaataatattatcccatagacaattataaccgccgcgccacgagtttcatagcataggcacaagcggcatggaaaagaatggcaagccgttacccgcgaacaaagatcgcgagagttactgctcggcctcggcggcttctccctggcttgcttcgcgggccatgcgggcctcaatctccctcagttgactctcacgagccaacaactcctggcgcttctcagcaatctcacgctgcaccttgagctcaatctcccgaagcttctcttcttcgcgacggagctgttcttccttcaggcggacggattgagtagccaggtcttcggggttgatcgatgaatcggttccagtgctgaggttcattagaattgcaggatcagaaagtgaagaagtgcatatacgtacgtggcagcgccgtcaacgctcttgctaagcttctcggtacggtagttctcatataggaaatcatgagtgatctccttcagatccgccagatggctgtggagaagggcactccggatcgccaagaagtctgagtgccgggggttctctacctcaacaacaccccaaaggtactgtctggcccgcaccttgcggccgtcgatttccacaaagtcatccgagccaacgatagcaaatggcatcagccgccgcagctcagcattctcttccc

SEQ ID NO: 9246 - DNA, 1412 bp, Emericella nidulans
agaaccgggtgccggaaatcgcgctgctctttgcttcgagaggatgcggcgcgtaaaccgggtgaggtagcctcctgggcgggagatgaggcgggttatacgcggcaggtggacgatatcggtgccgatattgagggcaagggggaaaggaatcgggttaggtttcatggtgacttggtggtgatggtggatgagaattgaagccaaagtaaactcgtaattctgacctcggacacggacaacaaccgtgggtgactaatcgagcaataaccacaattgccagaaaccaaagtgctcgatctttaaaaggtaaacaaagtcttacgggttgtaagtgagggctacattatgtcttataactgagcacacagactgggccatcatgccagacattacggagcagccgtctcgctactacgttgaccacgacacaatcgcaagagtaggaaaggaagataaacctttcagtgtatacctctatatgtacatattcgcattgctcgttgactctgtcaagtcaagcgagcggccacgaggcatcctccaacggctccggcctcggttccaataaaatcgttcataggttccttgtggaatgcatcatgttctggcggcgagactcgagaccggaccatgctccgctcaatcaggcactagccgaacgctagtggtcggccttcttgtcgccctctccgttcatttgtttcaggaagtccctaaaaggcacaatcagccaattgcccataccttccattctttcgcagaagtccaatgaggtctaacaacccctagtcgagctttggcaaattaagtagggtcggtgtagcacgcaggaacatactgaatgaaaacctcctcatccttggaagacgcctggatcggaggagcagcgggcttcttagcagcaccaccgccacgggtagcaaggtagataccgccgaaaagcgagctcaggataccaagagaaagctagacaatcaacaagtaagcattggttatctcgtcaaggtagccggtatattccacatttcaagcaggtagggacaggagctcggtgtggcggatcgccagaaaccaccgtggtgggaagcccgtctgacgaccactgattgttgcgtagacccccattttcgcggttacgaggtgtccggtctttgtatcaactgtctcactaccaggaaaagtcctcgcttctcctttagctcgtcaaatccactcctatcattaacccccctcccccctacggttttacttttcgccttctccagctttttaacttcctcccttcattatctcccacatataatctttctccccttctgctcccttccatccccttctctcccttctccatctatctccctctctctccctctctctcccctattatcctcccccttctcctattcccc

SEQ ID NO: 9247 - DNA, 1216 bp, Emericella nidulans
gtcgtccagagcatcgatttcgacgaggacgaggtatctctgcagagcagcgcgggtaagggtgccgtcgctagaagcgctgtgtagggtcattgtgtatctcgtgtcttatggggatggtaccctgctttgcgaaggtgtagatgaaaaaacaagagggaagttgacggctactaggtggaaggctcctctatgtcaagtaagggcccagaatctattatagccgaaaccgcatcttcgtgcccttcatcaggcaggccctgtcgtttcggtatggagacgtactgtcacgcagcgtatagcaatcactatcaggtctgctgatactgaaattgcagaatcacagtctggacgcttctcagccagccacgatgcgctgagggagaagacccctcctccgcatcaaaatacagctttgtttgctcgaggggttcgtggctggctgtctgatgcttcaccggctcatctgcaggtcgacaggattggaatggttcatggtcagcccttggctggagtttgctctttgacaggggttcatgtcgcttcttccagctccagcagaaatcgtttattttgtatggtaagctcagtctggtagtgcccttggcttgtggcgcactcggcatcccagcactttatgaataaagcagggcatcgttctctgtctactttctatgcctcgccatttattgctcccttcactgattatactcactgcggctttttatactgatagagtaggcgtctctttgaaatggtctacaaatactaccccatcaccggaataagggccggaaagggccctaacggcgaacttcctctgcgacaggatattgacgtatggagttcgaagccggagaaccgagtgcaagtcgtcctgtttctcaaagccctgaaacggctacaggatgttcctcctgagaaccgcgattcgttcttccagattgctggtatgccggctcgatcagatggctcatctcaaccctcgctcgagtagttaacattgctcccataggaattcacggcatgcccgtcaggtcctggcatgagcccttcgatacagaagcgtatgtcgcgcagaagggatactgtcagcattcgtacttgcctctttccctcctggcaccggccatatctgcttctctacgaggtaaatagcaactcattccggtgcgaaaatcccaagcctaacaatcctttagcaacaaatctacga

SEQ ID NO: 9248 - DNA, 424 bp, Emericella nidulans
cttgtgtgctcttcaggcgcttcgatgagcggtcagtggtttcagatgcaacgtgtgcatctagcacagcggtgatggtttgctgtgcacctgaagtgcctagtaatttcgtctttgagtttgcgagcgtggttgcagtcgctgacccgcggactttgagcgaccatttatcaaggatggcgcggcggtgcgcaagcgagtcggattctagctccgccatgcgcttccagagagaggatgtagatgtactggttgtcgcaagagaagggcgcttgcgcttcttagagtcatcttgtgtttgcgcatcgacgagagtgagacggagatcctctagtgtagaccacagcgtaagcgcagctgtttccgccgacttgaaggcgtctgtgtcagcgtcttcagagaggtgggctcgcgtggctagctg

SEQ ID NO: 9249 - DNA, 1529 bp, Emericella nidulans
tacttccaagttgcgcgacctaattcggctctagttctgagggttagcatcgtttttagcctaagcgcaagttgctattgtatactttgctgtctcattgcctaaacgaggcatcacaacatctcctttgatcagatcgtctttgacaggtgttgatttctcaagatgaccaggagctcggacagaaggactaggaggaccgtagggttgaatgaacaagacaaagagaaagaagatcaaaatagaagcgcttatcagaatgcgccttgtgatttggcggttggccatcgctgcagaggacgagagtcgcggttccctgattaagttgtgctgaagaagcatgccatgcggcgaacgaatcggcgagtgctattagagcgatacgatatacatagaaggttaagaatgaagaaggaaccagagttaatagtgttcaatgagcgacaaagaagttgtgctgagcaagacggcacggttcatcttccttgcatgagcaaggtggtctgagtccgacacgaagtacggggttaaccgtaagctacctatctgtttcaatgattgctgacaacccacgtggactgcataacattattcttggtttgcttagtcactattctatttatgcccatcaatctacatatgactgtgtgtgagaagcgattcagccccggcaagactagcaaacgtgaagctacgggacggcctgcagagcttacatagactacttagatactagttagtgggggctcactactagccctgatacagtacctgctcaacggtctagtcgcgtcgacatagattgcggggagacgataagccgattacataatgcttccttaccgattagcggccgccaattttgttcattcggcctcgaacccgagcctcaattccggatcatcgaacctgctctgctaccagcaaaaatggcgtccattcgatccttcacattacagtgcctgccttggagccggtcttctttgattcgctcccagcagcgtcgatgggctcaagtccatgatgttcgtttccttgcgacccaccacgaccccaaccaggtcctggatagataccgagcgaagctcgaccaaagggctaagcagtgagttggaagagcatttggaagaccctaatcgtttgtgctcacaaaaaacgctacagggagggcttttgattcgttgaagacttgaagaagcccatcaagagaagattgataagctccgtcggagtattaaagttttgccccggacctgcatttccttcaagaaccaaatctctttctcccttccaaactaatacttgaaaattgaagggtgccgcgccagtaatattctaatggtttaacccaagctttactggttgtaagccctccttctccagaatagaactttggtcattcatcgtataaatttttgcgttttataaagaatcattcttcttttgaacgatttaactactctcttgagttttattaatatttaactcgagtggggggttattgtaatgtttttctatgactattttac

SEQ ID NO: 9250 - DNA, 417 bp, Emericella nidulans
cgggaaaggcactgaggggatccgtcccgacacacccaaccggattaccgtgcctgatccgagggaccccggggcgcatctggggcaggcccgcatcccatggctggcgacagcaccatgagcacagtggtccccagggactgccttgcgttcactaccaggagcagcactcttcaggatcaaagtacattcaagacgcacagcgacatgtcaaggaaggcctgcacgagacgactgctcataactaggtttgccagatgtatgccaagctgacggacgaggcagttcgcccacccgcggaccatgttcagacaagcggtaaacagctcacgccatgcgactgtcataagccggcacgctagctctaacagagcgtgaatcggccacgcatgcaccaatgatagagaatgatgaccg

SEQ ID NO: 9251 - DNA, 257 bp, Emericella nidulans
cagaaatgcaattaatgggtggactttcagacactgaccgtcgcacacggcatgacatcggtaccagtcactactgcggatttaacagcatggaccaggagctctgacgggataccgagagatctaccacggattctggcgatggaagctccggtaacgaccacgagcaatgtgcatgctcccagcttgccgtcaactcgagcgaggggatctttgtagtagaccggggtgcgcgtcttttgcaagatcattgatgc

SEQ ID NO: 9252 - DNA, 1728 bp, Emericella nidulans
ctggttgaggacccctccttttacaaaaagagcaaaagttctttcgcctgctttttgttttcccagggtaataacaaaagtccttttccctccccaatgaagcttgtggtgccttgcatcggtcctctttcggatctcctttcatttcccctccttgcttgcccagatcgtgccttaaaagaaagggactcaagcaaaataagcataagcgttagccctcgtgtaatttaattttcccttgtgatcgtcatttagggttaaagtttgttgttgacgttttttccgctgcagcgcgttttgtccgtcgcttcctgatcgtgagagtttcgcatatcagcactctgagaccccccggtgacggacttgattttttcaacacctctctggtaagtccttctgtggatgcagcaacccgattcattgcctgtgagtgtatggttcgtactcaccaggtgggtagttcatcgcccgacttgtattcagtcctgaaattggtcgacctgggcagcagtgaaacctattattcttcctaagaggagaaaaggacgagatattctcaaacctattttgtctccgttcgacttccaatatccactcgcttttctgaaacacggccacaaacgtccattctgctcccgttgggcttgacctcactgagaggataatctcgctttcagctaggtaccggcttctcataggtgatcttaaagtccgtattgagaacgtggcttgcgtctggttccaatcctgcaactggccttccttgatttcggtctcgattgttgggcactttccactgatctagagccgtcatttccactcttctcactcgcttcgtgtcgtcgctcgctctgtctcggagagcttgctgcaggtcttccggcgcactatcgttcgccccagaataaatacactgccattcgcttctttaagttgttgtgttctgttgcaggtgctgcaacaccttcaagctggcttactcgaagacacacggtatttttgtgagtgcaccctcctgtttctcctcttacccaaagacttatttctgcattcccttcccactggttgacaactgaattttgatgcaacccctgtctaagtgaaaatggatagccgccaccttccacttcaaagcctcttgacattgatatgtgctaatacttggttgaatcgcagttcgacccggacttccaaacgcctctggttctggatgagacgttggagttctcagatcctgaagagtcccagtgtttcgacgtgttttcaggcggcctcttggccaagtctgaacccatcctttctatgtctggttaccagagaaccccacaagcggccgtgctaggtgagttcagctgttcttctttataggagaaaggagtttaatgtttctttagattgtgattctgcccaatctctgcaggatggcgctgcttattctacttacggccagccggtttatatgtcgactccccttgccccatctccaatgaccgaccatataagccagatgtccgattgcatgccatacatggcgaagcctgagtacgctagctcctacgaggatgagaagtcgccaatgattactgtggaaccttgccagttgcccgaagtcacttcatactcaccccagcgaggatccgaaggaacgagggtttttgtgcagctgcagtcaccctacgacctccacacaaccccctatgcaacactctacatcgtgttcggatcaaa

SEQ ID NO: 9253 - DNA, 200 bp, Emericella nidulans
tatttataagagatatattacattctctaaagatatttagaatagttataaaaaaaaaagaaaaatcctgtgtatatagagtaattacttttaaatatagattatagtttaactttgtattgcgtgcttgcatttgtcctaagcagtttgtcgggccttatcttctacatgatcctaataatcttctatatccccccccc

SEQ ID NO: 9254 - DNA, 186 bp, Emericella nidulans
acttccttcagtaaatccaacagactgtcacactttactgcccgtatggctttcaggcacgtccatggtagtcgtatagagcatagctcatttcacaggctgcatcgaccactatcatcctggagctcgttccagtctccctgaaaccgctcaatgcatcaaggtcgctacctatacgtgcaagtc

SEQ ID NO: 9255 - DNA, 1112 bp, Emericella nidulans
tccagagctcgcatggaatctaaagatagactctgacctgggaaatatcaaatgttatgcgggcagagacgggatcaattgaagaggagatccgaagggtcttgagagatgcgtgcacttggatgttgtcagttgatctatcggactcttgggagactgcgatgttgacacctcaggccactacggtatcctgcagggacccgcgaggcaatcaagctcgcgctttgttcatgcgtagagatgagttatcacaaacttggcctactcaataacaataaaaatatgttgtagatcaacaagatactcaacatacttcacaaaatctatctattctatagatagaatatttgtcggctgatgtgtcggagaattataggtatatttcacgaatgatagtgaaacagccaaatcacttacaaaagcctccgtggctcagaaaggcttgaagaccgacagcgattaattgcactgcaatagcagtgagttgcgtatgctgacaagcaacttgtcctcagctggttttcttgatgactttgagcgtggacaagccaaggagccaaccaaggcgtatcaagaagacttttagcatacagagcacagcagtccagtccctgcagccttggtagacagctatacctagggagtcaaggcacagtaatttcttaatcgagtggcttagaaggaagacctttaacaagcagagatatattccggatccaatcaatatctggggggtgcttgaatctgagtctaaataactgacacagcctccaggcaccgtctaagccactttctctcattcatcgcaagtctgcaaaacctgagcggtggcctgacgggctgacaggctcaaaagctcgcaggctcagattaggttccagcatgggtacaccgccccatgctttgcctgttttggaggagcgtctgtacagagtacattgattgcccgctgtcgtacagggccttttgtcccactggggtggctcatcccggcatggtctatatcttggccgacctacgtctgcccatctaaagggaatgtttgtattgagatgctgccttgttcaggtcctcacctttttcatgacctgagtgtttgactgaagctgaag

SEQ ID NO: 9256 - DNA, 176 bp, Emericella nidulans
cttctcatgcagcatccggtgagctctttgtggttatccgccattcgtagctgcataagtagtggtaggagttcgcgcacagcccgttgcagagcggaactgaaccaagcatgtgtctccgccgtgcggtttgctgcaaagatcgcatgatgggccgtccgaggagaatcagggat

SEQ ID NO: 9257 - DNA, 1591 bp, Emericella nidulans
aatttttttctatttttcctgttatttgccccttgtcataataaccagacaatcggataatagcgcctgaccgacccagggaccctaggtaccagccatgactaaccactccgtgctctgtatgaggttccaatgtcgaaccagcgtcgagcccggcatcggcttcgacccagtggtcacgcgctcaccgcctctcgatattacccgagtcgtacacaaataaatacacaaatactgtaggtcggagttaacgccgagatcgccgcttagtcagtcagccgcacatgattgcgttgtcatatttacagtcaataatactatgtagtgctcggtcgtgctcggtagtactcgatagtcaatgcatacactttaagtattagcaatcatctgctttcagagcagacaatgtatggagcatatcggctgcatctactttgactaaatgtccaaaaatctagatgtccagcaaacttaccgagcgatgcatgattatgctcgtaatgcatccatgtaagatctccgcaccactcggcaaactccggaaccgcgtgaggggacactgaggagaaggagtcccccaatcccaagtgtctcaccgagccgagcagtctagcctggtcatgcatggagtagatagggctggacatgggtcaacaggctcggatcggatcctgagtgctaattcctacctcaaccggtattcgggttctccaactccatgtgcctaggtactttcatacagctggactattggaccccattattgaaccagcaatcacactccgtattcgataccttggccgctgatagtgctagataatcgctagatgccgtcaggatcgacgatgccagtgtattgaagtgtattgatacaggtatttatatatacacttacggcttctccagccgcaacagtttgaagagggccctctccaccggtaaaagacccaacatggcataattgaaacggtacgctacaagaaccacacacgccccgaccacagcgtcgagaacgaaatggttcgctgtcgcaacgattgtaaaagccatgagcgtcggccatacgggcgcaatgacacgaaggtaccaatgcgggctgaaccggatcagacacagcgcgatgaacatcgagttaccgaaatgcagcgacggcatggccgcgatagtgagctggaacttgttctgcgtccaagcagaaccgccgtggttgctgtgcagcacatcgacgaacccgtactcttccggaaggagacgcggaggcgtgcaccgccatagagtgatgataatgaaggcaatcacattctcaaaggccagcgtccggcgaatcgcttggaaggtttcacgtttcaagaaggtgtaagtatatgcgaaaaagacgacgccgaggacgatgtgcgaatagtacactcgggccaggaaaggcatgagccagggcgctttggtaaggacgaatttctgaatagccagctcgacgtcaatgtgaagggtatgttccagagcgaggatctgaagagcatgacgctctgctctagcgaagatggcatcatggccggcaatggctcgcgccgagattgcacgcagaccttggtag

SEQ ID NO: 9258 - DNA, 692 bp, Emericella nidulans
tctcagccctgccgacagcacgggtcccttccggtaatatctgcaggggaacgggattggcggcttgtgcccgactaccagggacaggcagggacagggcagaaagaaagactagagagatgggtgggacttggactcggcttgcgttcttggatgaaagcgggataacctctttagtggtgccttgtaccagctggtacaaaccgctcatggatccccgttagatactagaataattcccaagcgggccgcaagtggtgcctgagtggatctgagtctggaatagtatgggaagaacgtaagtttgcagcctgggccgcgtagtgcatacgcctcacgtacgtacttgtatataaacgcttacggtatcaagcttcgtaaccacccattgggccaaaacggctgtccatggtcacatttcttggtaacgtattccctccaggctgtcacgtcggtacggttttcccaagtaacgatgctctttgaggccacgaccaaattggcctctaatggttactgcgaacctccttcacgccccggttccctggcttccaaagcactcgatacgcctaggagctacgagacctattgttgccgacttagttgtttctggttctgtctatgcctgtcgaatgtgtcaatggttctcagtcctgcaaaaaaatacgtcagctgggtaccattataccgcc

SEQ ID NO: 9259 - DNA, 1093 bp, Emericella nidulans
  unsure (1)..(1093): unsure at all n locations
gggggaggttgggtgatgaaggggttgtgtattcatactgaaaccttctagttaatagcggtttaattagcgcagtaattctgcataaagcttaactatactcttttatgcaaagtataccgtggctggggtagctctaagccactaaggcccctagaaatagactaatgatgtcactgctgtggctggggccttttgtccttcgtcgtctcgtgaatttttcgccatctttcccgtctttgaattcgtcactgtgggccagagcttcactaatgccttgagcaagcgtggatggcctgtaagaaacgccagaagctctgatccgcagtgggagacccagaaatcgtccactgatcttcctgctgcggcacacccagcccctggagccctggggcctgtgacaaacgacaatcattatggaattttgctgcctttgatccgnntacgccttggtcacgctcttaaataaaacaatacccccgctagttgcatccttcaatctttttaatgttgttaccaatatttataaggactcatacaaatcgcgccccctagcgccatcactagtcgcctaactcactagtcgtctaacaatacaaaacaccatgggctttggaggcgttgtcctccgcttcttcaacctggccatccgggtcctgcaattcctcgattctgcagtcatactaggaatctactcctactttctagccagactcgctcaaaatgaccagcaaatccccacgtggatgaaagccgtcgagggtctctcaggagcagcgaccctctatgccctcttgggatccctgttcacttgctgcctgggcggagtagcattttttgcggctgtggctattctcctcgatgtgtgctttgtcggggccatgatcgccatcgcagtgatgacgcgcgatggtacaaaccagtgctccgggacggtaagcactccacttggcactggtcgcgacaatgaagactccccggctggggtgggttatgagtacgcttgcatgttggagaaggtcgttttcgcagtttcaatcattggagtgtgagtattctcgttttcgtcgtgaaagaagaacatatgctaatg

SEQ ID NO: 9260 - DNA, 424 bp, Emericella nidulans
tttggcccaaaacaccacaaagcgagggctgcgatcaccgtcggtcctcccgcctagcctcagtgagcgcatacgatatatgcaaggctacactgagcggagatgagacgcgaccgactatgagaccaactcaagccagcaggaaggaaggcgcatcgccatactgactagctagtatggactcggccgaggaaacccaagccttggaattgacgacggaaccaagcaagacatgtaggtgaattgtgactaaccaagggatggcgcgaggtgcatcagattaggacctgccaagctgacctacatgtaagaacacgagaaatacacagagtcaaggtattgtctcatgctgtaggacagtgagccgagcatgacgaacaagcacagggactctgtggcacagatacattcatgctgtatgcat

SEQ ID NO: 9261 - DNA, 2097 bp, Emericella nidulans
ctctcggaaagaaaaaaggaagtatccaactccagtcaggcatctctctatgcggaatgacagctgtcgttctgaaaggtctggaaggtcttaaataattctacgtaattctcggcgatttgtactctcaagtgctacgggcttcaggctagtatggcgatgcgagtgggccacccagaatgcttggatggtggcagaatgacagaatgacgttgctttcagggccctgagccgttccaccagtccacaagaacctttgacagctgcatccctcactacctatactcttccttcactctttactcactaaacgtcagtcttatctctattattttacgtcgaccgtcacgacctgccgggccacgtcttcccctcgctacatcctgcggtagccatgagcgctacgctcctcgcgagtcgtgcggacaccatcgcgctgagaagaattggactgctttcgagacggctttacagttctaactcccctatatcatcaagagttgcttctatacagttagccaattacaatcatcgcaaacccatccctcaatgccttgcgtctcgtgccttcttcgaacctcgatattcacttcgacacaattccactgcaacattaaaggagcatggatttgcccggaggttccgaattaagaatatagtcgtcaagacttttgcatactgcggcttcttcattatcatgagcagtgcggccgtgatagcattctttatttacgatgcgactacataccgcgagtcctcaagcgctgaggatatcccagtctcggagttagcgctcaatcctcgtcgcggaggtccgaaaaacttgccaattgcagaagtgcttattggtgatgatgattccgaggcaatgcaggcacagaaggataagccgcggcttgttattttaggtacgggctggggtagtatcgcgctgctcaaggagcttaaccctggtgattaccatgtcaccgtggtgtctccgacgaattatttcctgttcacgcctatgctaccttcggcgactgttggaacgcttgggttgaggtcgcttgttgagccagtccgccgtatcgttcagcgagtccatgggcacttcctcaagggtgaggcagtcgatgtcgacttctcggagaaactggtcgagattactcagataaaccacaaaggggagaaggaacaattctacctcccgtacgacaagcttgtgattggcgtcggtaagcattagtattctgatgcccagttacgctttgtgctgaaccacatcttcatccaggttgcgttacgaatccccatggtgtaaaaggccttgagcactgccatttcctgaaatctattgatgatgcccgccgtataaaaaaccaagtactggataacatggaactcgcatgcttaccaaccactactgacgaggagcggaaacgcctgctgtcctttgttgtctgcggtggtgggccaactggtgtcgaatttgcttctgaactctttgaccttctgaacgaggatctgctctattcgtttccgaagatattaagaaacgagatttctgtgcatattattcagagccgcagtcacattttaaacacatacgatgaagctctctcaaaattcgcagaggtaagccttggtctcaatcaatggttatttaactatgggcaggagcttacggaagtagtctcgcttcgcgcgtgatgacgttgatgttttgacaaacgctagggttaaggaagtccgtgaagataaagtcgtttttacccaactagaagacggaaagacggtaacaaaagagattcctatggggttctgtctatggtctaccggcgtgggtatgcagactgtgctggcgcttcgtataccataatctgctaaccagcataccaggacgcagtgatttctgttcaagactgtcagacaagctcgaggcccaaaacaacaagcacgccctagaaacagactcacacctccgcctcatcggagctcctctgggcgatgtatacgccataggtgattgtgccacagttcaaaacaaggtcgccgaccacatcgtctccttccttcgcaccattgcctgggaaaaaggcaaagaccacagaaagt

SEQ ID NO: 9262 - DNA, 589 bp, Emericella nidulans
aaaaatgatcattggcacccactctttgaagataggagtaactgggagtccctggcttctgcgcgctgaaatgacattgtagacgcagccaggaaggtggcccagaaagaagcctgctaggagtatcggcacccagaagtctttcatagagttgttgccgaagaggcccggcaagttgagaaattccacaacgggccgagaccagatttgagggccgtaccagccggacgcaatcataatggcgatacctatcaaaagaccttcggtggggccgttgaaatatccgagatagagcgtgtgagtgtgatatgtctcccacgtcgaaaagtacatggcaagacatggcacaagagcagtccaagcgccgagctgggaggagcccagacccattgccgcagtttctagcagactggcaagagtgcagttaagggagtcgattccatggctgagagacgttagcatgtttctggttatgcttggttctctactgactcgaaaagctcgcctaatccgctagaagtgccagttcttcgcgcttgtttcccatccacattatcgagagtcgagtaccttatacagtcgtcagata

SEQ ID NO: 9263 - DNA, 1190 bp, Emericella nidulans
ttggcaggttcgagacgacgatactgacgaaactttcgcggcaggcccatttacttccttcaattgcgccgttgggaccggcctgtcgttaatttcattagcaaccggtatccatatctgaaattttctcgtccctttcctttcttcctgcagacgattgaaggccagatggctgggcctagggaaacgtacagttatgatgatcaccgcgcggataatcccggcaacgccaatgaagatggcaccgctgaagagacccatcagggtgattttgcgtcgaatgccgatcttcactgcccagaggagaggaagtggaatggacatgaggtagaggtctgtcaggacattgggaatcatgacgacgaggacgtaggccattgagcgggtgggttggcataaatctgcggcgggatcatgttaaaggctgcgctatatcgaagaaaagagcgagcaggggacgcactgccaggatccgggttaatctgccaaaaccgccgcataggctggcagctcaatatgagcgtcaaggccacagcgagatatgtcacggcgaggaggacatatgcaaagcgcacacgagacgggaggtggcttagacccgttctgtagcagatctcagcatctcagtatcaatccagttttcctttcaaaaacaaaacgttttctttcagctccagcaaaacagagaatggagacaagcgacgtacgttaatcgtgaatagaaaaccgccagcgcgcccttgatcagccacaataccatcacgtacagcgaccacccggcaacctggatcttcgaccccatgatccggttgtagtactccctggagttggggtcaagggccgcgcgctgttcgtcggtcatgtaactgttcgtgagaccgtcatacttggatccgaccagatacgcgagcgtgacttcgatggtgaagactatctagagcatcaaaaactgtgagcagacgcatggggatgacgacaagggaacgtaccccagccagagcatcaaaaagtcgtcgagctggaaatttgacggcccaacctgcgtccagcgtacacagacccggacgatgatgaagacgaggcccagccctagcagggtgaaactctcagcgtactgactcgacatctgtgcagacagatgaatgactcgacgcggctgcgcagggggccacgcgacagtgcagtataag

SEQ ID NO: 9264 - DNA, 1459 bp, Emericella nidulans
tcatccggggcatcctgcgtttctgccccaatggcgtttagacggcgactcgcccacacggggcaagacttgcaagcgctggtttcggtcatccagttcatcggttcggtgtacgcaaaattttcattctcggcacccttgaaacttaaggccgaggcggccgtttcgtcaatcggcacgaactctccgattacggggttcgacgtccaggcagtcctgcttctgtccattgcgatctactgggccaatgagccccagaaagcactgggcttgctcgacagagcgatcgcaatggctctggagctagggatgcaacttcaggggtatgcctatgcaaatggcagcagtgatccgctgctcgaggagtgctggcgacgcacctggtggcagatctacatgacggacgcgcatatagcgggcagcacaagcacatttccgttcagaacgagcaatgttgagatgaactgcgacctaccttgtgatgaagccgagtatgagtcgggagtatgtttttccctcgttcttccagaggctcagatctcgactgtaagaccttgctaactcgtgcagagaattccccgtccgagaacgctgcaggactacgacatgcgcgagtttctagacgacgatgagcgcgtcttctcctcgttcgctgagttagtcggcctcacgcgagggctcgatcttgccctcgcagctcgccagagcatgacaattgccaatgcgcctgccatctgcgcaaacacagacgccaccgtcacagcttggcgatctctgctgcatccgtcgaagaaagatctcgtgcgggcagatgggactgtagacgaacttctgttcaaagcaaacatgataattcaaacgtactctccctgtttcaatagcctgttcctgtgagtgcacgtgctaactagtatcagatacgtcgtcgagctgcaccgccagctctcaaccttatcttacacccccatcgagtctatagcccattgctcgcctcctccacccccagagagcctccgaggctgcaacacaccggaatgccagcttcataccgcaaaggtgctgcgcgcgatcgatgcctttgacgaccttctaacccttcccacaaacatagcaacgcatactcccttcattatctgcatgatctccaaccttgttatcgcgcatcttgccgcttgtcggttccactaccaaggccaggcgctgaagctagcgcgggagcggatccggctcagtatgggtgctctcaaggtcctcggagagtactggtccatgggacaacggacgtatagggaggtcgggatagtcgcgcgggagattctggggttgaaagatgcgtcgaaacgtcaacagcatcaggaaacaccggccaggcctgcaaccgtggattttacgagcacgagggctatcacaatgtctgatcctccaagtgaagaccaacctgagccacaaagtacactac

SEQ ID NO: 9265 - DNA, 117 bp, Emericella nidulans
ccgtcgctcatctctatctgtatcccggggcacgcttctctctgacctacagtcgacatgatatgttggtcatctatgtatgaaccatccttcagagcatcccattcatgcaggtcg

SEQ ID NO: 9266 - DNA, 1881 bp, Emericella nidulans
acttgcccatatcgatatcatggatgtctctgaagcccgacaaggcaaggtttttcaagatctcgcatcctaggcctccagctccactgcaaagggattgaagtcaggaactgcgtcgaaatgcagccgaacagcgtctacttacatcacccttggggggagcacgttagtagcgtcaccagattccaactgatacggttgaatacatacaagatcttagattcctctagggactttattgtttcatttccaggaacccagtcaggatctgaaaaaggacccgactttgacaatacctcgtagagatatttcctagaagcgtaagtcctaagaaggttgccggacgcgagggagactcaccattgattccccgctcccatgttggcaaggtgatctacggcacagattatgaaataaaaatacgttcttcgtggcttatgacttgagctattcagaaaagctgattgtatccagagagatgtttcaaagctgtatgactgcgaggattagaacgtgcattgctgttgtgattgacggaccacttataaagcggccacacgtgaccatatctctctatcgtacaaccgctgtccaaaactgcagtttgggccatggggccgttgggaagatagtgtgtctataggtacaatgctgagctacttttggaagcagcccttgtcaactcagcgacatcttttcatgttgtttctttacaacgtcatattggcacatgagagcgcaattctgatgactaattatacaaatgcataaagtttcttccaccacacgattcacagcggcatttccttatacaagaaccaataatgctcacttctgaagatggacaagcttattacggagatagaaacaatacaccatggtcagactccagctctcacggttcgagaggagaagaccaaggatttcgtctcagaaacaaaagacgctacgccaactgccgagtccagttcagactcgaggtcaccagctcagattctatcaacactgaaatcaaccccccgtcgtgaggaactttccgctgccatatttgctctagatcccttcaataagagatcttcagcaagcagtatcgatattagagtcccaagccctgtgtcagcccagctgctcaatgctctagtcaccattacaatccccgatcattggggctctatcaacgcaatcaatagaacaggaacaggcgataccaagcttcgaggtgctctcctgaggtgtctcagcagtgtttcaggaatcaattgtttggtgacacagctccgttccctcatagcccagtcgcgggcatcctccagacaggcagacgcatcaggaagcggacgccgaatcaggcacattctggaagttgtttccgctctgctggaacccatagatctagtgtggcgcctttacaatgatattgatgcagtctacgggaatgctacccagaagcaagtggcgtggaaagaacttgtctctcaactggcaactggcaggttactctcaatttcagcagaagctacttcactagctggggagtcagatcttccgaacaaaatttcttggcttggaaccggggcccagtatgcctcgtggttaggagccaacatttcccatatggcctccaagcttagcgttggcaacgaggaacaatggaaggcagtcgctcactcacaggaagggcactgagtcttgggtatactggtaattttgacttactatctgataaattctcattctaacatgttcctagggcctttggtgagagaaatatatcataatcttctagtcgagcaaacacacttggaaaagtacaccgcactatttgaccatcttcggtggacagagcaattaaccgtgttggacaccatattccgtgatatc

SEQ ID NO: 9267 - DNA, 980 bp, Emericella nidulans
tgttgttcatgcgaatttccttgaggattggtgtagagtctgcgaggctagtaagcagcgacgttccgactctggcgaaactagctctttctggagcctgccacgggagcaatgaatttgcgccactgttgaaagcgtctgcaacattcacggtgccgaacagctccaagcgcaacgctcgatatattgtgacagccgtggggccttccgttgcatggcatcacgtagccacggaagggggagatccggaacaagggcaaggctcagatagcctactgagaggcaatctaagcttgatggcgtcgtccccaagagatgtgtcttgtcatcaagcagttcctccagcggcacaaataactccccggtcaaagcttccagccggaattgatgctgctgtggcgtctttcctagcaggttggtaaccgtttcacggggccgagaaatgaggttctgagggatgcgaccagctgccacggcggccgagtgatctcgtttccgttgttcctctgttgcttccaagtctaatgaagacagtccgagcggctcagttcgagctttggccgtggcgtgcagctgcgggggtaggatccattggttcggccactggagaatcgcaccatacgccggggaggtgctgttgtagtagttttggctggtaacgtagagggagaggtcgaggagggcttgggcgtgggattccacgaaggaggagaagctgttgcctgatcgtcagtcgtgtgacctttctcgcttccaggtacctcaagggagattatacgcaacgctatcggctttttcaagagcgctcagatctcggtccagatcccaggcgccatttgagtattgccgtaggtagtcgacgatgttccggaaccggctaacccacgtcgagccattcttcagcgcgggaagctcgtctgcggggtagagcaaggatcgtttcagccagattgcagattaatcgagagacggaggaaagg

SEQ ID NO: 9268 - DNA, 125 bp, Emericella nidulans
taagtcgtgaccttcagatatcttgaacgtaagttctgggtttcacaatctagctgggatgcatatcctgtcgaccaagatccagctcagtgaataagataaaacttgcattacgtggagattca

SEQ ID NO: 9269 - DNA, 143 bp, Emericella nidulans
gaagtgtacaataaccccggaaggtcaatggtatcggagtggcaaagagtggcattcagcatgcgctaagcgatatcggcggccataacgcacggcatcaggactgacgagaagatgtagcacagcagagtagcaccgagttc

SEQ ID NO: 9270 - DNA, 148 bp, Emericella nidulans
ggtgtaccgtctccgagaaatcgcctacatgagctgagagcatgtcgacgactaccagttcatccagctgtgccgctacgtcgacactaatatcgtctgtgtgaaccttctggcgagtatcggtgtcgtcgagtcgaacgagctcgcg

SEQ ID NO: 9271 - DNA, 1177 bp, Emericella nidulans
ccagggccgatgaaccaacgaggatacaccaggtgaggatatcctggcacgccaagctgaccttggaccatcagctctgccgcatctggcatcgaggtgatggggcctggagctgcggtgctccttttgttcttgaagctgaatctaggtcgtggctctaccgtcgctcgagtctccgctaacttgtcctggagagtctttatagcctgcaaaaccatcagataccgtcccgaaaacacatatacgaggttgtgggcgtacttcagcatatatccgctgatcataagtaggaatgtaactggcggcatccctgacttcattggaaagtcgtgcaatccaggctaggcagtaatcagttgcgtccatccgctctcccccaaccagggaagtatccgcgagtttctccatctgttcctgcaaggctacaggaaagtaaagcacgaagtcagattgggctctgacagtgagtacataggaaggtcgatcagaccataccggtggtttcatgctggaaatagcggaagaaacgttctttcagcggtatatccgagttttgtattgtttggttctcggaaacggactgccgacgggcatgttcaaactcggctgccgacatgatagaaagggcacttgtggttaaaacgcttgttcatacagttgaagagatagcgtaaagaggagagtttaatcggagtgtggcttagaaaggtagcgatataggtattgatgacgtcgatccgaatggtgggtttcccgttggagctcaattgctccgcacgcagccagatatcaatcgccaaagaaaagggtttccaaagttgagaaaattctaggcagacgaagaagcaatagtaagccaaggattaaggaattaagatgaaaaataaaggtccatcttcaagactcaagagctcaccatctatactatttgacgaaccggcgcgcaggcagtggggaaggcaccaagcaagtggatacacctattcttgctgaagcttctagtagtagtcacttacctccagcaatacctctgcatgtcttgcgaaaaatccttgaaagtggtctgttgaactcctaagctcctgttgagtggctgttgtgaaggaatatggatgacgtcgatcgatcatcacgcaacgatggatgattcttgcggataattgtcggaatatctttt

SEQ ID NO: 9272 - DNA, 1093 bp, Emericella nidulans
gtcaaatgtcaacggccaacgtcagcgtggttcttatagaggaagaagaaagtagaaaagatatgaacacagccgcagacagcataaaaatcaggagtagaccacttacgcccgcaagcattacaaagcgtcttcggtccctccggccccttcctccactcaggcgagtctgatgtgccacagtccgcgcatttatattcagtcttcagccttttcctggactcattttctgggggcacacgctgttcccgtgatggtttggcgttagttgtcgtcgagtaatagagtcggccgtctctagtacccgtgcttatgccctgggctctttcgcccttggtgaaatgcagacctgtaagaagctcgacatcgttaaggtgggatacagatgtttcttcgccgccctgtttctgtccgcgggcagcccttgcctggccctggccaaacccaacgtccatatcattaaaattatccagcgtatctgaggactcattatcatccgccgcaccgctggatagcaacgacggatccagattcgaagcaaacgccttgtgcgtctgcggaataggccgttgagcatgtgaggacgggacttgcaatgaccttgtctgctgcgcggcggtttgaaggtcacgctcttcttcgcgtttcagctgcgcaatgcgttcttttaatctgacgttctcaagtttatgttcgaggaacgagtcgaggaggtgcctgctttcgttatggtacggccggcagacaaggaagacgccttgacagagtctctgctggtgctgttgctgctggtgctgttgctgttgttgctggtgctgcgactggttgaagtttgcagcgccagtggcgtcattgttgagctgctcaaaatgcgggtgcccatgcgcctctagtagacaggtcgaattatcagcctggtacatccggaagtgacaatgaaacggcctggccatggcgacagactcgtgcaactcgcgcgcgaagacgggcttgtcctcgtcgtggatgaagcgcgtgatgtaatcgtgctcaaggtggggcttgtcgaagcctgttattgctttacacgagggagagacaaaatgaactactc

SEQ ID NO: 9273 - DNA, 1417 bp, Emericella nidulans
  unsure (1)..(1417): unsure at all n locations
ttgcttcttcccgtgacgcttccccgcgctaaaggcagagtttactgctcggagtgcctcgagcgaggatgacaggtgtctgaccgtgtctgtccgcgtagtggggttaactgtcccgtcggtgtatacatgatcttcaaggactttttcaagtcgtcgaagtaagtcctgagtccgcggcagtacttggtcgttggtattagcaatcaggagaaaggccgacgcgatggttcgctgaacgctaatccatgtgcgcgatgcatacgggctgatcatgtgcaagtcgaggaacgcttcaaccgttcctaataaattcgtcaaacagtcatgccgtatgttcttgcgatcctcggcagacataattgcgtccgggtccaacgatgggcggcataatagagagatatagtacgaagagtgcaaccttaactccgcccactcaatgctgtccgccaacttggtgcaacgcccctggtcccgcaggtgcgcagcagcctccccaagaatatcgcggattcgttgcacgtacatgccaatctcttttggctgcaggtaggactgcttcgtcatcatcaaaacacgcagcgtctcaagcacaacgcccaggatgcgagaaagtgtttcgaaataagatcgatgaccgggcattgatttacggtgatatggaatatctggctggctgatcattgtgatcgaaggtcgatcataggccaaggagaaatgactattttgaaatgccatggcccacctgttcgagcaaaaggccatcgtcagtatctagtcgtccatggggacaagaaacctggtacgtaccacacccgcctccgggcttcttgcagggctgacggataaccgggtgcctcggcatggagcccaaggaccatgcacatacgttctgtcatgcctataacaatgtcgtcagcttttgtgggacaagtgctacacgcaatcacacacctagcagcgtatacgaagcaccggcgttcatattataggaaaggacactgctgataatcaacagaatctgaataacttccaccgtgggctgcgatacataattcagcatgcgcaggcactggtatgagcaggaaactaaggaccgttaacgccaaatgaccacgaaaatttccctatagggacagctcactatagatccaggacgtcatctctctttgaattcccggcaggtcgcacagctgacatcctgacgcgaaaactgcgaaacagaggctcaagaacgctatactcataccgaaaggcttcaacaggcgatccccgtccggcttatacaccccgncttgccgtcgncgtcccttcaagcaaccgtttaagtcgttctcaaaccgatctatatctggaaggactggtatagcacagccgcgatgctctggaaaaaccgaaaaactgcggagtagacaaa

SEQ ID NO: 9274 - DNA, 139 bp, Emericella nidulans
ttccatcatctctgtagtgtttccgcatcgtcctatctgctagcatcaaggctttgctatgtcacattgtactccagtactttgtgccttggatggcaatggaattgctgaataaggcggaaattaagtggtcgtcgga

SEQ ID NO: 9275 - DNA, 579 bp, Emericella nidulans
aagacacaaaccagtttatccggtaagacttggtgcagttttgatctgaaggatattggttctaacatcgtcttatagcaaaactctccagcagcagggttatattcttcaggatgactggaaccgccagtataatgacctagctgagcacggtcgattcctacttcgtgatcgatacagggaccacaccaaccgtgtgcttgatgagatcaagttccttggtgatcaattcaaccaggaccgccaaaatcgcgcgttcggtgacgccgtcgaaaaattgtttatagaccttggccgcgatgagaatgggaaccctaagttcaagaagcacctcgtgaaggatatcaccgacgtcattcttccagcaatctttgagaacgtccgctatgttcctatccctcgtattgaggtgcaggatgccatggccgatgttgtcatcgaaaacctggtgattgaaagcgacaatcttatgccgaatgttgttgagttcggaagtgacaattactaccgctggggaaggaagaagattagcagcaagagagacaacaagatcatgatctctgtgtctggtatccaagc

SEQ ID NO: 9276 - DNA, 429 bp, Emericella nidulans
  unsure (1)..(429): unsure at all n locations
agcgnancgagaccgacgaccgggaggcgatagcaggagggggccgagacagcccgccacgacacgcaagaatgggacgacggagacccaagaagagaagcacgagcagggagaagagaagagcaaaaccaaccagtggagaaagggcccacggaccgaacgcaaggcacgagcgagaggcgcgaaaaaaaaaggaccagggggtggacggaggaggagcaaggagacccgacaatgaacgccgaacgcaggcaaggcagagaacaggaacagcgaccaagagaaagagcccaagcgaccgacagggcggaaacggacagcctgaaaatccaacgaagggaaccaaagaccggagacaacacgagacgaggagaacagaacggagctctgagtgggaacagcccaccgagcaacgagaggaagagaaaa

SEQ ID NO: 9277 - DNA, 630 bp, Emericella nidulans
gtcgtcgtcgtcggagctcacatcggcatactttcgcttatgtaccgtggagtccatgatgggactatgaacaagaaataaggggtggatgggcgaaaaacaaatgattgattgttgtatagctgtggccagtgtctggacaaagaaattcggggcggtaaaacgccgctccgagatggacggagcatgacggagctctaagataaatgacgtctacctctccgcttcctcttttctctctcttctctcttcagagtcttcgtcgattgagtgacctcttgtaatattcataacccagtctgtaaccatggcctctcttatccgcacttccctccgcactggcctgcgcgccagctcttcctcggctgcgcccttgacctttacccgcggcaaggctacgctgcccgatcttgcttgtatgtgcctctgccagagcccttgatatacggtcagatagcttatttgaatctcactgaatagacgactatggcgctttggagcccgctatctccggcaagatcatggagctgcaccacaagaaccaccaccagacctacgtcaacagctacaacaccgccatcgagcagctccaggaagcccaggcaagcaacaacattgccgctcagattg

SEQ ID NO: 9278 - DNA, 1359 bp, Emericella nidulans
  unsure (1)..(1359): unsure at all n locations
cgtggacattgacaagaccaccattatcaagcctgaccataagcaccaccaccgccgcggcgacaacttccccgaagtgcctcataagcccaccgtgatcggcggcgcttctggtgatgacatcggcaacgtcgcagacattccaacagtaaacgagttcgcgtcgtctgtaacagagtcgtacgtcgacaaccactcggtcgacgtcgacaagaacaccattgtcaagccgcactgggcgtcgccagcactccgtcatcgacgggcccagtggcgacgatgtcggcaacgccgccttcctcgccgacgtgaacaagatctcctcttccttcacaggaaagtataaggacgaccactccgttgacgtcgacaagacgacgattgtcaagccaggcagccaccacggctaccagggccaggagaaaggtgaggagaaagggcacgagaaagggcacgagaaaggcgacgagtatgaccaggaaaaaggccaggagaaaggcgacgagtatgaccaggagaaaggccaggagaaaggcgacgagtatgatcaggagaaaggccagaagaaaggcgacgagtatggacaggagaaaggcgaggggactggccaggagtatggcagaggcttccaccacccgcccaacaagcgcgaggcccgcggacacccctccactgccattggaggccccagcggcaatgacatcggtaacgtcgtcgacatccccactgtgaacagtttcacgaccaagttcaacggtcattacaccgacgaccactctgtcgacgttgacaaggcctttatcgacaagccccataaggcccgcgccctgcgtccaggacaagaggacgaacacggaaagaacgacgaagatgttaccgatattggcggccctaacgggaaggatgtcggcaatggattcggggccgacaacggaacgcggtggacacagagactaacgagtccgacaacgatgaccactgggcgaggttgagagaccgagatcattaagctgtgatggcagatccatacatcagtcggagccgaggacacgcactgtcatactcagcgcgaggagccggactttaactgtaacagactcactcaagctgccctaagtcaagncatgagtgtccacaggcaaattgccgttcaattccccactttggcaccccccttaggaggctttaaacattttgggaaacccgccagaggaagggtttcccttcagggagggaaaaaccaaggccctggtaaatatgagactcccaaaacaaaatcttttttagggaaaaaaaaacttgtggggtttccccacttataagaaaggggtgtgtnnttaaaaaaaatcaaatgagggt

SEQ ID NO: 9279 - DNA, 822 bp, Emericella nidulans
ctatggcacttaattaggcggaagatggtaggttatagggactttcatggcactgtatctagctttcagattttgtgatcaggtagctttgttcttcgtaattatcctttaaacagtatcaacccgttaggactcagattgactaaatattggatacgtccaataccttggcgctgtctcctcctgtgagctccacccttggaccatgactactctttatgctagttggacgtagctgtttgtaataagggttaggcaagtcaatagaaatgcagagcttaccacggcgtcactggggctaggaagatatgggagatcaaccttccctgaaaaaggtctagagaaagctttcacgtcattaactgagtcactgtccccccatcccacaggtttgcaccagtaagatagatcatacaagcattcgctatatactttgccaattcgctggcagtaacgaaacctcccacttgagaaaatagttccacaacctttgtcggcaccgagcattccccattgtccgacatggcgaggaggaggcgagtatatttgcttgcaattatcatggtaagcccgatccgcgcgggactctccaaatctcagggcattaatagtaagtggtagggtggtcgtatggcctgaatgggaagctcgcgaaagcacctcgattcgaccaagtgccgggtttcaacaaagaagaaaacggttttgctcccggtccacacacatgtcgataggccgggtttcatctgggtgaacctggaagccagcgagacgcccacagtcccgtgggacgaggatttccttgcctcggacgagcaggag

SEQ ID NO: 9280 - DNA, 133 bp, Emericella nidulans
gtttgaagaggattggcgagttcgaaggaacgggctgtacataacgggagtgatcgtagttgagagatgcggttcaagaatgtctgtgttacttgatattgtagtagaatattcgctagcaggcagaaacgta

SEQ ID NO: 9281 - DNA, 118 bp, Emericella nidulans
gggcagctttggggcgtactgacttgggctctcccgtcagcggcgagggggcccgccacggggcgatcccggtcaactggcaccacgcgtctgacgccggccccgaggtacagggccc

SEQ ID NO: 9282 - DNA, 1041 bp, Emericella nidulans
aagcaaaaagagaagcttgctttgagtgtgaagatctaaatcacgaagtcaatagagagcacaaagctagccgcaatgcagagagggctgcctcaacagcatctattcagctagctgaagccaacagaaatttggagaccgagaggcaactcagaactcaggcacaagcgaacacgcgaaagctgcagagcgcattagattcttcgaataaagaaatcgacgacctgcaccgccagctcatgctgttccataagatcgtggagccagaagctgatccttcggctgattcttgggataagattcaaccagacctgtccaggaaggtcgacttagctcagctggtagagaccttgcaaagccaactgcaagtgtccgaggaaaaatacaaccgagctgaagctcaactcgcagaaatgcgccgtcggcatggggaggaaatgaaagaacttgacgcccgttactcttcgtccaaacgtgcattgttggaagaaattgatcagaacgaggttgctcacaatcgcacccctaaccatcttcggaagaactctgaaaccgcaattgcgaagaagtttggagccccgacgacgcctaatcgtcgactaaacatcaacgacaactcaaatgactccgctcggtcagacagaactgtggacactgttggctaccagaaacgcatggaccttgcggctgagattgaggagcttcagaacaagcttcagatgagcgaaatgcagaacaagcatctgcaggatcaactcgctcgatctgtccctcccaaagatatatggcaggatgacagtccctcaatcagacgcatgcaacttctagagcgagaaaatggtcgtctacatgagcagctcgacgattcttccaagaaagtatcggcccttgagagaagcatacactctggcgagctgtcactacgggatgttcaagctaaatcccacgaagagctgtacgacttgatcaactctcaggagcagtccagaaggtctttactccgggttcacaatgaaacggttgcggagattaccgatgccc

SEQ ID NO: 9283 - DNA, 1353 bp, Emericella nidulans
tgattgtgtggaggctagcatgactctgcttcgtatgtgtactgtagccttccgatattgttgtactggctgatctggacttggacggtcagtcagcttagcagccgggtctctatcgcgctgggagttgtgccatttaaccagaagactaggcaaagccaaaaccaggaacgataccgttgggccatatgatgggccaacatcgccgaggttaatgacgggatccttttcctcggatgggaaagcctgataccagaaaagttggggtaagctccctcctgagcatcttctccaatgccctgataagctagcttcttggatagggccaagacagtggcgtcgataagcagtcacagggacagccggacggctccctcgtataaagaataaggacaacccccaagctttgggtatctctgtttagagaaaataaattcatgatgctctccaaaattgccgcttacatcagaggccacgaaacggtgcctggagaggccaagctcctgcgcaagctcgatgcagtgatcctcagcttctgctgtctctgttatttcgtgaactatcttgatcgcaccaacctgaataatgcctacgtctcagggatgcgggaggagctcgatttccaaggaaatcagctaaatcagatcaacaccatcttcaccgtcggttatatcgtaggccaggtcccgtcaaatctcgccctgaccttcatcagtcctcgactgttcttccctgccgttatggtcatctggggcggattgactatgatcacggcagcggtctccaatccgcaaggtataatggcgatccggtttttcctggggctggcagagtctagcacctttgtcggcacccattacatcctgggttcctggtatacggagaaagagctggggaagcgcagcggcatcttcaccgcgtcgggcctagcaggtatgagacaaacgactccgtctgtaccgcttgggaaagagtttgagtttgaccccgactctagggacaatgtttggagggttcattcagacggggatccattcatctatggacggaatgcaagggctgtccggatggcgatggttgttcattgtaagctccggcgcccggccaatgcatgcaagaagctaatatagatgtagattgacggcctgataaccatcccaattgccatatacggcttcattgttttccccgacacgcccaccacgacgaaagcacggtatctcactgcagaggagaaagctctcgccatagcacgaatccctgagtctggaacagtcaaggtacctctgaactgggctttcctgaagagcgtgtttctccagtggtactggtgggcctttgtagtactgtgga

SEQ ID NO: 9284 - DNA, 1056 bp, Emericella nidulans
gaccgctgtagtgctaggcacaggcgtatacagggttttatctcttttctacagtagggcattaggtgagagacaggggtgtgcctacctatcattttacgcccagtaattctttacgcctcaggacaacttgcgccactctgacatcatggagcgggttacttattccacgaggctcacttcggcattttgtaagcttgctactacgtagtgcgcagagccgcacgcgacggagtccacagtgctatactagtgtaccctacttcggtacaatgtaaatcggcactagccgccactacgctgcagtaggggaaataccggtaccatcaaccttagaatgtggcgttggtaggttatgcgtggtggatttaattcaactatggagtcagagtgggcagtgtcagcaggagatagagccgtgtttggccaattgaagatgaaatatatatcgagattgtcatactagaactgggatattagagaacatgctgggaagattgaaggggagggttgcctcaatttgtccagagttacaataatggccctcaagaggccaagcacttcaggatattggctattcttcatcgcttgactcgatggtcaaacaaaagagtcgtgattatacgagaatggctaccgccgattaattaggtcagtttatgttcgcgtatattatatcattatttttagctaaccagttcctggctcctccactatatatctatatgtaaacttgtaagcatcgaccttggttacgagatactacactgtcagtatgtccaataatgacttctaggctgactactaggcaagaatccgaattggaaaaatagctagtcccctatattccaacattgccgggcttacggccactctattgagagatatttacctctgacgctaagcgaagtgcgaacgaatcacagactaggtatagtctcggagtctgggttgaatggtataagagagaatgaaggcttgttgcgatatatagatgaccccctggacagaccaattaaaagagacatatcaggtgcttgctttggatcgccacgt

SEQ ID NO: 9285 - DNA, 565 bp, Emericella nidulans
tggttgttctcgtctaggactggatctaggtcagcaggagcttcctctgggctcggttctggttcgggttcaggcactggttcaggctccaactcaggcgccggatcaggcttcgctttgggtggaggctcaagaggaaaatcgcgcccaggcagggggaggtttttcttagtcaacgctctctcgcgtttctttctttctttagaggaaagattcaaccaattgtcatacagaggatcgtctggaaaatcaggtttccactcttctggttccgactccggctgaggctcgggttctggctctggttcaggttcaggctcggctggagggggcgtaggctcacgaggtggctctggggctggctctggtatcagtgcagccttgcccttcttctttttctttttgtcagtagcggtggcaaagcccagcctgaaccccagccatcattcttctccgcttcttctttagctttacgttcctcttcctcccttgctttccgctcttcctcctctttcgctaatcgttcctcttcctcttgccttagtcgttcttcctcttctagtct

SEQ ID NO: 9286 - DNA, 643 bp, Emericella nidulans
ttcagggtttacagacttaatgacgatgtcctcggggagagtttgggcgtgggtagtgggtatttggtgcatgggcttgttttaaaagattaagatacccgtaattcatcaagtatatgatgcattatctttcggacagcagagcatcgctcagttacagcatggaacggaatgggcgtctataaacattatttattaaagatggaagctacttaggagatccacctggtataccgtaacaatagggtatgtactatcgacacagaagcccagcatgctcacgctccgttcaactcagcccagcaagataatgcaaagtcgacaacaatgcaacgcaacgcaatgcaaccgtcaagttagacaaacaggtgtttcacgtatgtatgtatagatagtgccgtatgtgggtgtagcaagatcaaacttgaaccgtgttcatttcgcctctgtgttttccttattttcgcccagctcgcctttgagcttcagctctcgcgcttttagctctgcttcttccggcgtcgtgggctccattttcgagatggtgttgtagaggggagggaagggggagtgatcgtgttcccggagcaaggtcccgtttcaggctcacggtcaatgatggaagaaatcgactgccgcgtgg

SEQ ID NO: 9287 - DNA, 653 bp, Emericella nidulans
agccacccttcttgcagacaccgccctcacgtccgcttcgacaattgtcgagttgggatgcgggatatccgcccttacagcgcttgcgctctcgcctctccttgaacctgaaagcaacggggatgggcattatatcgccaccgaccaggaatatgttcatcggctcttccggcagaatttgcagagtaatcctccaaaacctcaacggacccaggcttcatcgaatcaaggtaggaaggggaagagaggacagaaggcttcagcgtcatcgtcaattcagggcgataccgcccactcgcattcgaacatcacgttcacggccctggattgggagaccgatcacccagagacactgaaggcgcaggttgtccgggagggaggacaacaggaggaaacggacgatcctggctttgacctcctactctcctgcgactgtatctataacgaagcactgattgccccgtatgtgcgcacgtgtgccgagattgcgcggctaagaccttctccgtcaacgtccacggggattgggactggcgcggaagccaacggtatgcgtcgtcgcacagcagcagcgttcacctgatgtgtttgaggcgtggctgcgggagaacgatgcggattttcagggtatacagaattcaagacgatgtccc

SEQ ID NO: 9288 - DNA, 1028 bp, Emericella nidulans
  unsure (1)..(1028): unsure at all n locations
gttgcaactcttcaatccatgccgtaattcgataatcgcatcctcctgaagcagcgggctggtaaagagactgaattcgatgacgagctcaaaagcggacagtgtctcgactcggaagaggtccaacttctccacgcgcaccgcaccggaagatgagtctagattagaccccagcgaacctgcaaatgcttcagaggaaactgcaccactgctgcactggcctgctggacaagctcaaacgtatgggtccatgaatcctccgaactccgaaatacccattcgatatcgctcttcgcattcgaaatttgcagaatatttctcgagctggtggaagaagtcagagaacgatgatgtgctaccaaataccgcgcttgatgcagggccgctccaggacgcaagcgttgatcagaaagggagaagtggggagagataccgtacgtcggagccttcagagaagttttcaaccttctctggagtctttgtgccgaccagcctgaatgtactgagtattctcatgtttcttcgctttgggttcattctcggacaggcaggtctattgggaatgctaggtagcctgttgccctataccttctagatcaggactattgctgattatattattcaggactacttgcgatatcgtacacaatcaacctagtcaccacaatgtctttgtcggctattgcaacaaatggcacggtcaaaggaggaggagcatactatctgatctcgcgctcgttaggaccagagtttggtggctctatcggcatagtattctatctgggctcagttctgaatacaggaatgaatgctgtgggactaatcgactgctttaaacaaaactttggggctgagactggcacctggtacaacttcctccgggaggggttttggtggcagtatttatggngaaccattattttgcttggttgcaccgggatttgcttagccggtagtgctctctttgctcgagcaagcaatgtttgcttgtcattcttctaatcgcgacactcagtataccattatct

SEQ ID NO: 9289 - DNA, 1083 bp, Emericella nidulans
cgagcccaggtaagcccagggagagtcccaaaatgtcaagtaatttccagcaaaaattctaccaaaacacatctttgagaaccgcccggcgtacaactgggaagctgttagcccaggcatgccgcactaaggtaggacactgtctgtggaatggagcttttccgccgggtgtgtttgttttgagcagattcctcaggttcccccaacactagatggtatcgcgagcaagaatgccgttcccgcccaaacatgaacatcaattcctacgcggagatgatatggcggtgtatccgttgctgttgataacgtctattggaacaccaaatgctgcggcttcgttatccagagaaaatgcgatcatttgtggtgctataaatgtcctggggccttcagcaatcacatattgcccaacaaccccaatagacaagaatccttctcttgatgaaagtgttgattagcctgcgagcaaaggggcggataagtccagattccttgagccaagggcgaaggggtgttatctagatctgatcaacatactcgccaacccgaacattccaactataggtggccttggctattacccaatagctctggcttctatttttactgactacttgcaccgggtggacacacactctggtaacaggatgtcgccgttgaatgaacatgcaatcaccaatgttcctgcccaatctctacatcatcaacgtcgaccccatccacaaaccatcgtccttcgccgttcccatcaggacctagtaaaatgtcattgccgctcatcatgcgtttgcacatctttcccgattctctgtcgaaggtccagtcttcgaggccgtaacaccgcttccaccgcatggaatcattggcatcttgaaactcataccagaactgaacggcgatgcggttatcagtaaatgagaaaagctcttttcgcagcctgtaaatttcgctcgcgcttccatttcgctgttaagaagtcgacaattgcctttgtaccagagaagaacgaatgcgggttgcgccagatgcagcccggtgtatacgcctgggaaacacgtacggggtctctggtcttaagtcagt

SEQ ID NO: 9290 - DNA, 1680 bp, Emericella nidulans
cgcggaggcgaagatattcggtaaggacgtgctgtcaatcgtggtgatgtcggcgcggattgggttcggcattttggtatggtcacagttcagttcaactctatcaatattctgatgatcaaagattatcagaagaagatcgtaagatccggcatgtgggataaatatttgcattcccctctttggaatgcatatcgcgcgattcaggtttactcctctccccgacgtggagccgattcgggacccgagccctcactccgaggcagaatgcactcggaacggcagcaagtcgattcaacaaaggtctcttaaataatccttcgtgcaggtaacatagccactacagctcagttcacatcctcctcattatcacagagcgcttctgaactgtactactaggatgggtagtgccgtagaaaccgagcaaggcctccacgtcctaattgcaggcgctggaattggcggcctttcagctgctatagcattacgacagcaaggacaccgcgtcgaggtatgtctcgtgagttgtcagcaggaacatccagcttagcacgccagatgaacagctcttcgagcgctcccgcttcgccaacgagatcggagccgcaatccaccttacacccaatgcgaatgccgcgcttctaaagctcggaattaatgcgacgacactcggtgctgtggagtctgaaaaggttcgtgaaagcgttgactgaaaggttgctagtgtgctgacgcactgcgacagctccgtgtcttccctccaaacgggccggagatattctcgttggacatcaagaagactgctggtttctggaggcatgtaagttgcacgttccataattctatgcatcaataatgacccttcagcgctggcttctcgtccaccgggcgcatctccatgagggcctgaaaattgctgctcaagctcccggccctggagtgcctgccaaactacacacctccaacaaggtagtagacattgatccccacagcgcaactatcaccctcgaaaacggagaaaaggtaactggcgatattgttctcggcgcagacggcgtacactcggtcgcaaagacgaaactttctggtggaaagaatataaaaaccttcagctcaggaaagaatgccttccggttcttgatttctcggaaggatgcactggatgaccccgagacaaaagaactcgtgaatgagccgggaacatggtacatgtttgacagccccgaccttcgcgttgttgtgtaccctgtgccaacaatgatctgctgaatttcgtgtgcatccatccggagtccttgtccaagatccacgatggttctgagtgggatcagggtgcaagcaaggaatcattgctggaggtgtacaaggatttcagcccacaggtccgcagattgctagcgaaagctgacccaaccacgttgaaggtgtggccgttgcttgacaccgatgacctgcctacgtgggtggaagaccgacttgcggtcatgggcgatgctgcacatcctttcctgccgtaccgtgcgtcaggcggcgcaatggctattgaggacgcggtctcattgggcgttatgcttcacaagggtgtgtctgtgggaagtatttctgagcggctgaagctatatgaaaaagcccgccgtacccgcgcaacgacaattcagcagttgacacgaaagagctccc

SEQ ID NO: 9291 - DNA, 627 bp, Emericella nidulans
cactgaagctttgctcgaagggatgatccagatcatgcagcaacgacatatccagggaaatgtacatcgagctcctccacttgttgacaacctgattcatcttcttcaaaaactgggagatgccagcggatggcttggcatacccatgcagtctaatcttttggcggaaaataattacccacgggtgcgtcctcagttggtacctcctatattgactagcgtgacatagaatcggcttgatcctgccagacaacaaggtgaccaaatgtagactttttgcttcatcaacctctgcagcacctagtaaatgccccccaagtggcgtcaaagcggagtcgaatggctccctcaattctcagaagccaatgtggatatgccattgtccaatatagaaagcaatggcttctctgatacatatgatcctgacgccccgctaacaagctttaaagtgacaaattttaaggatcagtgggggagtaactatttggccagtttagtctcaaaatctgctgagttaagttcttgatgaagaaaggtgcagaaatacctgcagcatgagggtgggacgagttggaatcgaccgcaatgaaaatcccggtgatataggcccaatacttatacttgctc

SEQ ID NO: 9292 - DNA, 675 bp, Emericella nidulans
gctgattgggtctcgccccatcggcgtttctggcccagcttgagctgcgattcagtcctgcgcagctgaatgtcaatctcctcgcgctcttctgcacgcaggtattcctcaggtcggatgatctctccatattcgtcgccctttttcctcggcgctacgtatggaaacattcgctcccgacccttcttgccacggacgtcgtagtcatagacattctttcgccgaaggaggacgttaacaccgaggtcttcgtcagatagtccgagtttattgcggtttgaatgagccagagatgtcgaaaagttcaagactcgtccctgctgttcagaatctgattcctcggatgaagtgctagaacgatcgtccagagcgtcggcggcagtatcaaggttttcttggcccctcgcttgtgctgtatcttgaaattgccgcttggtggcaaggtattgttgatatagtcgctgttctccagcctcgagcggcgcgcgctgtatatctgtccatgacagctcccttccgccgctgtgaacctgttcaagcatctcaccgtcggagcccttttctagggcgactccatcttgtcgttcctcataccattgccaaatcatgctgccgagagtccttcgatgagaatcggtgtgtttgtcggagaacttgctataatgcagtggatcc

SEQ ID NO: 9293 - DNA, 154 bp, Emericella nidulans
cattaccatccaacacaaactctccaaataaaaacatctctctactccacttataccttatatttcctatacacttcatatcacatttcatatttcaattatcaataatctcatcacacatattaaactataattatacaaaaactctccattt

SEQ ID NO: 9294 - DNA, 1293 bp, Emericella nidulans
cactggcaatcccagggtaacttcgtttgcgttaaggtggatcgtcactcaaagtctaagaagtctatggccaccaacctcgaaattttccgcgtacgggagaagggtgtcccggttgaagtggtagacagtctcaaggacaccgtgatcaacttctcgtgggaacccaacggtgctcgcttcgttctcatcacgactggtgacgcatctggggctggtgcgcctcccaagacggccgtctcgttcttcgctccggaaaagaaaggtgtacaagccggcaactttaaacttgttcgcactattgagaagaagaccagcaatgctatttactggtctcctaagggccgtttcgtcgtggtggcgactgttcactcgcaatcaaactttgaccttgatttctgggatatggatttcgagggtgagaagaacgataacgagaaggatctagcggccaacctgcagctgatgaagaccgtcgaccactatggtgtcacagatattgaatgggatcccacaggtcgttacgttgtcagtggtgctagcgcgtggacgcaccaggtatgtctcgcaaaatgggttcctcatccagctaggttactaacactaatctttagatggaaaacggattcaaccttcacaccttctccggagagactcttgcggagaaccctacggacaagttcaagcagttcctctggcgtcctcgccctcctactcttctcagcaaagaagagcaaaagcaagtacggaagaacctccgcgagtactcgaaggaattcgaggaggaagacaagtatgctgtcgacattgccaacaccgccgttgtcgagaagcgcaagcgtgtccttaacgagtgggttgcttggctcaagcgcgagaaggagctactcacccaggggcatgaagccttccgcctaacccgaaaaaacctgccctacccaaggctggccaggattgctcccaccaacacagaggacatgggccagaccggtggccaattagatgcggcataaattgttgtggaaacctatgaaattttgagtgatctccctttttattctttctaatcaattacatcaacctgcctttttctataacggtctcgcctcaaattagtgcctccccttttccctttgatgcccccacttttcttctttaatgcacatgcctcatatgtctttttttatttgcgtgtcccttatcatctattatatttattccattcatctgttgtcactttatctatatgagttattctttgctaatatctcttccattatactatctgtcgat

SEQ ID NO: 9295 - DNA, 851 bp, Emericella nidulans
ccttcccccaaaaatttgggctttccccatgtgaattctctagcaggactgaaaatttttcgaaatgcgcagtatgatactttaggggttcttcatcccgttctcgcgccagaagaccagttgccaagcgagtctcccggcaacttgcgtttcacggagtattgcacaaccctccattcagaatcgtcttcatcgcgggtgctggcgattttctgcttgtccaaatccgccagcagcttcacagttgggcgcgttttggccaaagcacgcttaaaatcctctgcaatgttgttccaaatcttctgtaatgggtattccctggacccaccgtcaatctggctgtggattctctcttcgaaggtgtgaagctttttgcacagtataaagggaacattggcagacggcggagcagggagcctggagagctcctcatcgatacggtaggctctcttgttgatctcctcgatgatcagcggaaggcatccctggatttgttggaataggagtttggacaacgctgtctgtagatttcgggttccaaatctgtcaccatacgccgcaagctcactcacccaagggggggacgtgaagaaatcgtcttcctcctgcctggcgatcgaatgctcgactgatgggtcagggttgtttctaacaacatagtaatcatgctcaaggcggaatttcaccccttcgagtatttcaatccactgcgtgtaagaatccccagcctggacacggtcaggcttggtgagcacgcccaaagctctcttcttcgcgccccggatgtcgttcataatacgagccgcactgctattcattacgtcgtctgtcatggggatggtaagaaggat

SEQ ID NO: 9296 - DNA, 1470 bp, Emericella nidulans
tcttgatgatcttctggaatccagtatagttcagctgcgtgaattttgcaaggtcatgaacgtcggcgatgatatcactcaaaagttgttcgagcatgagaaactcttcatcagagggaggattcacgctcgaccggccattgttgcgggcttcattgctgttgttcaagcgggtcaccacgtcgtcgacatccttttcactctcttggatacgccggacgatctctgcgctcttgaatttctgaaaattaaagaccttgtctagttcgctttcgagtagtgtcacgaagtgtcgctcatcgtcctctgtccaagccttccggtcgggttttgcgttttcaggggtgggttcagtgacgtaaccagttttaagagccttctttaaaccttcataattgatgtagttccagtagtactctttgatcatagacgagcgaagatgctcgccaaacctgatggagacgagctgaatgtcagtaagctgcgtctcggagaataggcagggatccgtgggatcctgatttacctcatggtgtgcggtgcgacctatggcagcgcgcaggaacagcgccggctgaacaaactaatcaaaagcgtagctggaggtgcagctagatcagcaattgagagctcgttggggtcggacttggtcgcgaaggaaggtgagaaaatacagagaaaagaaaggcaggtatgcagatatttcaattctcgcgccctggactattggatgagagtgtagaacattaaacagggccgcgagtggcgggggttatcatagctagtcggtagtgtcaccatttgtctggagctctgaggtctggagagtggaaactgactggagcttgacggcctgaagctgcagtgggacttgcgccggttcaggtctggcacgtgcctgcactccatcgacatcattactcgctttaactctcagtttccctatatgaacacgggtttctgacaataagctctaatttggtttggatttgccagccccttgaccagccgatcacctcatgcgagatgcagccttatcgagcaaccagcaacggatggtcgccagcgtcaagctagaaggttgaagacccagagtactcgagtctccaagaaagcctactaaccagtctagtctggcagtgcatttgcatccgcacgaaagactgtgcaggagaatcactctcagccactcaattgagcacctgctctctttagtggctttcattgtatacgctaacccacttctagcctagtcaaagccgcagcctgccagtacacaatactctacagagttaggatcaaggacagtatattcctagcaaccgcgactctagcaagccaaccaatagggttcagggtcagaatgtcactccccgtgctgagtcccgacatccagaattcacgtacgtggaccggcttgaggtttttttttcccccctctgaggctgaagcggctcgcggatggcccat

SEQ ID NO: 9297 - DNA, 1489 bp, Emericella nidulans
  unsure (1)..(1489): unsure at all n locations
aaaaactaccgggttcgaggctccaaaaaaccctccagttctcgcaaaataaacatcattgccacctcgccggtcaaaaaaaataccttggcgccctgcagaccattctccgtaatctccgcctcatgtatgtccacgcctaccagtccctcgtctggaaccttgctgttggcgagcgctggcgcctgtacggcgaccgcgttgtagaaggcgatcttgtcctcatccacgaacaccgcgacaaagacggcaactcttcctataccacacccgcccccggtgcaggagctagcggcgaaaccactacaattgacgcagacggcgaaatcattatcgtcccgcaagaacacgactcagcctttgccgtcgaagacacattcacccgcgcccgagccctaaccgccgccgaagcgaacagcggcctctacagcatcttcgatatcgtcctacctctccctggcttcgacgtcctatacccgccaaacaaaatgacggacttctataaagagttcatgggtagctcccgcggcggcggattggatcccttcaacatgcggagaaagtggaaggacgcgagtttaagcgggagttatcgaaaagttcttagtcggatgggcagggactactctgttgatgtggtgctttatagcagggatgaggagcagtttgtccggactgatctagagaatttgaccctcaagacgagggatggaggggatgtggatttggagaagaaagaggggaagagtgaaggggataagcttgctgttgtcctcaagttccagcttggatcgagccagtatgcaaccatggcgttgagagagttgatgaggggaaaggtgaaggcgtataagccagactttggaggtgggcggtagactgtcgtagccgccgtcgtgaaccactcagctcatacggtgtgtatacaaagctacgaccttataggtctatacattcttcatctaaaacaaccaaatccgtacactcaactttctgactggatatagagcaagattatgaacattaaatagacactatatgatctcgagaaacccttgaacaaataatcaggattagaacgctgagagttgactagaggccgggtaggtaactaactcccccgatgcgcggcctgtcgatgctcatggtcatcggcaccgaaactggacatagacgagatatcatcatcatcatcatcatcatcatcatcccggagccctctatctctcactacacgttcgcgatcgttgatctccgacactacagacatattgtcgtcattgtcatttggacggtcaaatggtganaccggccgtgccgctgcttctctagcgcgctcttcggatgttcgccagttgagatctcggtctgttactgcaactccagctccggctgcagcacctgctaccggggccgccgatgatgtgctgtctactcctgtccccggctcggtccctggtggacggagataaggtggaggcggaggtag

SEQ ID NO: 9298 - DNA, 110 bp, Emericella nidulans
tgaagggctttacacataaacttgatccagtgcgtctagagcaacccgcattcgtcctggtcgtctttctcttcgctatactcgtgtcccgtccgctctgcgcattcctg

SEQ ID NO: 9299 - DNA, 776 bp, Emericella nidulans
gctacgagaattcgagtccaatactatgccaacactgatgatgaccaaaaggttagcctggccaatcttgcaaagcttttacctttgcagcaagggaggacatagacgatgaaaatgtcaaggcagccattcagcaatggatgcagacctagtggccttgacctgcgagtcgcgcattctgcaacccccaccgactctgaggtctcgggaaccaacgcatccacacacaaagaccgcatatgcaagttcttacccagttctcagtcaagagaagctcttagcgatgtgacccacaccaacagggtgcttaaagaaaccctagaaggcaatcagaaaccgaccaccaacagcaacaagggttacatatacatcataactgccccgattgcaacagggttcgcgctaatccagcgctgttcaaagggatctgactcactccgcaatcagaagtgctacccaggctcgcaactacactgctgcatccgttgtcccgatgcataattgtggagaaactccttctgctcgaattcgccgtcatgtctcgggttcataagtgcgaggagagaagctgccagaagactcataaaaatggattgaggctgctgcagagcggctggaggagagcgttagggcatgggcgaagtttgtggagatttgctacacggacgataccatgcttactgctatgcaagacaaccttcgtggagaaactttctcccaagaggaggacagacagttagaatgggctaaagaagactgtggaattactgaaggtt

SEQ ID NO: 9300 - DNA, 862 bp, Emericella nidulans
  unsure (1)..(862): unsure at all n locations
atatttgtcgacgcggccggcttttgtgtagatggtttcccataagtcggcatcgaggatgtgcagttcgtcgggggcgatgcggacgacagggcctgccacagacaggaagaatacattagaaatggaggggacccaataatcaaacatgaagcgtaccgtatttcttatgctgttcctcgatccagaagatcaacttccccgacaagtagatgtcatagtaggcttcatgccagcgacctagggctgcgtattttgggcctggaaacttggccagcgggtgcaggaacaatcggtagatgcccagtcccagcaagtaaactgaagttaccagtccaattatgacggcataagacgaaaatagatagctccatagaatagccatcatgactggggaggtccagtactgtgtcagaaaaatcaccccataaggcagacctttttcgaggtccagacgactttccccatgcagacaggctgccaccgtacctttatgcggcaccgacagtcaggatcggcatttttcaatgggctggacttgccttgttgcccagctggtgacactctttacccaacaagggaattgtcatattttagcgttgcgttcagccgtcgcgcggcggagccgtcggccatggcagtgcccccagcatgcaatcagatccaggctagaataatgccggaacgatggtcncgcttaacctcgaaaacgatacggntaatcccgtcccccgctgcgagtagtggagtgctaccacgtttttggaggagtgcagcttgtataagtcagtcgtgtggtagggcacgacaacccctttttcttctcgcgagcccaacccctgccgtatatgctgagctggat

SEQ ID NO: 9301 - DNA, 437 bp, Emericella nidulans
attaatagtataagccgagatcgcagctcgtactccgaaatatatatttttgcaagggatagattcatagtaggggtaagtttagcgggttagctgtatgtgctaaccaaattgtaaaaaccaagaaatatacaggtgcccgatcaagctccaaaagacgactggtgccctcattgtgcccgttcccagtgcaacccagctatcagtaaatttatgagatgtatctttcgacacgtagtatttcactaaggcaagctggtcaagatgtatcgcaccacaacggcatttttatctgttctaccggtagaacaataggcacatcaacctactacagggttgctcgttgatattactggacgcgttcatcacggccagagacacatagtgacatgactaaatcgaagttgtaagccccgaacaccggacgccatgaatat

SEQ ID NO: 9302 - DNA, 1361 bp, Emericella nidulans
  unsure (1)..(1361): unsure at all n locations
tcagcatatttcagtctgtggtctactgttatggtagctggcttacatgcgttctggttacagtagtcgtacttggggtagacaaggggcttatgattgtaacatatgtattggtgacagtaatacgcagcgctctatagttaaaggtataaaagaaagcaggtgaaagtatgcattctaatctaatcaataagatgaagaatctgagatgttataggaatccgttagcggcaacctaccaaatctgaaattatgtctgaaccgacactcttaggcctgacccttgacttatgcccctggaagatagaccatggttgaattagagagaacagctggtttatgtgccatgaagccggtgttggcacatactcccatccagtatgacagtaaggctgtaacatccaggcgaacagcaaagcaaaaaaacaaatgtgtcagaacaagattaaaaagcaaaagcaaggctaatattccctcatcgtggacttggtacatcactcggcacgtcccaaatatctgagtcgtcgtccatagttgagtatcttcgcctctcttgaccagcaacggccgcgtacaggccgtccattgtgaccccttcggaatttatactcggcctgtggctgcgggactgtgatgcagacgtatatgttgctgttgcggccggaacttggatttgagactcttctcgcaggcccgtattattgctttccgtcattggcgatatctcccggaatcgatctccttgttgttcatgtagagacatagtaactctctcaaaggattctctgatatcaattgggtatacagacaactgcaaacctctctctgttatacttttgggtagaagagataaggtattatctgttggaggactcgatataccagaacagaaatcggtggcgacagatggactgacctaatggtgatgtcaagactgcgcagcgaacctactagctgtagtcgtgtcgcatcatactaagtataactaatagttttgcatcagattgactatttgccccatatggtattttttctggtttggtgatgcagacaacggaaccaacagatgacatactcgactcttccacgacgcataacaagagactgggtttggcatatctcttcaaggccgataacacgccgactaattgctcgcgcaatgtagaactcaccaataaagactgtagcagttaggggctcaattgttatataataaactagaggactcggcataatagtctactgtaataacgagccaccattcgcaagccatctaattctgggggcaaggggcgcnnctaggaaagccgccatgggtttcagctatggctatgatatattgttgtcacatttaatcccca

SEQ ID NO: 9303 - DNA, 1774 bp, Emericella nidulans
gacgcataggttggtgatatgtgcttgtacgtcagctaggcgcgattgtatagcggatataagtttcgtgcggtcaagcgcggattttgttgcagcgtcatactgcctaacagctgccgccaggctttctctgatttccatggcaatttccagcatcgatggcaatatatcctgggtatggttgagagcaagtctagatatgttggccagtgttttggagttgttggataacccgaggacatgctcgtaatcggattggatcttcctggataaaggttcaatctcttgtaatagaccgtcagcggtgtccgtcctcgaattgggaacatcatcgagcagtctctgggtgccggcagtgatctccccgactgctctttcaatgtcctgaatctgctgggcaaagcgcgaggacgctgcagaagcttccggcccagccttctgtacctccactgcgtccacatagtcgagtaatgtccccgtcgccctgtcagcatccttcttgggtgtcgacgggcggccaagaaaagagaactccttgcgcgcaggaatgttttcgaggttagcaagggcacgtttccattcttcaagcgccgatttctgttccctggacagttctttcgcccaagcctgggcttcttgaaatcggttctccaaggcagccacgtgcgtcttaaggttctcgagagcgacgcttgcagcccgattgacgattccggtgcgctcattcagctcgcggatactcgtatccgccatctcgcaccgctccgttagctcggcggcccatgtcttccgagccgcgtataggttccgccatgcttgtaggtcgttccgatccgaaagcgtatccggaggcttgtcgagcacgagaggttggggagaagggagcttgggcagatctgcgttgtcttgttcgctaacgtatcgtcgatcgtataagaatatctcgttctgtgttgaagattggtatcagcctgcgaaactcactctgcggacgggtcgggcatacttctgtggcaagggtctgaatcttgacattcttcccacgagccgtcatcaaaatctgtctttgtgacggaatagacgttctttgcgtaatccatgaccgcagtgcctctgtactataaatccccggttggtcagcattggtaacgaacaagcgcccggggtacctagcatgcgctaggcggagaacatacgtagagaacgacaccgagtcggctagtaaatgctcaccggtgtgagcgatatagatgtgcagagacatccgcctcaccaactgagcaacacagctcagaagttctctgtcccgtctggcgaggaatgcgggatgttggtgtcggaatgataagagaccgctggttaaggcttagatgcctgagaagcttccccggcctaggctggatttggatgacgcgggcccgggagcacacgccggggactccaccgcccagcgtgcagtcattccttggaacccagggtctctatattcgagatcacgagatgcttcctttgagtctctgacctgccacgaggccttgctctatgacatcttccaaagggcggagcctccctcaactgagctcgggcgagatcacactgctggacttggcagctgatgatccccgagacacactctctttctcagacaaagaagcattaatcatccagttgtatcatcaaacccaggagctagagctggaaaagaagaatctggaacaaggtatgcacctctatccatttattattcgtttattgacggtccaagaactagaag

SEQ ID NO: 9304 - DNA, 131 bp, Emericella nidulans
caaaccttggccaggcggttgcgaggtggttctgctggtaggatcaccgagtggcattcatctttagtctgctctctctggtgacaccgcatccgacacttgttctcgggaaggaatgtattgggaagaca

SEQ ID NO: 9305 - DNA, 1394 bp, Emericella nidulans
  unsure (1)..(1394): unsure at all n locations
acaaaatatcttacaaaaatactacggtcacgtacactcggtcgatgtgatccaggagatctctgagctctagtagctcttcagctcgttctcctcgtactcagcctggaacagcgcgatacagttgagccagccaaaggagatgaacagccccagagagccgccaagaagggcaagatacgccttgaccgtcccctccttggcctcaggaggtggctgcgacttctcctccttgggcagcgtctgctcaagcgagtcatcgctggcgtggacgttgtcttgtggcttttcgggccgtgccattgtgcgagaaatatagattggctagtgacctgactgtaagaatgacagccgggagactccagcagttagttccagcgattaatatatggaggtcgcccaaggcctcaggagaccttctgctcaaaggtcgattatagggctagataccccggtcggagttaccgtatcgggacatggtatctccgcggacccgctagccgcctctggtagtcctctccatggaggcctgaggcttctatcgctctttctctcggcctcgattctcgatcctccacctcgcctcttcttcgtcctcacattccaccatggaccgcaaaggcacccgcgtccccgcggacatggttcatcgctggtcccgaactccgttgtcctgccgactatgtcgctccaagaaactgcgctgcgaccgcgcccagccgtgttccaactgcgtccagcgtaaggtcgaatgcgtctacgccggtcggggcgaatccccctccacagatagacgctccaatacgccgacgactgcgacacgggcggcagcggctagtaagagagagcagtcggtgccggagcccggctctgcctcgtaagtgctccgaagtctccccgatttggcctgatctggcctgatccgtccgttctcttcccggtgttaccttttctcactggctgtgctagaaaccatgaaactattttactggacaggatccagcgccttgaagatattattctgcagcaagccaatcagatgccgcgtccgtcgagtgtagaaagaggctcttcttcgggcccccagggcgctgccctggcgagcccggcccatggacaacanccactggagttcaggtgagcttattcggtaaagggtttctggttcatactgaacggtgcggtaacggttatcagctgtagggagcagtgtgtcgagtccaatggatacgacgtctaaggcatccagtctaattgaagagatagtacgtctttgttctcgtctagtttgatagattagctgctgaatggttataagagttctgacaatatgcagcatggggtaatgccctttgggtcaagtatgccaaatgagattcagcagcatcgagccc

SEQ ID NO: 9306 - DNA, 1192 bp, Emericella nidulans
ccaacgctgcagaaccgcccgaagatgccctagttgacaccaatccatggacccgatcgtacttaatacgagattggcaaggctggagatacctaggtagatgcagatcctcgtaagctattaatgcatgtgcattaccccgcgttcacatcagagtacaggatctgtccttttctgctatgttcttgcctcctctccctcctgcccatttacgtaccatcccagagtcgagatatatgacaatgaccatctcagcagaaacggtcctccgtctactccctctgactgcaggaggagcctgggtttttttccacctcgccaagtgcatctacaacctcttcttccacccgctgagccatattcccggcccctggcttgcggctgccacgtacctccccgaattctaccacgacgtggtcaggggtgggcgttacacgacacagatccagcagatgcatgagaaatacggtaggaactctctaggccgagtagtcagccttgcattgctgacatgcatcttcgtttacgtacaggtcccattgtccgtatcaatccgcatgaactccactgcaatgaccaccgcttcatcaatgaaatctatgccggcgggacccgaaaacgtgataagcccgttcaccaggtcactgggagtgaagcgtaagttgcgccgctgtatacgtcaaaacgggaagccgatgatgatttaaatcttcttgtctcccagagccgcgcatgcaacattctccaccacagaccatgacgtccaccggatgcgccgcaatgcactagcgaaattcttctcccgcgcccaagtattgaggttggagccactgtccgtgggcttgcagagcggctgtgtgataagatctgcgcacagagaaaggacggccgtttcacgttggtgctgcgtatagccagtttacggcggatgtgatctcggggtactgtctgggtgagaacttgggactgatgggccaagaaggatgggaggagcaaattgtggatgaggtagcgacggtgcttaggcttggctgtacgctgcggttcgttccgtggtggaagcacgtcctgggtgtggttctgctgtatgtgcaacgagtttctctaggtcttgaataagcgagctgacgatcaatatagaatccgcaaacagctagtaggaagcccgaaagaatcctctgacgcactgata

SEQ ID NO: 9307 - DNA, 1650 bp, Emericella nidulans
agagagagagaaagatagtgaagaataaaataaaatatattacgaatgaagaaaggagagataataataaacacgaaaaccgagttatatttatcgtcatttttaagaaaaattatgtttgaggaaaaagaccattaccttccctccaagagattgtaaaaaaagttttcacaacattggtttacagaatttttttttagccgccaaattcagcacaaaatgtggagttgaaacaaccctttgtggccccctgagaacaagaccacgacagtttttgaagagagaaattaagggtttcaaagccagtgtggtaaaaaaaaaaactggagagggtctttaaaaaaaagggtcttggccgttccttacaggcccatttcaaccgtttttagacccctcaagtttgtcattccaggattgggcacccaagtcaaaaacaacgtgggtgggtgaattcagctccacacccaggtcaacaagaatttccggggtttaattggggctccctttcattgcgcattaaaatagggacaaccgagttctccggtcgtagagggtatccaagcaccagagcattggtgtgattttgctcagggaggtcgagttgcgttaccctcaagggaagcgtgacccgagaatcgtttgttccactgaagcctgcagttggaagtgagttgatctcgccgatatcccatcccgacgcggatatcttgtatgggaattctttcatctccttaggaaaaacaagatgagcgagtagatagtcgatggcccctttagagaatcgcaatcttgggaaaacccgctctacacacagatgtcggtcttggaggtttataccacctaactggcggtatgcatccgacaggtcaggtgcatcatctacccaagcctggtactctgtgtcggcctggtcagacttgagtaaatgatggaaggctgcgactagatcttcattactgagcccagcgtagtaatagctcaagcacgtcaatacgataacaacatcaggatgactgaattcagaccgtggcgctgggttgtctttggcacggtacggaacagaaagctttgttcgcggtttcctggagccatcaggaccataattgaccctccatcttttctgactgaggcaggaagttagaacgccaccagcaaggaggcccctcaacagaagaaggggttccttggtactggtggtccaaaagctggccgcactgtcaccttcaacggcagcaatttcctcggctgacagttcgatattgacaatgtaggagagaattgcccttctcgtcgcctctggctgcctggatataggcagcgactcaatgccgttgttgcatatgtgattagcaatctgccttaacagatccactgccgcattttcgtggagtagccgtattcgagggaagcgcccctgttgttgaccatggatctcaatcgagagaggaaacttggctttgacagctggggcaaatctctgtactagaccaagtagcttttggattagggtccatctctgcggactgagctccaaggcgcgttgagaaccatggtataaacaactcaaacttgacgctgaagttttcatcactttcatctaccacagcacgcgaggacttccgaaagagttgaagtattctctgcagacga

SEQ ID NO: 9308 - DNA, 1596 bp, Emericella nidulans
  unsure (1)..(1596): unsure at all n locations
cagcacccgtctcccgcctggacgaggtaaaactccccgcagttgtctaccatacctgcttgcgttggtgtgggtgttgaaatcgccgttgtcgacattgtcgctatacttgttgttgcggtaggtgtgccccctgaaacgcccacacagacgtatacatttgcttggagacccgaacagtcagtttgcacagcgggattccagtcgtagaaggatgctagttcgataccgttgtcgactgcaatgtcgtaacagctgttgccgctggcaacgaagtagaactcgctgcaggtagtgaccatcccggattggataggtgtaggggtagagacatcagatgtcggtattgttgtagtggtggtgctactgggagcctgcaccccaacgcatacatacacatcagcctgtagccccgtacaatccgtcttgacagccggattccaatcgtaaaaatccgacagcgcgacatcgttctctactgcgatatcatagcatgtatcgcctgtaacaaccttgtagaactcgttgcacgtttcgataatccccgtttggacaggggacggcgtagacacaccagatgtcgacgtcgttgtacttgttgctgtcgctgtctcatcaggcagtggaaacgtcggtcccgtccagtccggttgacccggcggaacaccatccggatacgttgagacgcaataatatgtccccaacacaagcccgctgcagtcctccttaacagacgggttcatcgcatagaactcctcaaaagcaagccagtacgtgttgaggatactctcgcaggtatcacggacagattcgacatggaaccactgggtgcagtttgcgatttcgcctgcggcgcgtgggactggcgttgcgatggctgacgcttggccatcgcttgttgttggggaggcgacggcgacgcagtaggaggtgctttcggacaatgtgcaggggtacgcgtaggggttgctgggtatcgttcgggtgacgcagatgggggttatcgtggcgggtggctcgatactcgggcgtggctctgctagggaggggtttcagaggatgagtgtcctggcgtctccagttaggacccgcttttgtattgtggaaatagaatggaggctgatctagggcagaaactccgactttttgcaacggagaatatgcaatctggctcccctaaatttaaggtaatatttccgaaagggaaagaaatttcgcattaggcagggagtaagaggctttggggaaggggccaatccttaatggtagaagcccttcccgcgttttattcgcggtaggtttcaataaactggggggaaaaatagcttgggaggtggctcttccggtacctcggtcgtgggagtataaaaacaagggccccagatttttacacccggaatacagagtggggccatgttttccacatagcaaccccactatagcaaaatncaacgagaggataaagattttcctttctttcggttacaaaaaagggcaaaggtctctcaatgtggggcggctccctaatactaaaaacccttaaaatgtttagtaaaaaaaaaaccagtcttgatggttttaaacaaatatattttt

SEQ ID NO: 9309 - DNA, 1424 bp, Emericella nidulans
agtatggagcaggcacagctagataggaagaagagtgaacggggcgaaaggcagaagacgtatgaatacgcgccgccattctcagagttcaacgtcctcgcgactattctgggcgctggtgaggaggaacgacatagggctattggcgggccaagtataatcatcgttactaaggggtctgctgagctggttgtcgagaaagagacgaaattggaggcccatgaggggtcagtatggtttgttggtgccggtgtaccgctggatattctgtccaaggagggggcggagctgtatagggcctatgcggagtaacggccacaacactgcaaaggacggttatgaggtgatttgatggataatttgcatgtacagactacagaatacgagagtacaagattgattgcaggatgtctacgtacatcggccgaaatactgtagctcgatcctgttccaacagcgctaaatcgaaacaagctaattatcccaacccctcactgagatacctcacattcacttgtcagtaaaaagtactattttgggacccttgctgcatcctaagatccttcagcttaaccgcctgtgtacaagtgccaatcctccccaatccaggcgcttgtgatatgtctagctccgccgtcaactctcatccacaaccaatgaatctcaccggaaggcccaaaaaaagtaacacccttgcaccaattcagcgtctaaaccagatcagtgttcgtgctgcagcagcttgacgagtctcaactcgctatttttggcccaagtcttcgtttcagattctgccaaaaactcaatctctggcggcgagaacaaggcgcaatggttattggtcgtacggaatgcttccattgcgatgaacgtgcaccgtgctgcgcctaaggcgttgttggggttagcctcaaaacgatgacaggcgctcgcaggcccgttcgtcagggcacaggttcttcataaggcggggatgctgctggctggctgcatcattctatgacagcagctccgtcagaactttagtagccgtctgccagtttggtggtggctggttgacgcctccttgttcttacttacatccaccctctatgcttgccgggtcctgattatgatgccgtccctcctcttctactcggtctccctcgtctctcgcaccaccgcagattataccggtagcggtagtgatagtgtgcagcatggacccagcgacaaaacgacgcggatcgtcgttggcgttgttgtgggtggtgtggcggctattgcgagtgcgtctcctgccccataacacaagtagccgaactgatttggcactggcgtgaacttggctagaaaggctaacggtgtttgcgtgcagtcaccgcaggaataatcttcttctttatgaaaaagcgcaaatgggaccgcatacgacaatgcgagga

SEQ ID NO: 9310 - DNA, 1694 bp, Emericella nidulans
cgaacgaaccgtttggaagggaatgtccatcgcaacaatgatgaggcgtctgccctcgggatactgggggggcgagcggtacctatccatccaaacattccgtggggtgtgggtgcaaggcccgcgagaaatctcaaccaggttgtcagtatcgtctaagacagcttcgctgtattccatgcactcgccaagaggaggacgacgctcgatcaagctcgggctcttttctatggccttggtccacgagttctggaaagcttcacggaagagctcagggaagtcgtacacatattgagtacccatgacgtgagccttgtagcgcttaggctgcagccactccttggtagggtaaggggtggaaaccggacgcaagtggttggatccaagcttgttagtgccaccaatgctgtgaagaagccactcgcccttctcggactttttctcaatgtaaagctcaacctggatgatatagccaacagtgttgctaatgatcacacgcagagggtatggcatgccagtggcgggatcggtgcatagaatgcggatctcggcaccagtgacacgaaggcgccaaaggcgaaggccgaagcgatccaagaagcctgctaatgcctcttccacatctttgggctgtaagttgaagacgggggagaagttgatgaagatgtggttgagatcggagttgttgttgccaatgacctcaagggcatcaagaatgtcgttcatcaaacggtcagcttccgaggtaaggtactccgcagtggggatatcgtcacggagtcggccgggacggacgacagcgcgaacgaagtaccgtttgtccaaagccttatcgttctcaggccccttgccaatcgcctcgtagacatggatgttcctgttctctgtgaatacgggcttgatcttgaacttggaaagacggttgagttcgagctggaaggccagggcaggctcgctgtggcggatactctcatcctcttcgtagttgggacctctgaaggtgtagtagctggggtagacaccatccttgccgcagatgaacgtcacacgacgaatgcggcgcgcaaggaactcgtccttgaagctagaaacgagcttactgatctgggcaacgatctgggcatcatcaagctcctcgatgtcacggatggcgatgtttaagactccggtcagctcagtagactcactgtcagcacggggagccggacggcgcttcccctcaagagaggcaattaggccatggtcgctaggcttcctagtgccagcccttgggaacacttccaaagccttggtgaggtactcttcggcatcttcgaggtactgtacaggaaggatgacaccctttctgggagtcccgttggggctgtcatttagcaagttggacatgtcactgattgaggagacgcgcttgaaggggtttgattcagtggtaggcgtgcttggcgtggaggggtgggtgacagcagtcatggaaccgaactcaggctgacccagcttgcccattgtgaagtcccaagacaggaatgctggctcgccctcgtggtgatactggataccctgaattgagtaagcacggtaggcgcggcgcacatagacttcgagagccgccaaagtgacccacgcatccttgtgaacaaagaagcgtggcagaacgtcgaacacggtgtatttggaatcgacaacctccttgaggg

SEQ ID NO: 9311 - DNA, 1046 bp, Emericella nidulans
acaacggacgatttctgcaccctccaaatggacgcgttcctctttctattctttctcgtcattctttctcgtcagtttctcgtcagttattctctatatgctcggttgctggtacaaggcgtgaattcggacctcaaccctggtttatagcggttcttgtaatagttgatggctcagatactgccgtatgcagtaatgcgcaatctatcgctaaacgagcccacggtgggctatcatgcagctttaacgcatacaaatattgaattcgacaaaccacaatcacgggcctctcccgcggcattgcgacgggcacgcaccaagattggcagggcagtggtcccgaacaggcaatcgacttgccttatctagtacattattcaaacccttttctcaatgcggggaccactaagcccaaaccggggagagaactgcttggaacagcccgcatttacgtcgtcaaggccagaagaggcagaaagagaatcagctgaccccgcttgatgggccaaaatttcctgcttcaagatcaagcatgcaggcgttcaatataaactacgacgccgctggagctattaatatacgggcgtaatattactcgatattactccgcgcagagcattacgtcgtccctgtcgccgctgggtttgattttgatttgattcgggcaaatctcgctgccctggaccagcccccaacttccttcctgcctcgccctgccagcgcctcctttggccgcctttgttgcttcaccttctctcaagcgggggacttcctgatgcgctgagaggccacggttcttctctcgccattattctatcctgaaggcgctttcaccttcagcgccatcttctgggtttgaccgagggttcgtgcgagattccccgatcttacccgcacggtatcgcaagtatggctccggcttcgttaaatgacgttttaccgacggaaacggtcatctaatggatgcagctctccaggctccatactcgttcgatggtttatccagaatctcctgcaccgaccgagaggtcagggtccgtcgtcgt

SEQ ID NO: 9312 - DNA, 109 bp, Emericella nidulans
cagaccgtgcatcgaccgagcatacggcagcgtcgtacagaacccgagccatgacggcagacgactctacgtctcaggatcgtgaaatgtgcataagatgaaggtcagg

SEQ ID NO: 9313 - DNA, 129 bp, Emericella nidulans
aagcatgttgctttgggaggggggttctatataccgtgaggtcggggcgagagggggaggattagaggagagtatcaggtaggttctgtaagtcggcgcgatgcccagcactattacgctcgaactttc

SEQ ID NO: 9314 - DNA, 148 bp, Emericella nidulans
ggatacatctattctgtagtccatatagtccagactctcgattctacggttgacatccctggccgccggtttcgtctgagtcactcgaagtacctagtttaccagacgtcaaatcggtcttaacaggctagatgaaatggccccgaac

SEQ ID NO: 9315 - DNA, 561 bp, Emericella nidulans
cgtcagctttcgtggacgtggccaaacaagcgaacgaggacccaaatgctcagcaatatgtgatgtttgccagcattgggggaacaaacattgcctctgcagagttgacttatacaaagaacgtgagcaatccggccatctttgaaaaataccattcgacacctgcgatttccgactccaccagcacgaaaactctggcacagtactgtgacgaccttgaggcccaagatccatatggaatgcgtgatgtattctggaaccgatcgttcaagctggatgaagatttcgcaaactgggtcgtccaatactggttctcgattcttccacgcgtctctggcatccccaacgccttggcagggctcactttccaggctatcacggagccgatcttagagaagatgtctcacgctggtggtaatgctttgggtctcgatcaatccaacggcccgattcttctgatacacattctgggaatgtggagcagcggcctccgacgacgataccatctatcgcttcatcaatgatttcttcgtcaatatcactgctgagggcgagtccaga

SEQ ID NO: 9316 - DNA, 1971 bp, Emericella nidulans
ttaacatatcttgcatcttcccgtataattgcgttttaccttttctcttcgagagtacatcttcaccggatccacggcgagcattcaactccttaatttatgacgtccctgtacatattcttttcttgtccttacagatctgatgtctggtctatcgactatattggtcaataatcgagcacgagttcctattcggcacgcaggcgtgacgaagtgggtggactttttgttcaacattaatctgtcataactctagttgtatggtaatgtccctgacctagttttgaattagggtagtaggccctgctgagctcgactccagttcgtaagggtctcacgtgatcagggttcattttgtccactcgggtgaagcagctttaagatcaatgatcccagtctccggttatccattcaataactctttcttcgcttttgtctttatatatctccgcgcatgcgggcatctccgttctggcacttgcgaagggttgctactcccgttcgcttgccacggaaccaaccctgggctaaagcgcatccattgtgccatgccctgaataccagtgtttcatcgacaccgcaacatcgatgcttcgcagcgacagtaccctctcgattactttacaagggtgattccactatttacgcgctatcaacggctcctggtcgcgctgccattgccgttgtccgggtttcggggccggcctgtgtctcggtaggcgcactgcatttcccttcggaagaatcaaaaggagtatatgctaatatctgtcatattgctctagatctaccaagcgttatgtcccaaagcaccacttccgcgtcctcgggtagcagccgttcgcaccatctacgacccggcctcagacgaaccttgtggccaagcagatattctagatgctggagccctagtactatatatgcctggccctaagacagctactggggaggatgtactggagtttcatcttcatggaggaccggcaatcgtaaaatcagtcctgtcggccatatcgaaaactagcggaaaggagcattcggttcgttacgcagagccaggagagttcacccggcgggcatttatgaacgacaggcttgaactcccgcaaatcgaagcactgggtgacactctggcggcagatacggaacagcagcggcgcctggctgtacgtggcgcaagtgacgcgttatcaaaacgatacgaaaaatggcgtcaacaattactttacgcacgcggggagctcgaagcattgattgatttctccgaggaccagtattttgatgagtcatcggacgatttggttctatctgtcaagacgcaagtgcgggctctcagccggcagatcgcactgcacattcagaatgcattaaagggcgagctgatgcttagcgggaaaaagggtgctctgctgggagcggctaaagccgctaagagctcgaatttgaaccggattgttggcaaggaggctgttgtcctgagtacagagcacggagctcacagcgacattgttgatgatgccttcatgcatgctactttcgaaccatcggcttaagagattagcaaacatgacactggcctttgatgagctttcccttcaagcgggttgacgggtttgccaattaaattgtacggtagtggcacgcttctaaagccccgagttgcgaaatccggccagataatgatttatgggtgttggggttaaacagacggtttgctttttctaacacaacttttgaaccccccccatacgttgatatgtgatttaccttgcctatagtggaagaacttccattaaccaggtttaacccatatattccctcctattacctatcgcctagccttaatggccttggtctgtgtggggtttcccattacttcttcattattctctgtccatgattacatttctttctattaaccttcttgctcatataaatcttttacactccaacatttatttctttctttct

SEQ ID NO: 9317 - DNA, 220 bp, Emericella nidulans
tgcatctttatttggagcgggaacttattcgttcacaccattccacctatcacacatactcacccatgttctgattcagaggacggttgattgtggttaattgtcgcttatttgaagtagtaagggtctccgtccagcaaatgttgtcctaaggacttcacctggactttgactcgcaagtgtgtacagcaggtaagccacgaagacgctgaaccaataa

SEQ ID NO: 9318 - DNA, 457 bp, Emericella nidulans
gaaaagccaccgaccctgacaaagctgacggaggttctctgcaaattctgtcagtggaagccgcctccaaaagactacaatccatcaatgtttgctgctcgccaaacgccccctacccaatccgaccatagtccaagctcaacagtgtcatctgggttcgcactggtaccatcaagctcataccgggggtctagtcgtgaagaatctgtcggcagcagttattttggggatctggattccatcaaagctgaggaagttcccgtcattgtaagccggcaaacggacgactggtcccaaggcaccggaggtttgggtatatctgaagactcaactttcggacaaggtagcgcaaactcaaatcgcggagcccagaactcaacggttcccttccccggcttgcctcacgctgctcacagtccaccagcattgagtccttcgggtatgatcactccgggaa

SEQ ID NO: 9319 - DNA, 1758 bp, Emericella nidulans
ggcttccccgcacctcctccacaagatatggaacgttgcagcgtgatatcaagcattgagtactaacactctattagatcctcttcgtcatcaaccagcccgacgtctaccgctctccctccagcaacacctggatgtatgttactcccccgcaaaatatcgaggctagcatgtcagcagctgacgcattggaacagtatcttcggtgaggccaagatcgaggacttgaactcccaggctcaggcttccgctgcccagcagctggctgccgctgaggctgcgggtgagcacgctggccacgatcacgaccacgacaagggtaagggcaaggcgcccgagaccgaggccaagaaggaggaagaggaagacgacggtgaggaggtcgatgagaccggtctcgagcccaaggacatcgacctcgtcatggcacaggccaatgtctcgcgcaagaaggccgtcaaggctctgcgggagaacgacaatgatatcgtcaactcaatcatggccctcagcatatgagctcgatccagttaatgcacactgttaatggctgaatgtgtctgtcctgttgtcgaatgggttctggggtttggaatcaggctgatatgtccccggatgtccgtccaacttcatagtgtatatcatttagtccaaaagcaaaatcaatgaacaaccacttttgcaaactactctccgaaaggtttaaccactgtgtaataagactacaatctgttgaatcaatagaccgattgtgaattactcccagttattgcgtacctaacaatatcttcgcgacatttcggataacgggagttaagagtcacgtgactatcatccccattccaaaccttgccgaatcgaccctcaacccggaacgaacagctttgcacgtctaacgctcccttttaccatcccctctccatcccacgactcaaaatggctgccgtatgttgcccgtgcattagtagcttacgtgtctggtgattcaggttggattgaactcgctaactgctcgacttacagcgtacgccgctctcaagatcgactgggtcaagacgaccagctctctcggcctccgcggccagaccgctgcctctctgcaggccttcaagaagcgtaacgatgatgcgcgccgcaaggttcagctcctttctgagcagccccagaccgtcgacttcgcccgctaccgcagcattctgaagaaccaggccattgttgacgagattgagaacaacttcaagaacttcaagcccgctacctacgaccttgaccgccagctgaaggctattgacgccttcgaggcccaggctatccagagcgctgagcagaccaagggcaaggttgaggctgagctccgcaacctccagaagactctcgagaacatcgagaccgcccggcccttcgacgaactcactgttgtatgttctcctgcctttttacttgaattcttgggcttgatggattaacttgtacactttagggggaggttgctgctgctcaacctgagatcgacgagaagactgccgccatggtccaaaagggtcgatggatgcccgccggattcaaggtcagtttcaccttcatctaagctatctttactttatatttactgtctcacccgtaggagcgcttcggcgacatgtccgtcgtctaaactggggaatttgtatcttttttgtacccttgaacctgccaagtctcacacgacaacaattctcaggaagcgtattagtcatacctgagtgagaccgttgcggt

SEQ ID NO: 9320 - DNA, 444 bp, Emericella nidulans
aataacgttataaccgccatagaaaggaccaaagaatgacactttcagcgcacgcgagcttaggtgcgccggtaaagtacgctttctcttcactctgctgccacattcctctgtcagggttatagcctttattaatgacattcaggccgccgtcatcacgcaggctgtatgttgcggtgactttttccagtccacgttcaaagcggtgatcaaaacgggcaatctcataccaggtaccgagataacgtttggcgtcgaaattatttactacggtcacgccacgcgcggcgtagcgagaactgcaggcaacggccagaaatgcagctgtcgctgcggcaacgagagggagcaggcgcataaatgtttccttactggatgtgttctaagtgtagatgacagcaagtaaaagcggagtaaaggtccgtagattcggacgcgatggaa

SEQ ID NO: 9321 - DNA, 1539 bp, Emericella nidulans
gtttgcgagcgggttctccgggaccggagtcgagggagtctgcacgaatggttttgtcgtcgctgacccgccgtatccagggtacgtcgtaatgtatcccactgggcgtacgcagtaatagtagtctctcatgaggttggtacagttgtcccatacttgtgggttgaggaagaggctggacggtcagcttcctgtgttcttgcttaatacgaggacttacaaatcgtctaatgtgatttggaattgggtggtcacagtcccgcagtcgtcgcctgtcactacaagatagtactcgccacagttcgagtttgtgtcgtctggggttggcgacggggcgggcctacagatattaatatatagtaccgaccgtgtgcatgagaacatacaccactgtggttacaatctcgggactgcccaaggtattcgtaggaattccataattgcccaagggattgctcacgcacagctccgaaccggtgagactcccgaggttcctagagaacaaatataagctaggccagaatcattattgctagacgacacgggaacatacgagcattgaatgttgatttccgagttccaagccagaagctgcgcatacgttgcattagttgaccggccaatgctgacgcaggtatccccggcttggacggtgtatacagcacagtccgcatttgcagaccggagcagataggctgcggcgagcaggagtgtcctcttcatggtgatggtcaaatggaaatggtaaaatcccggtagtggggtgaagggcatttatggtggaataaagagacagtcggcatattaattctcaattcctcggtccagcgaagatgcgaaatgcgaccacgagcacggtcatccgagtcatccgcagcacaaaccatgggtaatttccgaagtcgctctggacagtaccagtgctaggatgctagctgcagtgtagttcgataggaagcgtgttggactccttccattagcggtatagtccgctgtggccggcactgccaagaagactaggctttctcggcaaccgcccagatcaccagggtctgtttcagggtgtgggccctgtggtctgatccctggttctgttcctgcagctattgggtgatagggttgcagtaggctgcttttgtcccaggcactgtgcattagccccaaaacgtgggcccatgtggttacatccgagtgcgagccaggagtttattgtcttcaaagtgccaagcgaccagtgtatcgttctcgcacagaggtgagcgcctttatccatccgaacaggcatgctggcctcggttgtcgctggccggcattgttataaaaggtcgagtcaacagattctgtttcaggttggagtaacgagttcattcttttattttcctccctcatgggcatgattgcccatattcttaataatgttgttgttgaaacaaggtattgttggtcttttgttcttcccgcgctgattgctgcatcgggaaggcacggggtgcaccacaaacatgcccagagaagccaccctcccgctctcgacgagag

SEQ ID NO: 9322 - DNA, 2320 bp, Emericella nidulans
agaagaaaggaagttgaagatatcaagaagaaaattcggtaaaagtagatgagataacacgaactgattataaatagatagatgagtgtatgaagaccaggactgagtaagcattatatgaaaggcacgcattaaccatagttataccggctgaagaggaaacaaacacagaggaagggggataataaagagtgacagcttttctccatcaggaagatcctttaagtacaatgtaaaagaccggcctgaaatgagggttaggtcccccgtgggccacccaagactggaggttgggaattgaaccccccaaaaaggacattttgtctgggcaaaatccaggccattatgtgaagtgaaaagatctcaagaggatatcctcgaccccacaaccaggacaccagaaggccaggatagtttggtccgcactgcttccctcccaagggttacctttgaaatacgggtgccttcctaagggtacgtgccaagccctaaaaccacgtttaatgtccaagtattgacgactaacttggttctagacttggaggaccccaatgttgtccaccccgagaccaaagccaagggtgacaacgaccctctaaatgtctcggaaattggtgagcttgtcggctaccccggccaggtcaagcaggtcaaggtcctcggcgtgatggctcttctcgatgaggaagagactgactggaaggtcatcgtcatcgatgtcaacgacccccttgctcctaagctcaacgacattgaggacgttgagcgccacctgcccggtctcctccgtgcaaccaacgagtggttccgtatctacaagatccccgacggaaagccagagaaccagttcgctttctccggcgaggccaagaacaagaagtaagtcttcctggataatcctgcaatatcacatcatctaacgggtgcaggtacgctgaggaggtcatccacgagtgtgccgatgcctgggagaagcttgtcagcggaaagtcggaccgtggggacatcagcctgtaagtttgatttactgagaagcaacaacacaatgctaacatgagcagtgccaactccacccttggcaactctgacagtgtcgactcctctaagcttgccagcattcctcgcggcgagaacctcccccctgctcctattgatggcaccattgacaagtggttcttcatctccggtgctgctgtgtaagttaatgacgagcaaaaattataaatgttagcttttgcactagcggttgaaatataaagttttacatctgctggacataatgcactagccttatatgcgctgtgtagtattctccacccttcaagtgcgtggtataaggcacggtacgaaaatctacttactattcgcattttcggtaaatgtcaaagccagcactaccataaacctgggtttcataatagcatgtctgaattattcacacgccctctaaatacaagattttacaattatgtacatactgccgcaataaaacccatttggctctagcgctttcatagaaagtaaaacattcatttgcatctaagataaaccaggtaccgaacaatagatatacatgcacaataacaatacatcgtcaccactcatgtctaagtccaagtccaatagacagaccttcctttccaagtattcttccttaacccttcaaactctcctctcgctcaatagccctccccacccgcgcaatctcctcgaccacatccccaatcttcatttggcgtttcccaacctcaagcttcacttccttcccgcccttgaatccgaccgttatctcgggctcttttgtcgacgtccgcggcagctgttcgaccttaatgtcgatatgtgtgggactgctaacgggtgttgtggagggattacggatgagagagaggaggaggcgacaggggcgcgaggaacgcgcgaaagggttgaaagttgtccgtagagacgttattgtctgaagaggaattgtcattgtgtcaaggtgtgctttggatttgctggctggctggctgctatggactgatctggctggattgctgtgagtttgcgattggcgataaggggatggatgggcataccggtatgcaggatttggccgctggagcagttccgtgatataatacagacgtatttgagttcgaccagtgataacgagtcaattgacctttggcttgccttgttgtctcgcgatactctagctttttggcgggaaaatccgcggacacattgctggtcggtgctcgtgtttgcattaactgcaaacattcgccagtgggctcaagaaccgatgactatggcggagcggaactcgacactt

SEQ ID NO: 9323 - DNA, 336 bp, Emericella nidulans
gggggccagctgctactctgaagaagagtttagggagcaaggagtgcgcgcttgacgatcgcaagctcataggtgtgtaatgcgataaatggttatctggtgacaatccgacacaacatactagtcggcaggatactggggataaaccggggggccttatgcgggatctaaactatattagaagcgttgcttacactgcgcgtgtcttactacagaaacatggcccgccagatgcattagggtaaccgacatcactctcggagaggctgtgcgagcatcaggctctcttacgcttcatcatcactgactgcgtacgctaccgagacggggttatcg

SEQ ID NO: 9324 - DNA, 754 bp, Emericella nidulans
tgcgatccaattaaaataggaccaacggcacagaatataggcagtaattgaactttctcatgtcgtcaaactcttcatgggttacccatccatcccccatcaacgacatagcaactccccgtaactccactcgcttcttcactcccgagaaaaacaatgaccttggccacatcctccggctccaagtccctcttcagactctgctgggcaaacacatgcgtccggtactcttccgtgagtacttctgccctctgtctatctgtcgcaatagcgcccggcataacacaattaacgcggatattgtgagtaccgaactccctgctgtggatacgcgtcaagccgttaatagccgccttgcatgtcccatatatgggcgtcgttgcttcaggaatccgccagctaatcgagccgagatttacgatgcttccgccaccagagcttttcatagatggaatgaagcactgtgtgaggaagaagatgtgtcgaaggtttgcgttcacgttaaaatcccaggtttcaggtgtgacatctagactggcctggcgtgctagtgagcctgttgcggccgcgttgttaatgagcacgtgcacgggaccgtgctcgtctaggattttcgatgcagtagcctttaattcgtggaggtctgttatgtcgcagtgatagaagacaggtggcttcacactgatcttgaatgggctagttttggcgttggtgttggctcgagtagtgacatggtcaattgtcttctgagctg

SEQ ID NO: 9325 - DNA, 985 bp, Emericella nidulans
ccaggagccagtatctacataaaattagaaattatgcaaaatacaaagaagaattatttaaaaatgtagtgcagtatcaacataccttcagcatcgtttaaagcattattttcacgagcacattgccgatgagctgttcgggttgccgagtcagtgaaaggtccgctatattccggggttctgggccttcatcttgatagggccgcaaatcaacgtacagtgatcgccacaaacagcacagctcaagtactcctcaaactcttcgcttgggtcatgatcttcatcttgattgcaaaatctgtacacaacatgttagtttgaaaataattaaacttgaccttgtgagctatcaggatactcacatgcaattcccgcgaactgtgttattatccgcttcagcttccgcaggcccattgctctccgcctcccagtcctcatctgaatcgcgactgctcgatgaactagatccgccgcgctcgctctcactctgttcattgaattctggatcgtcatccgcatccgcatctgcatctgcatctgcgtcatcgtcattgtcattgttgatagatgaagcaccttctggaatcttgacggcacccacgggctctgcttcatcgatctccccatttggaacatgatcgtaatctacctctccctcagcatccatatcctcgtcgacctcaacagcccctgactcggcctcgatttcccccgaatacgcgcggtgtacagcatcctggagctgctgatccatctgatacaagtctgtctcctccccttcggcatcctggtcactgtccacaaaatcctccgccgttggcctcgattcagaattgtcggcggccgtcggcacagttgccggcatggtgtacgttaccgcagtcgccagtttgaatagctaaagaacaccttgtttagtgtagtacccgctgtacgtatctctttgtgatagaattgtggcagtcccgatagtgagactacagta

SEQ ID NO: 9326 - DNA, 780 bp, Emericella nidulans
tggttcctttagtgttgcgacgggacttttttggccaagccttgtgttatcgataagcccactccaaccaaatatcgggcttcattgagcggacgctcagcgcgttacccccagcataaacaatcgcagccaaccgctcgtcagtctcgaaattatcctacacgcattgattcatctttatatgatcattgactgcttctgtactgcacagatagtgcttgaatactaccttgttagctgcaatgccagactcctcaaatactcgtggggcctacgaagcggcgcctcctgcagccggtgatgctgcattcacccgggtttgtgaatgctcgatcaaaagcaaccctcgtactaattcgcctgctacagatatcacgaattccggttcccgcgcgctacccttcgacaccgggacgaaagaaggtggggccaacaactcctagatcggcttctcaatgggggacgcctgggaatagaggtgctccgtcgacaccctatggggttcgtgcaatgcaacggcgtgcagcgaatactccaggccgtgagcgccgaaagagcggacgagttcagcgcgaaacagtctttgatgtccttcgaaacctaagcagaggtatggacgtattttattcttaaagtgttactcgctgatggatgtctgttcaagctttggcccccgaatcgcaacccatacgttcatcaccgcagccgccgcctgaaccggagccggaacctgagatcgacgaaatcgatgcacttgataaggatcctgatcctgagaga

SEQ ID NO: 9327 - DNA, 1585 bp, Emericella nidulans
aacatacgacgtgatgtatcccggaatctcttccaccttattagaaacactcggtatcggttcaccaaatgtctcgtaaacgggaactacgcctgtccagacacgctcagtgacttctgtgttgtccgtatccttcctctcatcggaacaccaccatcacggatcttgccactgccatcgacgattcggacctttagtattacagtcgaggacatttcagccttgtcaggtgggatacgagagtgcttccaacggtccggaagcacagagttggttataagttccattgcccacagtttctcagcttcatccgtcacaagctttgcgtagccgtggaggatggcagatcggtagttgtagctgtgggagttcggagtgagcgataagactaatccgtccactttgcttgcagcgacacaaacgggcagtccttcatcctcggaggcgcgtgccaaattcataatgcgtgagctaacatagccatgaagatagcagtcaagaggctcatcgatactagcggaaggatagtcgaatgatgccatctgccctatcatgggtagaatggcgggaaacgggtcagaaggcccaggattgaaggagacatggaggacctggctagagtttatgatggagtggattgcgccgagatcataggttgctaagaactgttagagatcgaactggttatatctggatatgctgatctcacctctgtgcttgtagcggttgactgtgttcgagtcccgcttgggatagaccagcgtcttgcccatcgtttgagaaaaattatgattctttaggtttctgactggcagccttgggaattgaggggagttacttatataactgggattcaacattgagatgaaggaaggattccaatgagtcacatatttccattgatatggcgtgcgttatactcccgctggcgagcaacctcatgttagaagctactgtatgcggttacctatctgacatcttcgggcctgaagaaaggatcctataggtctctggaagcgacgagctcagctattgcaccgggtgaaagtccatccgaaggcacttgtctaggtgctttggtagatcatgattgggttttgtgacttttgttggagagatgattgtgacaaggtgccgacgattggctaacggcgccgaaggtcatcaatactgttacttgctgaggcacgctttcgaaggcggtcagccagagacggctgccgcaggctgcgataaccaattctgacatcttgtccgataacaacaatccgaagcgtactaaaatgaccaccatggtggcatgcagatcgcttgtgcgccaatggcctcgctatcttcgccacccttcttcgctgagagcgctctcaaggttgagtcaaccgagggttcaaactcaatttgtacgccgcggatacgcttccatctcggccgcagagcttaagttcggacaaccgctgcacgagacacacccgcatttgctggaccctggagagtgtatgtgcttttatcccttctgggctctcttgcatctgggatgataattgagattgaatagtaacgcctggaatcaccgcgctcgagtatg

SEQ ID NO: 9328 - DNA, 519 bp, Emericella nidulans
  unsure (1)..(519): unsure at all n locations
tacattgatccagtttatggcccaaaagcccgcgactgcagttgtgaccatcccagcaaagagcacccaatggaaacagtgtccctagcatctccatgttcgtcaaacgccgcgaagactccaccggcaggcataaagccaccgtggagattgactggacgatgttacgaaggactcagttacgctcagtcatcagattgcttgcccaggttgtctcatctgcctagaacacttattttatgcaagtgcctgcggtgcccgcggtgccgcccagcaacctagaacctaggttgagaactctcctagagagcagcggcacttgtgtacgcgtggagatgtgaaggatggatctccagacttagttccaatttcgttgcacgctgcagttcttggtaatagttagcagaggatttcttttggtatagcgacttgcaagttgaaagcatacaaagggaattgaccataaaacaatngccccatctgagtagctgacccatcanggagatcccaatgatgata

SEQ ID NO: 9329 - DNA, 518 bp, Emericella nidulans
tagtatcagcaggaaacgctgctaagagcgagataacacggaaagccatggggacccgagcgagggtatgaactgtgtgccaaagggaacctcaggagcggtcatgccgtgaaactaggagggcaaggacccttgcactgtggtggagggacgaattagctatccaccaggaatgaacacgttttaagcaccctaatgtctcaaattgcgtgtgagtgaactaaaaccacccgtagctgaaagacctgacgaccgatgcccctgttctgtacgaggaccaaatatatgcaatggccacttgcaggcagtcactttgcgagagaaggttacccaattgtactcctatgcctggggctgccaacctttctataccagaaaaagggaaagcccgttgcactactctttcccccaggaaaagatatctagcgaggctctattggtgaattaacggtgagtcgacatactaactcgacctaaataactagcccaaagtagctaaatgtgtttggaaggcactc

SEQ ID NO: 9330 - DNA, 1298 bp, Emericella nidulans
gtgagcgtgagacccttacgaccagcgcggataccggaagcaccagggaacatcgccgtcaaatcaataccctgggtctcaaacttatcaaagagcttcgagagcacccaatcctttttgttgagctcctcgatgagggatcgctggcgcgcttcctgttcagcctcggcgttgatcaaggggagtagtaggtgtctcgtcattgaagactgagcttccttggaaagaaacactttccagacaagaggctcaaggggggcagggagtttagagatcactctgagctctaaagtatgatctcttcctcgtgttctgggttgcagcgatactttgcttcctggtccactctgcaaaccctcttgtattttcgttaggaggactttgaattggtcaagatcctcacttgggtcgatggggatattatcttcgtcagctcgcttaagaatggcttctctgtctagatgttccgaccacatagagttgaggtctgtcatgtagagctcgtagccggtggacgtgggagagtacttgtacagaagagggggtatatcctcgcggttcgcaagatgtaaacgatgccatttttttgacattgctatggcttagaattgatggaagcctcggactcctgggtgaggcgatgtctatcacttatcattgttgtactcagtactgtataggcagctaggtgaggcagcagcgcacggtccaccgaggcaagtctggcgatcggcctagcttccgtcacccgcgcgccaacctggacctggacctggatctctccaagacctcgccgcaccactgcaatctccaagattctgcaatcaaccccgaaaatgtcagcgcggttacacaatagatcacgcacgaggcgatctcgatctcgatcgccgcactccgatgaccgctaccagaaatacgaccggcgatcggacgaacgagaccaacgatatgacaacagcagataccgggttcgcgatgcgcgaccaggccagtcttatgcccgagggatgaaagaccagatgcggctcaatcagctgcaggaggatgagcaagtgcgcgagtgggtggctcaggaggacgtctttgtcctcaagcaggctaaaaaaaaggcagagatccgtgtgaaggagggccgcgcgaaaccgatcgactggcttacagtgatgctgcgggtgattgatccaacgaggaatccgcttgacgatgagatttcagattcagagcttgatttagtagaccccgagggcgtttttgaggggttatcggagacacagcttagagacctggagaaggat

SEQ ID NO: 9331 - DNA, 992 bp, Emericella nidulans
cgtccaagctaagggtcaaatcgtaccggctctgcagggttcataatccttttggattccgcgacgcaaatgcaaaaaatgcctaggaaaatgtaccataggtcgaagctcagctggtttcgcatatgggtcaagatataccccttgccgttctcgtccgtctctggctctgggaataaattccgagagatttctcctcgtatgtatttgaagctcgaacggtaatcgcgatagggtaaaccgcaatatacatcataacaagcagactaaactgaactgctgggttcacgtccgctagactgaacgaggcagtcccagtatgccgagccgatgctgcctgaaagatggccgctataactcgtggtccagcagggacgctgttcacagcagggttatccaagtccaacaggagaattagaagaatgtcgacgaagttcaggatgaaaatgattccagctaaggcccaggttggccggctgcggaaaagcagcacgtagcaacgacgcgggtacttcaggagaaagttgagaggttctctgagagatgactccccaggaacaagcttgaacatggtccagatcacaagtcgcagaaagcacgggtacaaagtgttcccggcgtatgcaaggaagctcatgacgaacagtggaaatgtcgcttcctgaaatgataccattgagtctggcgtcaaggtaagccctaagttattcgacattgtttgtgccgagtagaaggccctatggtgagtcagaattgaaccagaaacattgtagcagatgatacaaaccaccaaacaggattcaatgcgcactcatcaagatagtttcgatatttcatatccgcattctgaatccaggcagctagacacacagcaccaatcaaatgaatgcccaagaagtatcctgccagaagttaacactgtccttacgatctcgccccaatttggaattccatacctatcgcgatcttcagcaatagacggagactgcggt

SEQ ID NO: 9332 - DNA, 582 bp, Emericella nidulans
ggcccagtgagaaatcgagcgagcacagcgccggcggctggcactgctggggcacccagtacaccctccgcagccgctgcccgggtgctaagcctctcattgcccggggcctggcaggctggccgctgctccgagtgcggggcccccaagcccacgcccacccggaactccagctggcccgcaagcgccggcagccccggttcctgcttgagcctctccctccacacctccctgcaagctgagggagccggctctggccttggcagcccacgaaaggggctcccacagtgcagcggtgggctgaagggctcctcaagtgccaccgaagtgggagcccaggcagaggaggcgccgagagcgaacgagggctgtgaggactgccggcatgctgtcacctctcaggctcaagccatccacccgccttggcctcccaaagtgctgggattacaggtgtaaggcactttcgtcatttcatcctgtcaaccaactggtgtgttgtagccaagggatggcctcagagaagtgaaaaaacttgttcaagatcacagaactagctggtggctgagcaggtaggatttgcag

SEQ ID NO: 9333 - DNA, 584 bp, Emericella nidulans
gatgtatctggcggggctgtatcatcgggcgggaaaaggtgaaatcaacgaactggtgaacctgcctgatgtcgtggggatggagattgccataaatggtgaggttttctcgttatcccacgaagcctggcagcgtgacttggactttgccagtggcgaattacgccgcaatgttgtctggcgtaccagcaacggctcaggttacaccatcgccagccgtcgctttgtttcggcagaccaactgccgctcattgcgctggaaatcactattacgccactggacgccgacgcgtcagtgctgatttcaacaggcattgacgccacgcaaaccaatcacggtcgccaacatctcgacgaaacccaggtgcgggtgtttggtcagcatctgatgcaggggagctacaccacccaggatggacgcagtgatgtggccatcagctgttgctgtaaggtgagcggtgatgtgcagcaatgctataccgccacagagcgccgtttactgcaacataccagtgcgcagcttcatgcaggcgagaccatgacgttgcagaaactggtgtggatcgactcgcgggatgacaggc

SEQ ID NO: 9334 - DNA, 2147 bp, Emericella nidulans
ggtctcaggatacgtactactgtacagccatccacgcgcttcccttccacttccgacctcgaagctgctgcagataaccagggcttgaacagttgctacacagggacagtccagctcaacctcaagaagggcctttgcgcgatcgccgaagaaatccaccagtgatttcggaaacgtcacgaagtccgggtggtagcgcgtctcgaaggaagctcctaaagcacatctgattggtattgagacggcatgctccaaactctaaaaggcgcatatacttacattgcattccggagcgactcagagtagtaaggggtgtccccgtcaacatgccacttttccttggctgcgttgtacattttccgatccacgacatggaaagacgggtcctgccagcagaagtagagatttgtcaggtgctcttcaagagccgccggaacagcattgtggtttccgagttgactcaagcagtccagtacataggtttgagcaatgttcactccggagttagtagctagcatatccgctaggttgaacgtgcaggttgggccatagaattgcgtctgtcctccgggtccaacttggagcgtacccactcggtcggagagttcatcgattaggccttctatatctaccctgttgctggactcttctaccaatgtttgatcgtcgtcggcgatgatgggcgcaaacttttcaggcattccctcggatgctgggggtgatgggtcgtttgagaatctctgagtgagaaggtgtacgtatctggacaagccggtgtcacaattgagtccatacctagttcaaaatgccaagccagattactgtttggctgaatttgatgtatgccctggaacggaggaagattaggggcgccattctcggctacaggaggcagagtggagatatcctgattttgcctggagttcatgagaacgccgtcagacttgtttccttccaggtcaattgtctgggaagagccagattcctgtatggaattgggcatctccgggagtttcttcttgacctgccctatcagggatgagtttatctcagctagcccaagcatctccaaaactttcctcagggccgaatctttctcttgcaacattggcggcggctgcaacccgttctctcgaataaaactgcagagctgattgactctgctcgatagtatctcgatagctacgcggagcggcagcctgtagttcccctgtcagcgttgtcgggtcctgttgagcaggacgcttactttctcttgtcaaatgcttgatagcggcattgacgactcctgttgacacagttggagcatgccggctccgcaccgtcgcactatatctgtcagcaattccatgcattgttgctagaaacactctaatgaactgacctttaccttgctctcacggcatgacacacacgccatggtggcgttccttcttcttgtaaaagtcttggtggacggcatctttcatgatagtagttataaatcggtgttgagtggtcaagcagccttcagatattgtggatagttaggaaggtgaagggaaatgagagaatgatagaggaaaggaactgtgatgcggagatcagaagccagaaaggtgggggagaggtttgtgttgtggagtcctcatgactacagcttcactccgcttccccagcataggccatttcggacctctagcgattctcagggcatgtattatctatctcgtgataagcgtgctgaattactcattgatcatacagatctaaggcgatgtcagatcactttgagggcgcagttaactctgccctctttttctccagggcagcgaacttatctaaatataagcactcatttcctggccacgagtgacaaaaaaacaccaaccagcttttctaccagtaaggcaatcatgttctcaatcgcaagtatgctaaacctagaacctccagcgacactgctcgacccgctgactcccctcttagaccaccttccaagtccctccaacccactcctcgtcgaaataatgggcggcctcttctcaggccaaggaattcgcacttccttcaactggccaatatgtatgaagagctggggttgcccacagaagacggcggggaaggcaaaacacaaaccgtatcacctttcgatataaatcaagaga

SEQ ID NO: 9335 - DNA, 1393 bp, Emericella nidulans
aaaaatcaagcttggccggctttaagtggtaagatcaaactggcacgacttaacatttgttgtgtcttccctaataattggccggtagacctcgttggttagctccacggccttctgtgtctgcttcgtctcaatgtacgaggacacgattgtcgcagccgcctcactcagacgtgtggtagacgtttcggaagagaggatatggactgtggcttcctgcagttcttggaccacctgctcggtcttgctctgcctggaataaaagcttataacctccttcatcctgaggagggactcctcatgggcccaaccgtagctttcacgcagcgttgtgatgcgcttcttcagcacccgaaccgcctggctccacttgcgtggacgaggcagactctgtcagttgagagttggaaagaattgctgactgctcttcatacagggagtcgagagtggcgcggatctcgtccaattgaacctcactggaattgatcttgagaagctcctcgtacaggcggattgcttcgacttcatagtgcttcgattcctggcacagctgggcaagagtcaatgtcgcctgcacggtgactgatgcggttgcgctgaaaactgctttgcacttctcctggtagtctaaggtaaccttgtggagcgccgagtactcggtgcgaactgcacggaggcactgggtgtaacgggtgaatattcccttcacgaatttctcatcctgaaacttggggctgagtttgggatggtttagccaagccgtgtagagaatgtgacagtagtgcagtgcttcggagtaccggccttgattccagagctcagctgcaacgatgtccaagggttccagcgattcagggtggtatttcccatccttgttcaacgcttgaatgatctgttggtagtagtctaggaaaattggacgtggcctggtgagctcagcgagggtacgcagggtctgaatgaccgttggatggtcagggccatagtgcttggcgtagtcattcagcagctcctgatagacgctaatggtcagctcagtctgcgacgttctctccagcagacgcagcaactcagagacgtgatgctggcgcacgttgtcttcaacgctgagcccggagcggacggcgtaatagatgcgcaaccgggtgtcctgctccttggccagccggtggcgggagtggtagcactgggccaggcgctcggcaaggacaagggaagaatccacgtgtttctgaggtagcgtcacatcctgcagtgtcgccgcgaagaaggacgcccacgtgttgtgtaggatgcgcttgatcatacgggaagcttgctgccagcgcggctgagagatgtacagggcggctaaagtctcagtgctgctgtagaatgtctggttaatagaggt

SEQ ID NO: 9336 - DNA, 1493 bp, Emericella nidulans
tgagaccggggattctgccacgaaagcggtcaatgagctctgacccgcaggtacaacagtctgatagctttgatgttgacctcgaccaactattcaaactctcaaagtcaatgagtcgaggcccattcgttatctcttttaattgatacgcaagtaatctgcgtaatcgtcgactctaagtgttcgtgtcgagtgctagaagagttgcatcggtctccgaattggcccacggatagctgagcgtgaacgagaaccaaacaggcgttcgatttccgattgcttttcgttctttttttcaaacagtcgcttattcgctttcgtctggaatttgaagcgataatggcttatactgatgattcagtgaaggcgaagctctctgctctcaatgagactcaggagggcatcgtgactgtcgcgcaatgggtcatgtttcacaggtatgataaactttggcgtttgttgccagttcactaataatgcacttcaaatcaggcgccatgctgagcgcactgcacaattatggcttcagaaactccgcgattccccagccgcaaagcgccttaacctgatatacctcgcaaacggtgcgattatctcgaattattgcccataaacgaaactaatgcagaaaatagaggttgcgcagcagtcgagagcacggcgcaaagaggacttccttattgccttttcacctgttagtgttgattgtaccgacaatgagagcggcagctatgctaacacggcctagatcattgccgaagcggtggcaattgcgtacaaaggtgcatccaacgatattcagcagaagctcagacgtgtggtagaagtctggaggcaacgaaatatcttcgagcctccaattcaggatgccgtcgaggctcgagtggatggtaagattgtcccagcccattctgctgaactccatgctcataatacccagaaatcgataaatcgcgttccacgggcaagaaaccgttgcttggcggttcgttattttcgggaccatcgggttcaacgccgtcagagttgcaaccaatagttccgctccaggtagccctatccaaggcggcggttgcgtctggcacatctggtacgactgccaatgtggagtacgagaagttgaacgacccaaataccccgttgcctacacctcccgtgcatgcagctcgtctaagttcactcctaaaaacgctggcgaatgcggaaagctctgtgtcagaggtcatcaagtcacgccgtgcgcttattgatgggttggagaaaattcttgagaccaatcgtaccgctttatcgcaggaggaggctctggctgtgcaattgcaggaaaggagggcagagactgaagcgaagaaacgagaagtagaggatgcgattatgcgagggctttctgcagagaataccccagcagcggattccgggagtgctacggggagcggcgaacgttcctcgtccagcgatcgaaggacttacgcctcctccagttgaagcgatta

SEQ ID NO: 9337 - DNA, 395 bp, Emericella nidulans
tatgccatgctgaagaaactctgacgggatacatacgtgtaggggaagccccacagatcgttcttagctgcaccgtcttacgatgcgacggctgtgccacactaagctgttgccggtgccgcaaacacgcttatgcccgggtgttcttgacgtcacacggacaaatactagtttgcatggtgagctacgcctctatttgatcttcggagagtataagtcaaacaacagaaactctgatggcttgtactaaaaagagaaccgtctatgcgtgctctataaattacagctgctgtccaatattaggaccaagctatgaccatctttacagtcctcggtcttgactgaccttagcataatgagccaggtgcattcgaacacatgacaaggaacactga

SEQ ID NO: 9338 - DNA, 576 bp, Emericella nidulans
ggaggtctatttaatacatttaataagcttactttcccctgatgccctaaaatcttccagtttcaaacaccatgcttataaaagggacctggtcagtgggtcatgtattagaactcaggttcctattaaaagctgtctgaaatcaaaggcagtgattctcttaatatcatttaagaaaactaaaataggattccacgtaaatcacctctacccctgtgcccactaaaaggcctactgccctcctatctaaagatgctgcagcagtggtgaaagcaacagctgcttgctacagccctctcctccaccgtgcatttctaacgcaatagctctttaatttaacccttccataaggacacaacacctacaccccaccctttcatttttaacccctcacagatcacgtctttttccactaaacgtctttcccacacgtctggggctgtcattttaaattaaccctttggcacctgaaacccctccccctccccctgagaggttgccctttaacccttccctccaacccaacgtgtctgtgagcctggctcccagagacccagcgcctaagatactcctttg

SEQ ID NO: 9339 - DNA, 665 bp, Emericella nidulans
ttggtcttgccaattgggcaagctggacgccagtgaacgaaaatcgcgatgacattcgagctgaggccattgagtgtttagaacgaagcattgccccggaactaggtgatcagctcaactattcgtccctctatgctctatctctactgttggccgagaatcgggaccttgatgctgcaatcgactacgttaagtcggcattgtcgtcaaacaaggacccggaagccacgtcggcttttagccgtgagcgggacttgataccattatggcaccttctggcactactcttgagtgcgaaacaggagtacgatattgccgaacgctcgtgcgaggctgcatttgaacaatttcccgccgcggttacctctctagcccacagtgacagaaggcccgccaaacaccaaaccaacgcgcaagaacaaacaacgccaagaaaggcgctccttgatcaattacggaaccgagaaaaggagcgtataattgaaactcgtatgacccaactcgcttttgtggaggttttggagggtcctgaggctgccctcaaccatagcgaccagctcctcggccttttcggtactcttttccacacgttgaatcttgagcctgaaactcaataaacacgaagacagatctatctgtccggccgaaaagctctttcggtaccg

SEQ ID NO: 9340 - DNA, 548 bp, Emericella nidulans
ccatgtttttatttttctcatggattgtgccttttaggttttccagtgacctggtacagtgttgaacaccacaggcaaaaccataatgcgttgccagtgccttttcttcttcgttattccagtagtagtaaagcgatattgtgccggtaaatttctttttccccgcatttaaaacaaatcttgcgtcatcggcaacctgaatattgtgccggttaagtgctggatcattgagcatcttaacgatgtcatcggcaccatcagtgataaggtaatccagcgattcccctacaaaaacatagccttttgttccattactatcttttgcctgcgatagccagtgatggtgtctgactgcgattgatactttcctgaactaccctttgcggtatgggaaaccagagcatacgagatacagcctgaaagcatcagcgccagtgggaataaaccggcagccttaaaaaatcccttaaaattcaacttcatgattaatcctttaaacgagtagctaagccgttgaaagcatactcttctttccctcctgtttagcg

SEQ ID NO: 9341 - DNA, 1497 bp, Emericella nidulans
  unsure (1)..(1497): unsure at all n locations
gcccacttgtatgactttttgactcgcatctatccgacctttggtggggcgaagaactacattgttacgcctgccttcgttcagagatggtttgccgggctccctgcgcggaggtcgagaacgcacatatgggcgagcgtaccggtctccgaacgaaagcgctaactcctctagcagttggacgtcatctgtccgaacagcttgggatagcagaggctcaggacgccgacttgggggaaactagagtgtagccttgccacttatcagcagcattctttgaaaagtccacagtctacatggcgtaaatcttgtgataaactctacgagatgaaatactacgtggcttaaacgaaacaaactacattatagcttttgagtaatcagccagcgattgaactgcagtctccgtgcttctaaaaaagtttcttgactcttgatataatcacgtgattttgaatctgctcgctaacccgattggtcgctggagctctagccacacttgaaatttttctgggtcttcctcacttgcagcaaagaacaaattctttgaggccaggagtacatttcttggtacctttcctgacacgcacactcggccatcttccttacattggtgagccggcctgttctcaataacagtcgcaatggccaaggaagtggactacacgatcaagccggaggctacggcctccaatattaacacagaagactggccgcttctgctcaaaaactacgacaagcgtatgttctcgtttgaatctctttacttttatactttgcatagtctcttcctgtctatgtaactgttgctgattatttctctgcagtgatggtcaggactggtcatttcacgcccattcctgctggttcctctcccctcaagcgagacctcaagtcgtacattaattctggagtgatcaacctcgacaaaccctcgaacccttctagtcacgaggttgttgcctggatgaagagaattctcaggtaaacctcgtcttttgaaaattcttcaggtacccaatactgacctatcgtctcgcggaacagggcagaaaagactggtcatagcggtactcttgatcccaaagttaccggttgcctgatcgtttgcattgatcgtgctactcgtttggtcaagtctcaacaaggtgccggaaaggagtacgtctgtgttatccgtctccatgataaaatacccgttggtgaagctcaattcaagcgggctctcgaaactctcacaggtgctcttttttcaacgtccacccctgatttcagcggtcaagcgtcagcttcgtatccgaacaattcatgagagcaaactttatgagttcgacaatgagcggcaccttggtgtgttctgggtcagctgtgaagctggtacatatatccgtacactctgtgtncacctcggtcttcttttcgtgtttgcgcacacatgcangaactgaacgtgggcaagtgaaccttgagtgaaaccaagggtatgtacgcttcatg

SEQ ID NO: 9342 - DNA, 484 bp, Emericella nidulans
ctaagactgtttatgtccaaatggcgccatggacccctacacgctaggagaggccttatctcaatatgctccgacctcatctcgtgtacatcggcgcgcccctaacgctgtctaatatgataccccgagcgcacatatttggatctgccgacgttaacaacgatatcctctaactatctattccacctgtttccacgacaacccatgtctttcggtgttactaccacccttcagtgaggactctgaaccgacgtcgcgtagcccaacctaagtcccttgtaagattatgaaatctcctctaaaaaattccccgctagcccgcccatttacgagtatcgaatggaaacacattaaccaacctatgctgtagcaaatagcaagatcagccgtccctcacacaaaaaaccggctatccgtgttgtacgctaactggccaggccataaaacccgtcgggcaaatggcgcataactacaatacagatcc

SEQ ID NO: 9343 - DNA, 561 bp, Emericella nidulans
gctaaatagcagaacatatcgccgttaagccatcactcgcctctcagtgcagtgatcaaatctgccgttacgatttttgaaaaatttaacgctggataacatttctcggaatggttgaattccgcgactcagttatatgtaacagattattacaaaggacttgactgaaagtgctagatagtgaacaatacctgccgtttcccctcccactataacaattgcgcgtatgttttttatacatcacgcgagaaagcacccccgttaataagggatgtcaacaaagaggtaaaagtgtccactgcaaaccattaaccacctgacagcgtcagtttgaacgctttccaacaaccggcgacgttctatctcatcttctcgattgagttatgggaacgttttggttattacggcctacaaggaattatggctgtctacctggttaaacaactgcgtatgtctgatgcggattcaatcaccctatgctcttcctttagtgccctggtttatggtctggtcgctatcggcggctggttaggtgactaggtactgaggtactaaacgcgt

SEQ ID NO: 9344 - DNA, 937 bp, Emericella nidulans
  unsure (1)..(937): unsure at all n locations
gaaccgttaaccttgacgccccgcatgactttcttgaaagaagcggcaagtttctcatagtacccttgttcggtgggctcgccgtactcgtactgcgttcctaaagtgtttttgcatcgaacaacatagtgaagctggggtgtggtcatatatttcaagtcaaggaattcgacgtccgtggcggtgagagcagcattgaggactcccacgaggcgagagccagaggcgcgagtatcccgggcaaagacaacgcgcgctgggttttccatgctgacatcgatttccttgatgagctcttcgtatacatcagcaatggactccatgggaacattggcaagctttgtcgcatgagtttcccactcggcctgtgaaactgtcagagattgtctcgagaggtatgagacaccattaaacgcacctctagcatttcaccctaggaaaatgagttagctggccaattgtgtaacttgttctaaggtccgagagctcaccatgggatcaacgagcttgacaccattgtcctcagcaggattgtgactggcagtgaccataacgccaacccattgaccactaagctttttagagcgaagccctgctagaagtccgacggcgaaaacgactgtgttgaggtaatcactggcagaggagcgcattagagaaggggtaaacaaatcccgcccgatcgcggggttggatgcggggtggcagatccttcacgaagggatgcgacacaatcaagaagtttacttacgccctcatacggaactgcagaaagtgaggatagcattagctttcagttccaagcgctgcagggctggagttgcaaagtcacctactcccgctgtaccatactggaagaaccttccttctcgcttcacatactgcgaggcggcctttgcaatagccttcttacctcnggagacgccattgtggtccg

SEQ ID NO: 9345 - DNA, 1243 bp, Emericella nidulans
cgtctcttgttttctcttcttccgcatttgccatccttggcgttgcgactcactctccttgcccgtatctggacggttgtcgataagcaaattgacagtgggagaacggtttgacaaagacaaagctctgaagtacacgctcagagtctcttgccggtcgaaattcactaaattcaccatcatggctcgcacgcgcaaatccagcaaccttgggtcggacattcgaggcgacacgagcgctcccgcaatgtccactatgaatgaggtcagtccaattgacccaaagcatccaagctgggaaaatgtatgaatctctcgggcattatttcagcgacgtcgtctgtgccaaaagctcacacgctcaggtcgcaccactcgccgagaagtcctcaaagtcgcattcgaagcgtcgccgaagccgatccttcctccgtcggttcaaagacacatgtctgaagcatacttgggtgctgcccctcctcatattgatcgttctcctcgccggatatgccgtcaatcccactccgtccaacccgctccactacgcgatcttcctgtcttatcccgagcctccgaaaactccaggcggcccggttatgtacggaaaaggcccgaaagatatcgcattcgtctccttctacatggtcgtcctttctttcactcgtgaatttctaatgcagcgtatgattcgtcccttcgccgtatactgtgggattcgtgggaagggtaaaaccgctaggttcatggagcaggtgtatacggctatctactttgccatctttggaccctatggtctttacgtgatgagccgcaccaacatctggtattttaacacgactgcaatgtttgaaggatttccccacagagagcacgaagggcttttcaaggcttattatctgctccaagcgagctactgggcccagcaggctattgttctccttctgcagctggagaagccacgaaaggacttcagggagcttgtgggccaccacatcatcaccctggctctcattgcattgagctacaggttccacttcacttacctcggtctcgctgtgtatatcactcacgacgtctctgactttttcctggcggtatgttacggaaaaccattatccacgtgtttcaatcagaacatgcgctaattctacatttagacttccaaaaccctcaactatctcgacgcctacattactgctccgtacttcggagtattcgtttgcgtctggatctacctccgcca

SEQ ID NO: 9346 - DNA, 1154 bp, Emericella nidulans
ttacagctcctctttctgacgatgacttccgccgcctattcaacgtgattcatcccttgagtcagattcttcactccttgaagacgagttcgcctttgacgttctcgactcaggagatttatcagcatttccatttgattctatggttgattttgacaccgagcctgtcaccctcgaagatctcgagcaaaccaacggcctttcggattcagcttcttgcaaggctgctagcttgcaacccagccatggcgcgtccacttcgcgatgcgacgggcagggcattgcagctggcagtgcgtgagaggttttcgacggaagaccgtctggttcccgatgttgtagagggtcgatggagctgggaatccttgttaacgctagcgtcggcgataaatcttcttgagaaaccggagcgacgaagaagaaccttgaggggtcttgattcgttaaagcggggtcggcgtattgattcggggaagcggtacagggtcatacggagttcacggagttcaactagcccaagagaggcgttgacgtctcggagaaagggcttatgataatttgtatattagcgtgtccactattcaatgtaagagcgagcaattgagactcgacttctcagtttagtactgtgtagtatacttcgtacataaggctgcttagtctttaggtctggaaacaggtgcctgccttggccgtgacggatgaagttattctatcacaaatggtaatatcactctttgacgaaggcctcggacatgtattatagtggtcagttgtccggggtgatttgtagcagtatcatacaaggactacacgacgatgggctggtggtgtttgcggagagaccagctgcacatggttttcgggatgacgttgccacccacaaggccccctcaattctagaaccgctctctctcacaactcatccgtccagcggttcctttgttgaaatttgagataaacactgtccggattctgttatatttttgtgctacacacgatggttcggaaggatcccattttcgaagctcgtaccaatgtcaaagtgagtagtggtctaaaccctgctgatgccgccgttctcgcaatcccaagctccccgcgttcagcatcacttttctgactacgcctgttatatttacagttacactcaa

SEQ ID NO: 9347 - DNA, 1710 bp, Emericella nidulans
taggtaaggcaaggattcacttacagcaacgccagtgtcaagtcaccatggattctcgccttcaactcaacttcaatatctagattcacatctagctttagcttcagcccgtcttggtcgtcgatcgtcttcttgctatccggggcccgcgatatgttcccgttgttgatcttctgcctaacgttctggcctccttggtcccgactgcttattgactggccgttgggctggtaggcttgtactgccttgccttggtcttcgtcctcttcgtcttcgtcgtcatagtaatcgtccccctcgtctgagtattcgtagtcatcgtcgtcgtggtcatcagagtagtcgtccgaatagtcatcgtcttcatcctggggaggggcgcgggccgagggtttttgctcgaactcggagtcctgcatctcgtctttaacaggagtgtctttttgttcttgtttctctaccgttgccattttgattgtggtgaagtgagaaaagaggaaaagtgtgggctgatgggcggctgcgtgtgtagatgtatagattcagggttgggcaacagtaggtggatagatttagacctagaacttgcttgcaggtgaagaacgactaggaaaacaataaaagaaaatcgaaaatagatgacataaaatgcaagcgtagagtatattaacgttaacaaaagtgtaaggctgcagagccagaaaaccctgtgtcgatgatggcggtggtgttgacctacgtcactggcaaaacatcacagttgtcgaatgcacgaagagaccgacttggtgcgacgacatcatcaatcaccagacattttatcggagtatgatacctatagtaggccgcctacataatagcaggcgttcattaacgggccgattattgggacggatatgacacaatcttgcatagtgccgccatatcgtcatagtctaacgattctcatctcctctaccataggtgctctgtacagtctgaaacacagcaaattgcacacgcgtactgagttctcgaccaccgttccaaggataccagcgccgtcagatctcagggggggggagaataatccgatccaaccaagcagggtcgtccagtggtacggcctcgcagtcataaagtagatgggatctgattggttttgctgggtagtcgcttagcgagatccatccgttccgagtcttccaagctgacgacctccccgatagtggtactcatcccggccagcaccagaaaacttcgttgttatggtttgactggtaagggacagactacagagcatgaaagcggttccacctgtcgctgacaagccctgctgggcgcagacgtcatgtctagcgatgggccacaaagtccagcctctagactgctctgtcaaggggcctctttcatcatagggccagggtctgactggggcaccgctattcatggaaacaatgacgctgttggactggctttgtgcgactgtgaagtaattcttattaagtctagtcatatgcagaatgcaggtagaggattataaataaattataccaagtattggacagaaacagcagaaacttgtcacttgatacgatacaatccacctacgtatatcctcccaacaatcaaatttatatacaatacccatcccctcccaaagcaagcttgatcttccctttttaccatggccgactcaaacccccaatctcccaaccccaaagaagagtc

SEQ ID NO: 9348 - DNA, 1152 bp, Emericella nidulans
cgggcaattgtcatgatcctggattcaggtttgcctgtccttcacccagtggcccatctgtactcggagagactttctgcagcttcagatattcctcctccagctttttctgcatctcgaactccgcctttcgctccagttggatgcgttgtttttccatgtctcgctcgactcctttgtgcatagactatcaagcgcacaaattagctttaatggctcactacatcaggcctgagctcaacgaaccgctttttcctgttcttgcgaccagtggacaaaccacacaattcccgcagtgaccaagctcgttccggcaaaggttaacttcgaagctcgcgacattatgcaagagctatatagcacaggatctttggaagaaaacgaaagagtgattagggtattggtgaaaaccgcagctgaaacaaagtattccaaatggatcgaggctcgtgatggcggtgatctgcggcagaatccgtgaccgccctagagggtcatccgcattgcggagatccagcttgacgccgcatcacgagcttcacccctcaaagtttaagcttaggatcattcttgtcaatttgctcatcatacccctgctgctttccgaaatcttaaacttgagggattctttccgtcgttatggttgggcttgcgatcgaagttatcctaagtttgaaagatgctaactcccttatagtccgctcagaactccgcaggcattcagaccctcctcgatgtaagctctcttgagtctagcgctcaccaactcgttatattaattcgttctgtctaggccgagagagaggctcaaaagattgttcagcaaggtgcgctatcattcatttactagcttcgatatatgctgacgtgtcgcactgtatagctagagaatgtttggcaccatagcctttcccagcatctgcaccatttactaagattattccgcagaccgcactaagaggataagggacgcaaaggcggaagcgcagaaggaaatcgaggagtacaggaagcagaaagaggaagaattcagaaagtttgaagcagaggtgagcttgtcttatccccgctatctatcatgatggcaataaagatgtcgccatatgagccgcaaacgctgtactgagatatgatggaccatgccctgctccg

SEQ ID NO: 9349 - DNA, 1151 bp, Emericella nidulans
gtgttcgggcctcgtccgtcgcgaacaccactgactaggcggtacatacctatccattgtatcggctgaccactacctgacggacctagaaacctggatgccgcagaggcccgctgtgcaagtctgctatcgttactccgcagattaaatcctgaagtagacgtcgaagatgccctgcggacggtcgcacccgagtttgaacatcaccagtatcctcacccggttgagccactggaaccagagcccgactcggaaagtccggactcctcgcgacgatttgagtggaatgaagcttctacgtcgaatcctcctgacgggatggtgtcgctgcctacggcaagtgccgaatcagggtacctcggtatgactttcggctacattttgagaagcaagttaacgcagagcaggccatagctccgggacaaggctcctgcagacgatatcggacctattcccagagaatgtcaccctagatcaacagcaggacgactcgcccgcacgggtcagccagacgggaagtccttcgctgttgctacatttcgccaataccgctgttttggacaacctgattgatgcatacttcctttggtacaaccgctcatacccgatcctgcatgagagcacgttccgcgaaaagtaccgcaaccgccagcggattccctcccgctccagctggcacttgatattctacctcgtccttgcaatcggacactgggtgtccactggcgggatggagctgggtcaggatagctactacatgggcggcccgctcacggatgtcgatgcgcatgctggagtcagggagccttgcaagccgtcaggcatttctactatggtgtgtccgatcttcaatgcaggtgggggctgactttccgggcattactctcgaaggagaccgacaaccctggttcactacatgggttccgatggatggctttgataagtttacccgaaccgcccaggcaaaaatttttctttaaaggcgcgaaagctttggggggtattttccagggtttctgcaccggaccgtgggaaactttttgcccccctaatagaaaaaggccgcccacaaccattgtgttattttttcctccaccacacctctttttaagcgctttggggaacttttatttctcccttctcaattcatc

SEQ ID NO: 9350 - DNA, 901 bp, Emericella nidulans
tgcgcccggcaatatctctggcttgctcgcgtgtactctttcttgcacttcgtcaaactgtaaagtgcctgtcgagtgggaggcggtagctccttaacttctttgtgatgtgcatagtccccaaagttttgctgaaagtcctgttctgccttctcgaaagcgcgcttcatcttgtcccggtattgttttctttcagagactcggttctgcagagcacgcacacaagggatttcgttgacacagcgagtgtcctcaagcctgtaaggtcggcggggatcgatcgaccggctcatcgatgctgcgaaccgcatcagctgtttctgagatggcagcccccgaacaatcgcctgagcgtcaacatggatgccgacactataatgtttaacaaaggtattgatgctagcatgctgcaacatcacattctggagctcgtttgtaacttccgctgtttggccaaggcaatggcaatgttagtaagaacatgtccatttttgtcgtgaacaaggagactcacgactgtcattgaatgcttttgcagctccataccgcagtccgtagggcttggtgacctgttcaaaccctgtgatttcacctccccgcttcattcgatatcgcagtgctccttctgttagttgctcccccaacaggattcgaataccgtctggttcgcggacggcctgacagaacacaaattgatcaagaatttcatctttcaatttcagctcttgttgtccaagtccatccaggacaccaagtttatacaagttttcaggacagtccaacacgagcccattctctgagaaattcttgaacccctgaatacgaaacagcatccctagaaggaacacatgagggctcaagaccaatgttgggtcaaagataatctcaggaatgggaaagg

SEQ ID NO: 9351 - DNA, 952 bp, Emericella nidulans
ccggcacgctgggatcatattcttcagcgtcgagaactcctcattcattttcgacctccgacgacgttcaatcaaactgtgcgccgtctttctcgcaatcttgcgcccagcggggctgggtagcactcggctgcttcttcttggaacctccacctgcagcgccattagccgcagcttttgtgtttatctttggcgcggatttggctgtagccgccgcagcgttaggcgacccatcggtctttggcttcatctgaatgatcttgcgggtgcgagttggaggcggcgggaggtctagatcctcgagtggtctcttgaaaccggcctgcgcggcggattcacattgcggctcgggctcgggtcaattcgtggagatgttggagatgcagggaagagtattgatgggttcgatctggatgatttgcgacttgcaggtgcaggcgcacgtccaccttggccgggctgagagcagcagggggcagtgcgaagatgtctgcaccgtcaaccattggctgatctttgactatgagctctccagacatggagggcgttggagggagacgggagcgtgacatgatcggatctgagcgacgatgataacgacaacagggagagcgtctggaagctcttaaatgcggagttgagcgtggagggacgctggagaaagctggagtgggacaagacgggcaggttcacttgtcacgggtgttgtacaattttcttgccttgagatgcaaagaacgggatattaatgagaccggggaggatattcttccttgtacccgagcaggcatccaatgtatacaccggcaccgtgctcaactggtggcgcctcgagagaaaacagcgcacgagccatggtacccttttgctaataagcaaattgcgggttttgaggagcgaaaattggagcgatcgacgggggtaacgaggaccatagatgatgcgggtgggt

SEQ ID NO: 9352 - DNA, 339 bp, Emericella nidulans
  unsure (1)..(339): unsure at all n locations
accccattttgacgcagtgatcccgcgtattggcaccgcanttaccttttatgggacggcggcactgcgccagttcgagatgctggggagctatccgctcaatgagtcggtcgccattgcccgggcgcgtgacaaattgcgttccatgcaactgctggcgcgtcagggcatcgacctgcctgtcacgggcattgcgcattcgccggatgataccagcgatttaatcgacatggtcggtggtgcgccgctggtggtcaagttggttgcaggcacgcagggaattggcgtcgtgctggcggagacgcgtcaggcggcggagaagcgtgaattgacgctttc

SEQ ID NO: 9353 - DNA, 1335 bp, Emericella nidulans
cagtatgatgcgcatgtacacctggtttggcaggaaatcaaatttggtgacaatgatacattatcagccatcacagccgcgatggtcaaggctgattacctctttctgatgaccgatgtcgactgtctttatacagcaaatccacgaaccaatcctgacgcacagccgatcgaggtagtttcagacatttcgtcactggaagcggacgtttcatctgctggctctgcccttggaacagggggtatgagcacgaaaatcacagccgcgaaattggggacgagcgctggtgtgacaacaataattaccaagagctcaaaacccgggaacatccatgagatcgtgagatacctccagcattcaaggcaagcggctcttgccgatgctgcagatgtagagattaccgcatcgaaaccgcagacgccaatcccacctctgcatactcggtttcttccgtccgaaacccccattcagtcgcgtacattctggctgctccacggattgaagcctcatggtactctgtatattgatcaaggcgcatacactgcacttcagaagaaagcgagccttcttccggcaggtgttgttgacgtagacggccacttcgggcagcaagaagcagtccggatagttgttgtggagagaatatctcccgaatctctcaatggcgattttcttcatccaggccaagagccaaaagaggtgggacgtgccttggtaaactatggcagcctcgagatagcccggatcaagggtcaccgaagcacccatatccagtcattactagggtatgcggatagtgaatacgttgcgctgcgagaaaacatctcttttttcgataatgacgaacaagtacgacgatagtttcagcgcgttgccaatatcatgttctatattcatagaagacgattgatgcttattcatggtaacaaatcatcatactgagcgttctataacccttactttggtatataccccaccctatccgtttgatttatttatcttactgtaaatatagcatttgagcaagacattgagctggtggaaaattatcttagagccatgaggatgacaatgaggaggccgaccaaggatctactgtgctgcaaaggcatcgtatcgaccagtcctataagccaagtatccatgttattaatacactttgacctagtcaaagtcattcccaattccctgcctctctgtcaccatcaagaccatatgttatatcgcaagaatcaagggtgtggtgccggagcagcctagatttacccgtcaacagggtttgatcaaccacacagaacatcagggggggatctgcagaacagtatatcgcagttg

SEQ ID NO: 9354 - DNA, 146 bp, Emericella nidulans
gtccaacgtgtaagcgaggctcctcacaggatcgaaagaccgcccggagtcgcgcaccgcgcgtgaggcgacaagctcctagaccccagcgcacgcctcccgatagacccggatgacgagcccaatctcgagagaaccgctcgcga

SEQ ID NO: 9355 - DNA, 1300 bp, Emericella nidulans
acggtctgaaatcaaaaggtcggcgaacttgtccattgggtgcgagccgtccagtccgtatagtggatatgggtgtcggagggcgcgacgaagatagtcggtcgcacgaacaacaaaggcagagttggataacgcttcaacatcagacgttccatgaggtgcttagagtgagtgtacgaggatgagaaccgggacgtatgaggggactcgccggactgcttaatagacgctatctcctcctcgcagtctgcatccgagagatcgtacaaacgttcaccgatatacccgtcaggcagaaaactattggcgtacgccgtggatagctgaataaacagtttcagcttcctaaacgatgaagccagccgtgccaactccagggacgggaaacaattgttttcaagtgcctccgtaatactcgaatcgagagaaatcttggccgccgtatggataacaagagtgacctccgctctcaagctcgccaaacctccggaatcgatccctaaatctggctgcctgatgtctccaataatgaaatgaatcttcttcgaccccagcaacgcctgcgcctgacaaggcatgctcctcctccactttctcactgccgtctcggaagattcccgcactagaacaaatatttttcgcgttgggagctgcagcgccagtttgtacagaaggcatcccccgagagaccccgtacttcccgtaaggaatacagtgtgagcttcgaatgccgccgcatatcctttcttcatgacctcctccagctgtggagaaaccatctgcagcgccattggaacgtggacttgagcacgactgcaaccccggtacggagctgtgtctgaagtgatatgtatgaggaattgacatcaaccctaaatctgcaacgacaaggtcaccgtatatacatcggctattgctgcccatgtgccgtcgacgtacacttgctctgtaccacagtttcatgtaccccttaataaagagcgacccacttaaccatccccatgcttcaactacctaatgacccagatggaggtaacctaaaatacgcggccctaatggcctggactggtattcaagtcccacccaatcctttataccgcaaaaagttgtaacttaacttgttgcaaagccctaaggtaggaacatggttcagggcaaaccactacctattatggacctttggtggttttaacctaatttaaaccaaacggaagacccgtggaacacccggacgggatattacaaaggaacctgagaatttaaactaatacccgggccctatagcgcaattttcttttct

SEQ ID NO: 9356 - DNA, 238 bp, Emericella nidulans
gaggtgagacatatcacctcagttcaggtggccaaattcagtaaaacacttcaagcctaatgagtcgggttcatgaagtgaggtcttagcaatagcgcctccacatctgttacgcgcctttgaagcggctggtcgtacccgaacttttgcgctggccgcctctgagttggaactgacacccagtgcgatcagccgtggcatccgcaaactggaaaacttgcctgatgtacgcggtttt

SEQ ID NO: 9357 - DNA, 1970 bp, Emericella nidulans
gtggtaaagccgagctcccgtggctcgtgcccaggaaatagggctggttgaacttcaatttaccgtaagctgaggcgtctgccgtgcatgtggctcttcagggatctgcggcagcacggtcgaaagcgtactcgtggaaccatactctgcagtcactgatggcgtccggtgctcgcaaggctcttccgggatcggtggcagcgcagtgatagattcggtgaacccgctgtctgtggtcacgcatttgactgggttctggatatagactggtcggacagggacgagcccgattgaactaacagatctggccgggcggggctcggcccgttcaacgtggctctcatccgcccatacagaagacggtatcgtcttcatgctgaacattgacttcatcccatgggagaagccccgccgcgcgaggaggaagatgctggggagactgacgctgatgacggcaatggggatctcggatccatgccaaaagatcggagcaacggtgttgactgctaaacgttaacgagagaagacgaagtgccaagtggacatacaggtaggatccattgcaaggtgctggacggtccatgctactgacgccaaacgtccaatggagaccaccaccacgctatctctctgtcagcggttttgtggtttcgctcagagttaatcaagaataaggggagctcacagatggccaagaatgatgacgagcacggcgaggaacttgcgggatggtttcatttgcagtccccagaggatgggaataggcaggactaggatcagaacgtcgataaacacgctagaaactccactaccgagccagatatcggccggtcggcgacagtggccaggcgttgattgattccacactttggcaactggggagcacatgaagattactgcgagaatggtgcctagcagccagagcacgttgaacgcttggagtgtccagagagagtaacggaaccgtgagcgcgtctgggtgaacactcgcgcgtagaagaacagggccgaggctttggctattgatgcacctataatgaagatgatatacactgcccagaggaatctgaggaatagcgtaatgttctctggcaagacgatcaccgcgtgacggcccaggccgagctgcaccatcttgatggcgaggatacagacagcggtattggaaacctgtgcaagatacaaataaagattattagataaactaccacggtggagaggtctggagctgaccgtcgctaagagtgctgtccagtcatcccaccagaagcgcccgattgtccttctccctggtccaacagaaggcatgacggctcgcgaccagaaccgcaatgccacagcgactaccgggagggccaacatgatgatgaaatgaatctgcaagggtgtaccgcgatcttcgtaccaatcgagtactggcgaggcttcgctgacggttgacatgatagcagcatcgagagggtcggcccctatcagacgctcgaggaggaaaggagaaataggagaaattcggggagatacagggtgacaaattcaagatacagtacgatccgacggcttcgggaatcacgtcaacatagggtacacagcatgtcaacctgttgcaatctcatgatttggtctggtgggtcttttgagattgtttgatcggacagcatattcgtctgcattattgttggaagggaggccaaccgttactcatgaaagattgattgataccataaaggttagacaatgcagatttgagtagaggctttaatagaggctcaacaaagctcgcaacctgtggggttgatataacatgtctgcggcaggaaaatgcagccctaagctcccagttctctagattatgtgcatttacagccatcgcaaacattcgaccactctctggtcagtaccttggggaatttaagtattcattctttcctgatttgcgtcgctatacaacttgacatgcttttatccataaa

SEQ ID NO: 9358 - DNA, 1453 bp, Emericella nidulans
tctcgcgattttatcgatcatatacagtctaactatccttctgggctcctaatgtcaacacaatttgcctagtccgcgttggccgtcatggagattgccgagtatgcgcatttacaggcgcaaggcgtcgtccaaacacaagccatctttgctggacactcgctgggagagtatagcagcctcggtgcctgtacaactatcatgccttttgagtcgcttttatcgttgatcctctatagagggctcaaaatgcagaataccctgccgcgcaacgctaacgggcgtactgactatggcatggtcgctgccgatccatcgcgaatccgatcaggtatctcttttccctgatcatgcgcgacattctgagttaacatttcgtagacttcaccgaagaccgactgattgagctagtgcgacttgtcagtcaggcaactggcgtgttgctggaggtggtcaactacaacgtgcattcgcggcagtacgtatgtgccggccatgtatgttctcgctcaaactccctgtcatactattttctgttttcctatcaggcctaatagcgaacaggtccgctctctctgggtactcagccacgcgtgcgacgatctatcccggtcgacatcgccaaatagcccacaaaccatgagcgaatgcattgctcaccatatccccagcagctgctctgtcacgaatgaaactgaactatcccgtggccgtgcaaccattccacttgccggggttgatattccgttccactcgcagatgctacggggacatattgatggctacagacaatatctgaggcaccatctgcgggtgtctgatatcaagccggaagagctcgttggacggtggatccccaatgtaacagggaagccctttgcgttggacgcaccatatattcgattggtacaaggggtaacgcagagccggccgttactagagctgttacggcgggttgaagagaataggtagctggtacatgttcttagcttatatcatatcggcagaacggccgctaaatggatgaaatggaaggtacacgtaataaagtatcaagttcgttctgacttagtgaaaactagcacagcctcatttagaccctacctacatgctaaaattccctggtccgaatttccagatacagctccctcttcgcccaaattgaccagatcttctggtccaaaaagttccccgtcctctcctcgtccaggcttatatcaaaatgccacagcagtttagccagcgtcagcctgacctctgcataggccaggttccgtccaatgcagttgcgcactcctacagaccacggctggtacgccgcatagttgtcgtgtcggaacggctcctctaacttggcaccggccagatgccgctcaggaatgaacttgtccgcatggctgaaagtgaatggcgcgtaataaagccccaagtggctgacaccgacgcgggtcta

SEQ ID NO: 9359 - DNA, 784 bp, Emericella nidulans
cgtcggcatgacgaaggaagggaagatgtaccaccacctgtggaatgcagatgagattaatgctttgctcaaagagcatgggctagccaaggtcggcgacgagcccgaagctggtgacataaaatagatagagttacggatctctgcttttgctcgacctagataatgccagctgttcgttgaccttgtcgcgcccaaacagatgtcgctgagggtatagggtctacttactccagacacgtatatccttgaccttttagcttctactcggaaacaaagccattcagattgtatatgtcgcctgctacacctgcatctgaagcacaaccagcgttgcccactggtgacgtggcaagcagcgacatcacaatgagcgccaaacaatatgattcgcatgtttgctctagttttgtcctattgagcgatatattatcacaaactcaacagtctaatggtccacgtagcttgtggcccgttacgtagattatggagagcttgaagagctgaattatctgggacatagtcgattgtccttgacttatatagcttaccgatcgtccgctgcttttttaattcttcccctttccagcttatttcccatcaacgccctacgtttgctttgctaacaatcgacaatcagagatggacacagcaatgcagctgattttgtccaggcattcctgctaagcactgacccgccttgatatggggtgccgaatgacaaagtgagcaaaaatctctgatccttccgctcgccagtttgttccttcaactctcatagagt

SEQ ID NO: 9360 - DNA, 1404 bp, Emericella nidulans
taatgaaaatggaaagtagagataataaaaataaagggaggtgtgaccaaatagaataagggaagagttggtcaacacaaaagttgggtttttatgtagaaaaaaaaaaggggcgcattttcaggaaaaaaatgtcgttaagaaaggccccggaaaattttttcggaaaactacaggcctatctgttgcaggccaaatcaacacagtgtcggtcggatcaacatgtggcgcagtggcatggtgtcgaaagattcttcgccatttggcaaaaaatcggatcttccacaattaaaggtaagcgcaaagcggattataatagtaaattaaatggagcattgcgtttgaacctacttgctgaaaaacgggtaaggagtaagcttgagcccactgggcctaaggatcaatttgagagcctgcactggtcatctatgtcaatcctccaagtatgtgctttcattgaagcaaatctctcacagtgtcggcctttccagccagtgatgcactaggtccgctccctatgcagccatctccttcggttaaataggtgaacacgctagggaagcacgctgtgtggcgtccatggacaagtctcgggaactcagcaacgatctctgaaaacgcaattaacgagctggtgtatcagcgagaagacataagaaaggcgttctgaagctggaattccctggctcgccagtgactgaagggccgtctctcactttttcgtgtgtaatatcgatgattcctgtcgtttcattttgttgattccctctcttgcgatgcttttttcctggcttccaactgttagtggctctctgtttgttagccgtctcataccatgtgcaacctaatcctgaagctaatcaaccacacaatcacatcgagctggtttcagcgtgccagacgcatttgctgctggttggaggaaaagtcatgatcaccatgatcgtttgataacatataatccaatgaattctttcgcttttgacgagtctgcaagaatttgcgacagaaggtggaactccttaagcgcctgtattcctgatagagcagccagtctcgacaaggatagactggcgtatagactggcgtcccgtggctccgggccgaagacaaaaaaaaacctgctaggaaaaaaccattgttctttaacaccggcctctgtagatgtgtggcatgacggctctttcactgactcccatcgtctcagaggttgtgaggttgttgtcaacttgtcacagtcgaccccgcatgcgaaatagaagccccgtcacatgagattcacacttagtaagcgacacaacacctagggcttttcaggaccatctgcacatcaggccattagtgtaatgacttaggatcattgatgaattacatgcagtctgaagaaactctaatgagagttga

SEQ ID NO: 9361 - DNA, 583 bp, Emericella nidulans
atcctcgcctgttttgggcacgtacaagcgccattactctgtagccctacagtttctgactttaaaactccgtagaatcacaagaggctggtagctcccgtgatgaattcagagagctctgcgataattgcccgcttgctccgtaactacacagatacggagcgatctttactcagcctgctggtagcttcgttattttgttgatccgtaaagcaaacaagcagtttgtgcgacactctagaaacaatttccaaatacgtgcctaaagcaaagtacattagagcagcaagccaggcactttaaacaggtaagccacaagtgtggcggtgcatcttcactcagatgccggcgtcacatgtccggcatctttcaacctcttgggctttgccacataacgccagagagatggccagcaaaagaactcgtgatgctttcgaagccgacttccaggcgcagaattctccctacgttttctacgggactgctcttcctccactggacgcaggcgcccgcgacgatggatcatatgtgccggtttggaagcaggaggtgaccgatgaccggggaaggaaacgcctacatg

SEQ ID NO: 9362 - DNA, 143 bp, Emericella nidulans
ttttcagtgcagcggtgatgttaccaaacgtagggcaggagacgatcaatgcgcataaaggacagttcagggcgagtgtcagccatcatttactcagattaacgttagcgcccgaaccgtacgagcgacgctgccacgatggt

SEQ ID NO: 9363 - DNA, 1657 bp, Emericella nidulans
gagtcctgggaaggcgagaagatccttaatcacttccacttctttgacaacgccgaccccaccaacggtttcgtcacctacgtcaatcagagctacgcagagtccgccggcctcgtcaagaccaccgacagcgggacctctatttaggtgttgactatgagaacgttctcaccgtagacggcccgggccgtgagtctgtccgcatcgagagcaacgagtattacgaccaggggttgtacgtcgtcgatatccaacacatgcccggcagcatctgcggcacatggccagccttctggaccgttggccccgactggccgacggacggtgttattgatattatcgagggagtgaacaagcacgatgcgaacaagatcgtgctgcacactagcgatacttgtgacgttggtggtggctacaagatgaccggcgacatgacctcaagcgaatgcggcgaacgttcaggaactatcggatgcgttgtccaaggcaagcagggctcctccggcgaccctttcaacgagcaaggtggtggagtctatgccatggaatggcaggaaaagtacctcaagatctggtactttccccggtcttcgatccccgagtccctcactgcgggcacccctgacgtttcgtcttttggcactcctatggctcacctccagggctcctgcaacttcaaggaacgtttcacccatcagaagctgatcctcgacacaacattttgcggtgactgggcgggcggtgtttttggggacagcggatgccccgtcagcgaccccagcgacccaatgctgagttgcaagaactatgttgccgagaacccggctgtatacaagaacgcttactgggagctgaactctattaagatctaccagcttggtgggactgctgaggtggagggcacccagtcccgtgccgccgagtctactgccgccgaggccactgctgccgaaacgactgctgctgcgacgcagacggctaatgggggctcaattgaggagattactaccagcacccacagcgttacccggacaaagaccgtgagcgccacgcactcaactgagactgccgctgtaactgagactgctgctgcaacctacgtgccgccagtgttgcttcggaagttgacgcaaccaacacgcaacccgtctccaagactaagagcaccagctacgtcacctccacaaccacactatgtcccgtcgagagctcccaggcggccgccacggaatccgtctccagaacaaagacaaccagctacgtgacgatcacgacgacgctctgcccagtcgagagcctgcagactgccaatgccgttcccagcgcaaaggcctcaacagacgcagctgcagccacaaccccggcggctgaacctcacccatccaacgcggagacccccgcagactcgaagagctctgcagacgccgtgaccgcccaagccacgaagacaaccatcgccgtgaacacccctaacccggcgaccgactcagcctcttcggttcctccagatagcatcgtctacacagcgccagaagtgaccagcagctcgtccgttccactgttcactatcgtctcgtcctcctcgcagttcgtgactgtccctactgcggccccatcgtccttcgagcctacggacgctgtgcgcgacggagccgac

SEQ ID NO: 9364 - DNA, 144 bp, Emericella nidulans
tacagattatgatgatcatcaatatcatactagtatcacatacgtagcagtctctaattgacacaacaatactggctctgctaccgatctctctaacaaattcgctatagtctttaacacatctgttatcaacgcgataaaaaa

SEQ ID NO: 9365 - DNA, 750 bp, Emericella nidulans
atcataaggacctggcgcgcggcgttcacgtctacaccttttggtagcttcttcaaaatttccatgaatgagtcgtcctcgacgtcttcgtccacatcttctgcatcgactgcatctgcatcttcagccgacttacgtccttgcgaatccaggtcactgaaaggtggtgtaatggggcgcttggtctcgggatttggttttcgtcgcacagggcttcctgcgatatttattttatctaaaccacggactatatctcgatctgggtcccgtacagtatctcgtggctgtggggttgtgtttccggaacttgaataagtcccagatgacaatgattgtggcgcttttaatgttatgggtttgggtttgacggctggcttcgaagggggccttgtcggagggtcactgaccattttcgaaggtgattgtcgaggtcgactgccagaggttggtcggtgttccgtagaatcacggtgccttagtttcggagccttgggtgttgaggatgggctctccttcaccggggaccttctccggagctgggcatctccagaatgggcgcgaggaattcctcgaatcgagtcggagtacttctgctcggacattttaggacggacggatgccaacgcggcatcgctgctcgctttatcagaatgataaagacttcttggcgaaggtaggtcatttcgcgggtcatcaaaatctttccttgggtttgagtcattcgagaaactctgccgcgaggacgccact

SEQ ID NO: 9366 - DNA, 1638 bp, Emericella nidulans
gaccctaatataatcgaatgttaagggtatggcgaaatatatcacgggtataaaccgtgatgagtgacactaagcctcttgttgcatcctatctataagaagtacgtcagtttcatcttataaggtgtaggttaatgtcatttatcatcaaaaatttccagggttgtcagacgtcacgacagcatccaaagtcgcattactcgacaacaggatcagagagctcactgcgagttcctaaattatatagcagtggttcaacgtcctgaagactgtgatataaagcacagcttttaggcgaagatatatatatatataatttgatgaggcaggattttatgggtcttatatcaacaaagtagctacaaaattagatttaccaaaaagcccatattcctcgcccaggctagcggagtgggttacacagttagctgcatacttcacaggattcagggtttcttcgtgcattatttctagggaaagcccttttgggagtggtttgaggaatatgaattaccgaccaattgggggattagtgtaagcgttagtgtaagcgtaaatgttagataactggctaaataccttcagttgcttgagaagtgctttgttcttgtaacaattgcgcgtataggggtcttgatcacttgtccttgacagtcatgggggtcatctaacgcctgaatttgagaagcggtatctacatgcctctatctattcaatcttcttcaagcgagcttaggcagcggggatacatcctttgatagacaggtactcaaacagttgaaccgcttgatggctctaactacctttagccgaggattggttatagaacagaaaatatgtattgaccagtagcaggcgccaaatcatttactgagtcctccttgatgtcatcatctccttctgaatcgccctctagaaaagcctctagcagctcggagctgtcgtcatcagagcctcgattatcagaggccattatccaatggctatgttgctccagacgcacattggcaacatcctgcgtcgaccaggtacgcaggattacatttttcagccggagtgcgaatatctgttctcccggggctgtgcaactgtgggatgtattgcgagaccgttcaagtcctgccgacagtgcaagttgcccgggatcggagtgggcgttatttggacggggcctgctgccattgcaggtgcagacactgcaatgccacccccaaaatccgacgccagcgccagcccaccagaaatagcggcatcgaaaagggtgtgcagaccgacaacaaaataaacgccatcatgatttccatcctcgatctgctcctgcaaccaggtccgtacctgaggctcttcgcataggctccggaaccatgagcttggtttgcgcagggtatagacccgacccttgcgcgctgtcagggtgacttttgcttcgtcggttctcttaattgtccagctgactattcgagagagcaatgcttgaaaattgttgtcgatttggctgccgaacacgctcgtgaagtcatcgatctccttgatggtgaaatcggcatcttgtaaagggatgacgctttctagcgcgtcgaggtcgatgtctttgatgttggggaccaggctggcgggatgtacatcctatgagaaaaa

SEQ ID NO: 9367 - DNA, 874 bp, Emericella nidulans
gagaaggtgaagaacgacgcgtccgccgagaagagcaccaagaagagcgagaattctgccgctgaggacacccccaaggagagttccgagaaggaggagaagggtgaggagcccgaggctgagcccaaagagtaagaagagtagaaagagtaagagtagaaggaggagcccgaggacgtcaagcctaagctggaagagggtgagtattcacataagatatcttcttgcttgttctctcacacgcggaattactgagttccgggtcaccgcttgactcggtgacaccatgaagccgggcttttataaactattgcacccaaacgactgctatattttttaaatttcagtctgctgatgctgtacctttagaatgtgccaactcccctcagtgcgctccttacaagcaccactacgacgagtgcgttgagcgcgtgaccgcgcagcaggaggacgcggactacaagggtcccaaggaagactgcgtcgaggaatgtaagtacaccagctcccagagctctacctaaggctacctactacccttctttaaccgccactaacttacactcaaatttagtcttccacctcgcccactgtgccacccagtgcgctgcccccaagctctggaaggccctcaaatagaggagatgatgctaaaataattcccgattcttggtttactgccggatcaatgagaccccgccaagcaagtcaacgacatgattcggaacgctacgaaagaaaacaaaagccagcagtcgtgtactgcgcctgaattgggatactgcatcacttctttgtcgaatttacgcttagaggattaaaggatgatatgaacttgtccttcaatgtattgtgtgtatgtacagatagctgg

SEQ ID NO: 9368 - DNA, 2415 bp, Emericella nidulans
  unsure (1)..(2415): unsure at all n locations
cgccggcgcagggaagaaagactaagaattggacgcgatgatctcagactggtcgctgaatgcaacggatgcgagaagagttgagttgactctagaaagtggcgtagtacgtctggggctggctcatagcactgagtctggcactggcagagaatcggacccacgataggagtctgccatctccgcgcattatattgatctgtcaatctccgttactgcaattattgttggtctgaattataggtacatctggttcacaagcctctccagcctctccagcctttcaagcgcgtctctctttgtcctctacgttcctcattcttgggcgctggctctcggcccctcgcccaacatctagactcgtgctcgggtatcagcctgggaccaagcaagctacctgactcttaaacgttcgtcaaccttgacggcaaaccaacggtaccgtatatgaaggaaggagcgaaggagacagtctcgggtagacacaaagctgggctgttccagagcggatccgcacctagctctccccactggccaaaagtctggtactaagctacgtaccctacgtacagagtactcgactccgtatagtacagtcagggatggaaatcaagtccattttctacctagttcgttcatagggaacgacaccacactgtcgcacttccatactattgcagaccccatccagctacttttacttaagcttaagggcgcacgaacagggcgtagtgtcccaggctgtcgtttggggccactggctagtagttacacccgaccccagccggaagcaagccgagcattccgcggcgaatagcggaaaggctagcaccatctcccagattcctgggacttcttgagccactctaagtgtcatgttcaaccaaatttatcacgccttagagtagatcaaaaataggtctttgaatcacgattgaaagagatgcgcggaagccctggcctcattcgaagagaggattgtgattcggcctggaacggatgcaggatatgtgaaggagcgggctttctttgattgcgcgctgtccgatcaccgtcgactgacagttacagtactcagtactcagtactccgtataaaggccaaattgctgttcttaccagttcgggttagatccaaagggtacatcccctgtggggcggaagaaggtcccactattgagctgcccctattggtattgacgatactccaatttctcttggctcattgctttaacagctccccatgattgaatagactgctgtgaacgggggaaacgccatatatgcacacaagtattaagcctgcagccctgaacgcgccgacctgcccgcctgggccatttgaagtgagcatctaaatgcccggcccggtccagagcgggagaagtttccatctagctagcagtctagcagggattgttttgggaccgtcgctcctgcctcgtggaaatcaggtacaggacgggaccgacgggacgggtaagcgagggctgtgcggcctgctgagctcgcttggtgtctcgtgtgccctcgggcggcatatcaagatttagcctatgagatcgctaactggaagaggaaaccatatcctggtgagcgttcctggctcaacggggttctttctcgtctcagccagagcagaacaacggtctgtacttttggcatttgtagtgcggactttcgggtctcgctctaggtcgcacgaattcagcattactggactagtcgtgtcccggacccgtctcctttccatatttccacgtgggttggtgcagaaatacaaacgggtgttccacctggcgggctgccaggccgaccaggagtaacaatagcacacgggacgtcgaacactatgcggcgaattgaggactctgtggtccataccgcacactggtatgtggtatgcgggtataactctgcagcgaaatccagtatgtcaggcattaaaggaacattcactgtcgacctccctacagagtcagagtatcaatctttccccttttactccgagcctgaggtacccacatggaagtcagactgttcgtttgcgtagctcatcgccatgggtggcgtcttggagtgctccgtacgtataaggtgctggccaggaagacatactatctttgncgggcttactcatgaagatctcaaagtgagcgatatgctgctgagcctgaagacatatctgacgagatgctgctgatctgagtatgctgatgcaccctatactacagttcttgtcgaccaagcggcagccactaatattgaacaccgacttgtgacgcactgtttacagactcgcattttcgttgtccgtttgcccatctcattttattgatattaaagaggtataaaagaaaagaggttaaggcgtgcccccccccccccccccaaganggggggggggggggggggg

SEQ ID NO: 9369 - DNA, 1605 bp, Emericella nidulans
cggcgccgtcaaaactaacccaacgggtgaaatggggccaagactgtgagtcgatcaaatcggctgcctccatgcagacccttccgccaagcagcgcctcgaggacaaaggtgacggaatttggaaatctgagcagtgctgggcgtcacgaactgacctcgagcacggccgggggacatttggagactcctagtcgagtaatgggtgcttccccccggttattcggagaccttcagtcgtccccagacccattccagctgggctcaattgatccgtcggcgtcgcctttctttccacaacagaggttgttttgggaccacggacttgatcagcatacatcagatttgcccttgcatggaaacgaaggcggtttgttcgacactgacactgcagacacactccatgccaacacaacggaagccccgcaagacctccaaatcccgcagctacctcatatcgacaggaacatggagctttctggtcttaacaatactatgtatggcctctcgtccggtgttccgaccgatgcagctttattccccgctcccttttccacgtcgcctcgacttcccctaccaaaagcagaggatccctccttgttcctgagttcccctgcacgacgatttggggggcctcagcctactcctgacaaacggttgttttcgaggcaacatcgccagccgtaccatcatcagacagaggaattcaagcgggaagagctccgacgtgctcagggagtcaaccctcatctatctgatgatgagactgacgagtacacgcctcgtcaaaataggcctgcgctgacccgcagcctcactgtaagtgcagtgagtgcgtctcgtccaggctctggcgggacgatgtcctctgctagtggaatccggaagagcccgtcgaaggggcggtcctcgccgatcaagtctcttcgcgctccgttacctagatccaactctctggccagtgtgtttccacgctcccagtcggtagtcttgaagattggcaaggacggtagagcaaaaaccgagatgcagccggtgcttgaggcgtcgactggcttgaccgatcctctcaatagcatggatatggacggctccgctaccgagagcgaatatgactcggcagagtttccggagtatcccccatctagcagccgcaatccttcgttcgtcttctcggaagctggaagatcgacaattgcccgcagtgaatctggctcgcggcccccttcaatgggctcttacacatcgtcgcattcaggccgtgtctttccttgggctactgcttctcgtggtccggcttggaggccgccactaaaggcgacattggaagactggaagaggacaacgaaaaggccgcctttgagactttctgacggtattgcaatatagcaacttcgctcttatccccctgaagatttgttcgttgcgatcacgttacttgtgatctcctacatccctactcaacggcttcacaagccaatcgactctactttattctcctaatccattccctttctcatttcccgtgattatagtcctcttcaaactatgcataatctcttttcccctcttcacttccgcatttatcactctcttcacacttcct

SEQ ID NO: 9370 - DNA, 149 bp, Emericella nidulans
cgctcatattcgtattcctctgtagcggcctggccccggctcgtgcaagctctagtactcagttcagacgatctcgcggcgtggaggctcccaatgactacctggcttgcgtagaagcaactagccttcgtaatctgcaccgcatcgct

SEQ ID NO: 9371 - DNA, 2190 bp, Emericella nidulans
gggggggcccccccttcccccaactataaaaaaaaacacgcctcttaattatccaaaggaaatatcgtttacaggaacaaggcctccatacagaaatacaaacgtcctttaagggctgagagaaaagtctcagccaggcacgtaatagtaatagtctgaaataaataatatgtttcggcgtagagtagcaaccagagactacagaggaccagttccacaaaaactaagcaggctcatctagaacgggtcaaagaactttgactgggaaagtccttggtccaggatcagcttaaatatttacgaaaatcgccgaaggctgtacacgaaggattatgtcaatccggcggattcggttgaacgaaaccaacctgtctcttgccacgtcaaggggctgcaagcacacgccaaatcactacgctcgaatggggcttactaggtagtcgttaggctgcccatctgggttaccgtcttctagcactctcatcattacccagcgtatggagccggaagcccggaatcgggtcatcgggtcattgtcagactgcccttacaccatatactatgccactgcatggcttttgcaaatctccgtatggatctctctcgaaatctttcatgcgctatcgaaaaatctacggagcgtctcgatcctctgctgcaacgtcttcccttcaaatggttcctcatacaaggccctgctcaactctccgacaagtctgtctgtctctgactctccgtccctgtctcgttgacccgaccccggtttctccctcagctctttcatcctctcgtactctccaataatatgtcttgcctcctgaacccgcttccaaaacctctccgtctcctccaagtaccaagtctcctgcaccggaacctcccagccccctacccccctctcgaccagatccaaccaagtctccatatgctcccagcgtttctccccaagccccgggaaatgcaccaacatgttcccgcgttgcccctcgtatgcatgagcccactcgtacgtgttgatccacgtccgcgggagatacgtcgctccctcacgataagaagactggttaagaactttctccatggcggtttgatcaacctgcaggtctagatcgacgccgggattgtaaatcgggtaggccagtgtctctatgagaaacctgacgctccattcgtggaccctgagaaagaagatccctgtgttgagacccttgtggtctttggacgcgaccatgtggatcccatctaacgtcgacggggggaggaacagctctagcggtatgagggaattgatgattatcgagtcggcgtccacccacctgtgcccgcgatcgatccaacacatcagcgttgccccatcacactatgagggttggaacggattgaccagcggcttgcagcaaccatacgtacatcagccattcgacccgctcgttgacgggcttgctcagctcccttatcagcagcgcaagcaagtaactcggcttattccagtaccccttcgcaatctcattctggaggacttccatcccatacccccatttctgggcatggcggcggtgggtctgcaatgcgcgttcgtagaacacgttgcggggtccatagagcatcgaggcttttgttatacggcgagccttgactggtgcggtgagatcagcccttgatgcggtccatggtaaggaggctaaagctaagaagctggggctcaggtgaaaaattccgaggagcgagactagggcgagggttaggatgaggcggcggcgggtgtgcgcgatagcgatcatggcgtgatgctggattgcactgctgcacgcagacaacgcgcagcgggaaacttaatggtgagatggtgagatcatcgataaataatccgtgtcgaggtctagagacgtgcaaggggggggggggggggtcatttggcggtgtgggtttttttcggggcgtgctcggactatctttcttcctccttttaggcctccttcatcctttgtttctcctgccccagttttaacccctgcttttctaaccatttgaacgaccttttcactatctattttcgttgatcttcaatattcactgttggccttgtaaggggctttctaaccatttttgacccctttaggtctgatttgctttctgtccttcacagtgtctgttctaggcggctcaatctgggctacccttttacccatt

SEQ ID NO: 9372 - DNA, 492 bp, Emericella nidulans
  unsure (1)..(492): unsure at all n locations
aagagtgcgtgggatgtaaaggacgtcgcataaagctaccaccggaaccgactggcataaaagggctcgccccacatccatggctgtcactgcgaaggagacagtgataccaagcagacctcacaaaatcatgcaatgccatccatgcacccatattccggatatgaacggaccatcgctcccgagcgcagatcgaacagatgaccgctagagaactagcgtgaactatccttagactcatgcccagaatatctatgttgacgatccgaggccagcattgatgcacagcaacaaggcaaacgtaggatgaatatgccacgggtattacataggaacccgaacacggtccggctggcagagaaaacgttgttatagaacagacatccgagagcttgcaggagttcgacttgcgatcaagacacatgctaacggcacgctctgaggccangcagacactggtctgacagtgatataagaacatcaagctaatga

SEQ ID NO: 9373 - DNA, 1723 bp, Emericella nidulans
attccttcaggcataagtacgccgacgccaacgtgctgttcgtcgccgctgccgaacatctgacatgtgtcgagtcgtctaacatggctggtcagattacgctactcgaaccctgcgaagatgggcagttgattgagttctctcatagtcagaggcgtgctctgccacagcacgtcgtacagcaaaagttatccgccagcgcctcgtacgatgcagttgtcgtggacgccaggttatctgatcaaatttcctggctttcagcgtcactctcaagtattatgaagccgtgcggccatctagtaatgttcggccgcggtggttgcgatgatttagctggcgatacgtggctagaggagctgatcaagaacaaaggtttctccattttgcagatgccaaactcgcagctccaagtcgcacttgcggcgccaggtcaagaatctactttacaagttccatttactacggaaacagacagcatcacaatccttgagcgtgacaccacggatcagactcttcatctgcgccagacaattgtccagctattgagtgcggctggtatccataatgtacgtgtcgtgcattgggatgatcctatcgcctcgtttcacaaccaatgtgtcgtctctctggtcgagaatagctgccccttcttctacgatgtggatgataaaggcctaacccatttccggaacctcattgccagccggccacgttatctgctctggaccacaacagggaatctcttagcaccggacgaagcaggcatccaatatgcaccgacaacaggctttctacgcacggaacgctctgaatatccgctcgtgccacttcagcacttggatttatcgcacgaagcaagccagatgccgggtactgctgccggtattattgagaatgtgctccttgcagcgctccagggtactgtacaggccatggaaaccgaagttgccgagtcgggtgggaggctctacattccccgtttggtagcgaacaaggccatggatatagagattggacgggacgtgaagccgtccgcatgtctgccagtgcctctatccaatctccgccatccgacacgactacaagttagccccgacggatccgtgcactgggtagctgtcgatcccaaccatatggagggggaccttacggcaaacgaagtcttgattaatacccgatacactacaatttctaccacattcccaggccaatcaaaggagaggcctcttttctcgtccttgatggcagtcgacacagtagggattgttgaaaaaatagggcacggcgtcacggagctctgtcctggagacactgttctcgttcagtccgctaatatccagaatcggttctgcgaggatgcacctaatgttgtcaaagtccccactgacctctcgccagtccaagtagcttattggataaatcccctggcttgtgcctactatttgctcacagagattggcaacatctggtcgtctcctcttgcacagtataagtcggtcagcagcatgcggctttatggacaatatacgccacccagatcgccgccactcggtgtacatcagaggctgcaaagcattcttattgacgttgagggccccgcgctgcgacatgccctggtgcagatggctcagtggctgctgctggatattttcgtggtgatcccaccaggcgaccctcaacgcgaggctgcttgggctacaaagtgcacagttctcgccgaggt

SEQ ID NO: 9374 - DNA, 102 bp, Emericella nidulans
tcaggggccaatgtccaatgcgcgcgatggtctcactcaggctaatactagatcgttcggcatccaatccggttcgagcggaatagtacatcttccccgagt

SEQ ID NO: 9375 - DNA, 2378 bp, Emericella nidulans
  unsure (1)..(2378): unsure at all n locations
ccctacaagttgttaagagctctcaacgctgcatttgtgcacatcaaagcggccatcatgtgactcgccatgttttttagtccgacattagaggaacgaggaatgcggagagtattcccagttcctggtcaccacgacaatatctcctgccaatggtggactgcagctgaagcccagcctggacctcaaatcccgggctcgttgcagtcttgagacactgcagatgttgaaagtcagtgaccactacgggtgtggggcggagggacccatggatcggtggatcaccagcactttgcgctttgcgcttcagccgtcaggcgtcgtagggcgcctcaaggctcaggcaatcagatttcttacagggtcaggaacgcttgcattgcgcacagaagctgggaaaaagcaagcatatcaatattacttgcctgccctcccaaggattattagttgcatcggctcagaaacgatcaggttacgatagttggtggtgtattgtgatgattggccacggccgagcttgggccgggccagatggagttggtttattgcctgatttctcaggatttataaggcaccgtgagttgcttgctgatttgctgatttgcacacgcgcccgatgcggaaggcgcgacggttgtaaacataagcaccgctcttgccgtatatctttcattttttgactgagcagactttaccagactcaaggcgtgtttccgtctagcccaacggacctttcggtggttggccacgaatgggcaactggcagccccgcctggaggctcgttgaccgatagccgcgatatgtctgctcacagagctatccagaacagtggctttcagacgtcagtcgatatcgcccgccagcagccgtttgccgtagccccgctggcgggccagaaacggccccccagcggcgctctaaacgaggatacagataatcccagttctcatgcaataaatgggacctcacgtcagaatctgcctaatggccaaggattggattttacccggcctcaagtgcatctaccgaagagccgtttgattgctagtgagatatgtactgttgcaggttctgagaatgaacagaaaccacgaccagaagatccgtcaaagtctcaaggttcccttcagtcgctgaatgaccctaaattcggactgcctccagctctggtggccaactttgctgctgccggtgtcaccagcatctaccaatggcaggcatcatgcttgcttggtgaaggcctcctgaaagggaagcggcatctaatctatacggcacccacgggcggtgggaagtcgcttgtggctgatgttctgatgctgaagcggatcatcgagaacnctacgccgcaagcgattctggtcctcccgtacgtggccttggtccaagagaaacttaagtggctccggcgcatagtccaagatgttgaaaaatacaaccgtgacgaagaacaccccgacgcgagttatcaccgttggaggaaaatgcagaaatctattcgcatttcgggtttctttggagggagcaaaactacccgccttttgggaggatacagacattgcagtttgcaccattgaaaaggtttgctatcgcagaatactggcatgacctcgatctgacagtgttaggcgaactcattgatcaacgctgctattgaggaatgcagtattgcagaactgggggcagtcgtgttgcatgaattgcatatgcttgacgacgagaatcgaggatacttgttggaactgatggtgaccaagctgcttctactgcagcaggatattcagatcattggaatgagcgctaccatctcggtaagtgacatcctaattacaagatgcaatatctgacaggtcaagaatacggagctgttggcagactggattaatgctagatactttgtatcaacctatcgtccagtgcccgtggacgaatatcttatctatgataatgcgatctacccagccgcgacttcgagacagctctttcagacaatctcgaagctgacagccacaggaggacccttcttgagcgaggccgtgcctccccagcgcacaatcaaaccttctgccttcagggaattatctaacccgatgtcaaacgcaatggtagctatggcaatcgatacggtcactgcaggatacggtgctctggtgttctgtggcagtagagtagcctgtcaagtccacgctgcgctcataagcgaggcaatgcctgatccaggtacgcttggcgcagaggatctgggtaagcgactcgacctgctggcagagcttcgcagtcttcccagcggactggatccggctctggagaaaacccacatcaaaggcgtgggattcacagtgagcaagtttctgacagcactgagggccgatactga

SEQ ID NO: 9376 - DNA, 122 bp, Emericella nidulans
cgccagcctgcagagtgggaccgtagacaaaaagaggcggacacattaacagccaaccggggggaacggggcaaggaacacacagcactaaactttgggctagatacagggcagcacacgca

SEQ ID NO: 9377 - DNA, 905 bp, Emericella nidulans
cttgaattattgcgcccagaatttccctgctctagggacttggacaggaacagaagaattacagtaccacattcacggctgaacctcatcacatagcagaatcatgatttctagccaagtaagcctagttttgtttcgccactgcttaataaatacttcaataagcccgcaaggcccattgtaagtggcagcgctgcttcagcaagcagtatctccatgccctcgctgatacgtattcttcgctcgctcattgactggcaattacccagtacctcttacctatggtgattaggatatcaaatgcactgcacacacacggaaaagactagggattcaaacttagtggtgcaactgaggctcagttgcatgatgcagcttcagtaaccaatcaatgaggaatgctaatattcttcaccgaccaggagataaagcggctgtagtgcctatgtgggtactccgtaattatacagttacccagacaggcgagtcacaaaaggcatcccaattgatacaaacatccttcgcggccacccagggacatgaatctagaattgcaagtacattgacccctgagggatatccaactattcggcttctacaccggggtatccacttcattatggtaatcttttaccacgggaaacagggctagtaatataacaactaacctgggtttcaaaacctaccactaattgcggacagagacagttggagcattacacggctgcgggatcacgcttgcacctctggcttgggtattatcgatgtgaggaccagaggggatgtggacttgatgtaaccacaattttattagccactttccaaaaaattatagtactgatctggaaaactggctaccttgggttccgatagaccactctctactctgcagtcggggcatctta

SEQ ID NO: 9378 - DNA, 1716 bp, Emericella nidulans
  unsure (1)..(1716): unsure at all n locations
tcagtagtgaacgcatgtcacaatctagtctcaggtcgtgcgagagtgtcattgacatgcgagcgtcttcaatctacccttgcggggacgacttagggctaggaagccgttgggtgatcaaagggttagggggcagacgttgtgattcggccctggaggttcagtcatggatccatggacgtaggagtttgtgatatgtattcggctcacccttgagagttcctcatcataaagaactcattattggaactgtccttttttcaacctgatgcgtgcagcttcgaaactcaagagcaggcccggatactgcgattaagcgcatgacatgcatagccgagatactgtgtctgactgagtataaaatccacagtgacgttagtcgctgttcctacgccgtgggggcaagtaacgccagcctgtttaacccaggggtggatgcccatcaagggttgattggatgagggccaggtcagtcgcctagtagcacattattacaatactctctaagatcatccttattttccttacagctctagaaggcctttggttacaacatttaacaatattctatattaaatacaaatctgtctcccggcctgagagctccttggccctcggtgcataatattcagtgaggtgccacaagcaagttcatatctaccattttcctagtttacattaaatcaaacgctgtctcgtgcatcaaggagcagcctaggcccgactatatgacaacggtatccgaccattgaaccctggaacgccgagggaggcagtgcacggcacccaaatcacccaacgccactccgtcactcgcccgctaacgaagacgctcacgccaggctatgacagcctaacagcagtatctggtagatgatttgctgtcctggcaactcaaacccgtcttcagactctggggatgcgctcattgacgaacagaactccctgccgctgtcgccccatccatgggtcatcgggtgattttgctttggatgaagacatagcatgaagacacagccacgatgggttctcgatgggtagtcatagaaggcagattgaatgtcctttatgagtgcctgctgctgcaatggagtgaccccatcgtatgatgaatgttcggagagatttgatggcacggtactcagtataagtattattttacacatttatgataatcaatagtttatggaatccacagaaacgatgtcagaaaccgttgagaaagatttttctgaaacctgggcagaagtactcgctccagatcctcagtacgaaaaggattttcgcgttgtcgataataaatttgcattctcccccggccagctgaacaagctgctcaacccaaaatcgctgggcgcattttacgctctgggcggtttgcagggactagagtatggcttacagacagatttggaaaatggattatcgacaacggagaccgttctgtcgagggtcgtttccatcgacggtgccaggcaggcagcctggtccagtaaagggctggcgacctcgtcatgctcacatcccaccatcccaccatcacagcctcagtctcagccgggcagcacgctgttcgcggatcgaacccgtgtattcggcacgaacgccctgccctctgctccaaagaagaaatttattcggctcctctgggatgcatataacgacangataatcattctgcttgactatcgccgcggtcgtttcctcgctctggga

SEQ ID NO: 9379 - DNA, 1658 bp, Emericella nidulans
ctctccacaaccgccaatagtgaaactggatgatgtagtgaaaaagaggaggatgagtatcagtgggtatattcagaatagagatataatggcgtacataagacaagctaattatcattggcgaggaccagaaatgccacgtgagcgtacgagaaaaaaatataaaagccttagagaaggttcattaaagaggagaagtacagataggagagtagaatggaagacgaagagatacagtgtagaagcataaaaggtaatgcacctacaggagataagataagaagagtaataacagaacagtatagtatagatttgcttacgcggtgtagcgaaggagacaaactgcagtccaggccgtcaatcggaagctgaagtgattaatgacgagaaattttcagttagcgcggagtatcgatcagtccctttgtgggtaatcttcctcctcctagcctccacagctatcgagctcccgctcattctggcattccaccctgtcaccatcgcttacccggccgatatcctcgacctgccttctccaggacgactgacgctccaagtgcttggattgttcttgatggaagggctttgccgtcgtttgatcaggtcgctcgtcttaccagtgagcttcaaactgcggaaggagatggatgaggaccaggatcaggaagatggtgaagacgagcatattgccgaggatgatattgcaactaacgccgttgtggatttctcaacggcccgtatcacgctaatggtgggttctgcgattcttgggatgcctcgcaggggcagcctcacggggcaactgggcaaattgcacccactaagcgtggcgggatgggcaattgtagatggaacctggcggaatctgtagattctggctcgtgtgatgggaacgcggtgtcattgaatgtgtcattcagcttataaaagtagcttagcttcgcacagttctttcgctcgatctacccttgtttattgcctgcctaacctagccatataccctagtactctttgtgggaaatgaccagcctcatgtcatccacaggactcgccggtcccgaggagactggccggaagcccatcttgggtaccccatccaacggccggaccttaaaccgatgaagaaaaagcgaggtaaaagtcagcactagcctccggctcaagaaccgtcccatgcatttatgctttccaccgccaaatggaagaaaactcttactctggcccaacccagggttagaaaggaaccgctctggctggaaggcatcccaatcctgcgagaggagcggatgacgcatggcgaggtagcggtatgggataacggcatgtgtgccggatgtgaagatgcggccgttgatgtttacgtcttgcttcattgttcgcgcggagctggtgttgagtgcgagtcggtgggcttcgttatggagagcttcgagaagggtgttccgctctagacggattgagagggaagagagggattcgttggacggccagtctgagagaatggaagatatttcggtagtaaccgctgtgagtattgtcgggttcgagatgatgtgcgcgatcagccaaaagataattttgaaagtgtttgcgtttatgctgatagtggtgagtcccagacgttcgagtggacgcgccatggaaacactgcactgcct

SEQ ID NO: 9380 - DNA, 828 bp, Emericella nidulans
gctaaactcgatttcatcggcgctggagtggcaactggcttgggcgtaacagaaagtggcctgacaggcttttccgcccgtcgtttcgcctcggctgttgcaaatctctccttgctcaattcgacagatcgggaaagttgcaacaggacatcgtctgaaacatcgctttcgttaaactcgtcagtcgctcttgaagggcttggcgaacgtgaagattcggctggcttggcaaatgccgtgatcatgctttgcttcttgaggctggcagttgatgcagtcaccacaggcttcttatagtaggcctccagtgctctcacaagttcggccttctcccgaggggtaatgatcgttttgacggtgttgttgattgcgactccctcgatgaagctcagagcatcttctttcagagtggtcacatttagttcgcccaggcgacgaagaatcttggacacaaggccaaccaatgttgttgcaagatactcatctttgagtcgaagccacttggccatcccgctcatcgtcgccgttgggggcttaaggaaattttctcgagcagtggcctcctgagtaggatctgcgtcgataactgcgctcaagaagacaccatactgactgaacaagagatcagcaaactggatactgtcacgacaaaactccagcatcactgctttgtcattaccccgtcggtgccactcttccgtttcgtagaatatggtcgtcaaagcttgccaaagatattcccagagcttttgaagagataatgtttctttgcgatccacgagcttccgagttctgagaataccggtctgagtatcacagaggatattt

SEQ ID NO: 9381 - DNA, 504 bp, Emericella nidulans
ctgcgggggatgttctacgtactccaaaacgcgatccgcccattcatcgcatgcttgtgttgggttccacaacagggccatgacattgatttcctcttcgtaaccgtggactcccactggagctctgaccatatagcgattccctgtcctctaatgaggagattgactgcttcagctcgaaaaccatccctgagtggactggaccgtgcgcagcataagcctacctctctacaccatgcatgtgtaagccatgtctgccaacatttgacttacttggaatgcactagacgagacatgggctgattatgatatcttggtccccgttactttttataacctctctcaggtgataggggctgttcgctactataaaaaaacatcgcttttattgcccggaccgcattgtcgcagtgaatcttttattgcagacaacgtcaaactcccttcattactcccacgttaaccttagccagcgccagttgtagaacattcatacatttatta

SEQ ID NO: 9382 - DNA, 335 bp, Emericella nidulans
ggtgctagcattactagatgttggggtacgctatgctcaacatgcaatgcgatcttggcggtgttcggggctaacatgatgtcgcgatgctcatgcgatttggcttcctcatacgaacactgttgatctcctatgaatcccagtactagctaaaccatttctgacgggtaccatagagtggtgacatggaggttgtgacatacaatcccatggtatatatgcacatgcttttttgcgtctcatgatggctatggaactgtgacctggaggccctttgagcgaaagagtttgattcaacgacatctatccactcgtactaagactatttacctggg

SEQ ID NO: 9383 - DNA, 110 bp, Emericella nidulans
agatcgcccgccgtgcatgctttctctacggtggatcatcagccactatttcagggacaaaaatggtctgctggtctaaccatgcgcgatatcatcagtcagctgcgtga

SEQ ID NO: 9384 - DNA, 520 bp, Emericella nidulans
ggtggcattttccgaggggtaggtgggacgactcacacaagcgccgaatgattggacaaattctaaacgtcgaggcctcaagggcaaggaactaatacgaacgcaagggcaggaaggatacgatcagaaaggccgtacatgatgccctaccatgcgtctagacagagctgaaatactcaggcacacttgacactgacgtacgcatcggcagatataaataatattaccgagatgtaaccatcaacacaacaagacacaggtgtaagtcccaaagaataatgattatagggcactctagaagctgggtgaacagattgggtaactttttagctcggtctcgccaagatcagcgtaaacagtgccgggtgactgtcatgacagaaagggtgttctacaacccctactaaccgatgaacattcctctggaaaaaaaaatcactccttatagggaagcaactgtgaaggttcaccagatgtgcaaaaattttgagggaaaacgataaaaaatatgtaaagattg

SEQ ID NO: 9385 - DNA, 1752 bp, Emericella nidulans
ggcttcggaagcgataaaagttcttacgtccgctggagaaagcgttgaagcgaccccaccgtctcttctcatcttctctgcttattcaagcccgcagtttcggaccataaagctgcggtcgcggcgtccgaactgcgcggtatgttctgccgaagcgaccgtaaccttggaaagcgtgaggtcaggatcaatggactatgttttcttttgcgggactgtcgatccggcggatatcctttccccagaggagcgaatatctccgtcagaatatggaaatgttgatagcgccggtgcacaaagacacattatcgatgtgcgggagaaagtccagttcgacatctgtagcttggaaaatagtatcaacattccgatgtcgacgatccttgcttccgcttacagtgcaccgacgctggacgccgatgaaccgaagcgcctgccttcatggctgccacctgaggttgcccacgagtcaaataagccaatctatgtggtgtgtcgacaaggtaatgattcgcagacggtggttagaaagctgaaagagctggggcttgaccatggaggcgagcgtcccgtggtcgacataaagggaggattccgctcctggcgagaacaggttgaccctgactggccggactattgagagctcaacagaggacaagggcaatatgcaaacactctaagatgaacacgcagaaaggggtatatcgaactatacactcaaaacccaacagaacgcaacggaaaaaggagaataaaaagagtcgtaaaccatcatcccatcgcaacaggggtcttatccaaccaagcccactctaccgtcactctgccttcagctagatcacccagttcttcgaagacagacgatgaaacatctagatcatcaacgttgcatccaggacagcggtcgacaactttgacatccacgctcctatcgcctctgcgtatccgcaatctcagcccgcaaagcggattctcgttagggtttcccgaagtcagcgctgcatcgaagacgacatgtgatacggcacagatattctcggatgatgtactggttattccacatgatccaagaccggggtcgtagtatgtcagatcgccagtgtaggggccgccgttggaggtaggaagagggtcattggagctagttgtattggtagaattgttagtaggactttcttcatcagccaattgaatacgacagaaggaaaatatcgttcagtctggagaagaaggcgcaagggatggacgttgaagccgtgctttctgcagccccagatccagtccggaaacttacccctttccatgacgtctcgtcaaccccacagcaagaacgataataagggcgagaagcgcgagcgatgtgaccagagcaccaatgatgatgcgtttcttctttgttgacaactgaccccatttttgttgaactggtgtccataacgcggttcgtgtaacgggcccttaattgatcccccttcgtaccacggtttcgttgttttttaaggtcctttacggggtaatagtgcatttgggggagggtagccaacctacccttgaagtcttttcaatttgatccctattaaattctcctgtctgacatttggttactactaacctcattattacctttcgacattctattttttctaaattcacctttctccttactccctttctctacctaactatctatcaaatcttatttcttcttctaaggtttccttctttctatctctacatatcgtcctacttatc

SEQ ID NO: 9386 - DNA, 1563 bp, Emericella nidulans
  unsure (1)..(1563): unsure at all n locations
actgaggatctcatcgcgcgcggcgtctgcccccttgctgggtcctttgacaatcacctcgtcagaagcctgctgggatcgttgaggtcgagcgctgccagcctcgctagcagtgtccgcaacagactggtcgtcgttaatgacaactgccctggggaactgaacacgaacggagtaacggtcctggagtcgattgacttggctacccttctgtccgataagctctcggtggtattgggcagggaccttcaggacgtgagtcgtctcatcctccagcttcttgccgagattgataatccgagccttggctgcatcagcctttgccttaggtcccttgacctccaccttgccgtcttcgaccttgatatcaacatcaaattcgtcacgaagcttgttaatattctcgcccctctttccaatgaggaagtttgcaaatttcttggggaaatcaaaagaggttgtgtagcctctttcaaggtcatccttctcctgctcgacgacaaattctccgatcttggcggcaatttccttcactaggcgggatggaccgcgcaatgcgacgtcgctctggggagtggctcgccgttgcggctcgggccaccaccaacaagtgcacgaacagggatatgatcttcacccttcgcttcctgttcacgggagatgaacttacgaaccttctcctggtacttgctcggaatggacacattttccgtgataatgtcatcctggctacctagagagttcaaaagatactcttgcgcttcctgtagggctttctcgaaagtggcaagatctgcagcagatggccgctgacgcggaatttccaactgagaggagctcgccgaaggaccttcgtaaataaggacaacatcaggactatcaatatcgtcgggaataagaacatggacaccgtagttagacctcaactgtgggatgctacgggagcgtaagtaagggtggaagtacgggtcaacagaaaggtgacgaagtctggcaggaggatgggcctgaacgaggttcaggatatcagagcgtgcacggatcgtgttcttgccgtccctcgaatacacttcccaggtaacaggaccgtctgaagcaggcgacagagcaatccgcgaatcgtacatgccttcaagctccttgatgatttgtcgctgggcaaggtagcgcgtaagcgcacgagcatgagcatgaggcccgagaggngcgttagggtgctggcgcgacaaatcaatgctcgccatctgcatactcgtagcaagtcccattgcgcgttgacacattttcgatcccctgagtggacccgtaccgtcaggaattagttaattgacggagctgaggccgccgccaccggttaggaggagcatcatgcgtgcatgcaccagataatgagttccccatgtggcgcctgtaaataacccgtctaaacacagtgtttgttataggcgcctctggggggtctttcaataaattcttctcccgtgaacaaagccgcaatttttgggatgttcccctatttacatttacttccctacttaatctacataattcttttttttctat

SEQ ID NO: 9387 - DNA, 326 bp, Emericella nidulans
gggggacggaatcctatctaaaggtcggtcgagcgacagcataacgaacgctgccatataccaaggacatagatccatcatgcgaaaaacatgtacaagctaacaattgcacataactatacaacccgggggaaataatgtgataacgccatacttccttaaccgagtgatatgactaacattcatagccctaattgcacttaccacaaacaattccatataaatcaatcgcaataatgttcattaacatagacaaagtgcagcaatgagacatgatagtgcattaggaaataacaaattatgtctcaaaccactacaatccaaac

SEQ ID NO: 9388 - DNA, 1193 bp, Emericella nidulans
ctagtagtggatgttgaaattatacgccacaatggaaagcacagccacagcagggcttctgccttccaaaggccatctgcctctggaacgaacctgaagctcctagacttctatccgaattcaagaaattcagcttgaagaaaaatcgtgaaacaagaacttgttctaatttcatttttctcattcactgtatgatcatctttatgaaataattgcgttgctgcgataattctgcggtctgtcgttagaaaatccgtggctggtagtttgtatggatggcccagcctcctgtatacttcgtggcgactgtcagctcgaacatcaggacgcgccagctgccgtatcgcttggacatgatgggctcaaagtgctgatcattatgcaacaagtggtccaccttaaaaggtttttcgagggtcttctagccgtggccttggtctactctgggattcttaagctgtagcatctcaactgaactgtctcatccaacttttcataaccacagttcctgaggacccaagattgcttagggttataaagtttctctgctcctccttcagttcctgactaatttcatattatttgttgttgaacattacttcaactcactgtcaacacaatgcatacctctgccgtcctttccttggctctcgccctcacctccaacgcatttcctctgagtcatcctaccttcaacaccacagttcagcgccgaagcgctgactacgatgtggtcaacgttggtggtcttccggacactcctcagcctgccccctcggcttcaaccatcacccagaccgtgactgcgccgggtgctcctccacaaacagtgacagtgacgatatcccaaacaccaacaactccgtcgccttcgtcgtcggcgatatggggcgctgggactggcgttccgtacagcagctcggctatcctcccggctgtgactccagtcccgggagaagaagttcaagacgaagaagacaccgccacgggagcaattgacagactggcgcgcgcctttggaaggtctatgaactctcatctacgggctcgtaccaagaacgagactgcggcttatcctccgttcgatgctcgtggtctcaatgagactgggagtggtacgtatctcgggtgtgctcaactcactgaactgttcccttaggcgcagggttaggatctgacagactgctctgagg

SEQ ID NO: 9389 - DNA, 581 bp, Emericella nidulans
gaagaaacctatcgagaaatgatacgcgttacgagggattctagaaggcgaattcgatgaacttaccatcctcctgcctcagtgagagcaacctggtaggcttcaaggaccgtgggactatctaacccattgagagacatggcgcggaccgcatcaggctgaagcagaccccaaccttggaatgtgacacctgaaagggcgtttgtggttgtacaaacaaggagggggaggggatctctaaggaggagggaatcgaacaaggacaggtactggtgcagtacaagacaaaacgagcgacgatagcaaagaaatgaatgaatgaccggcctccaagagaaagatgcgacgaggaccaaaatggttcctgaaacgaatgcttggagagcggccaactgcacaactcacgaaccgtcagggggaaggggactcccgggtaatgctagtagtggcccactcttgggcgagttcgacagcgaactgaactgtccactgttgtagtttagatccggtggtttcctggcctacccaactctgaaacgattccaatgctcaattctgactggctgttcagcttggatcga

SEQ ID NO: 9390 - DNA, 1340 bp, Emericella nidulans
ctgcgagctccgaaatgcgcttcagcatccgaaccccactgagtatgcgtcgcgtctgcctattcatcaggatggctcctgtaacggtctgcagcattatgctgctctcggtggtgacaaacttggtgcacagcaggtcaatctcgagccatctgaccgtccttctgacgtgtattccgccgtcgcccagtacgtaaaggaggccgttgcaacagaagctgcacaaggcgatcccatcgccaagatgctcgaaggaaagatcacccgtaaggttgtcaagcagaccgttatgacgaacgtctacggtgtgacgtttattggtgctatgaagcaaatccgcaagcagcttgcaaatcactaccccgaactttccgaccacgaaaagaaaacgggggccatctatattgctaggaaagtcttccaagccctagggactatgttcgaaggagcccgcgacatccaacactggctcggcgatagtgccaatcgcattacacagtcccttccgcccgagcagattgaagatctcgctaaagaggttctaaatccgtcgttttccacactgccactgactagccgtggcaaatcgaaaaagtccctttctagcagcgacccgtctgctcacttcaaaaccaccgtcatttggacgacaccattgggcctgcccgttgtgcaaccgtaccgcaataggttgccccgtcgtgttgtgacgagcttccaaagcttgagcgttgtcgagcaggattcccgctactgtgtcaccaggcgcaacgagctccaggccttcccgcccaacttcatccactcgcttgatgccactcatatgatgctgtccgcaattgcctgtcaccaggcgggcctcacgttttccgccgtgcatgactcgttctggactcatccttccgacgtcgactctatgaatcggatccttcgcgaggcattcgttcagatgcactcggatgacgtgatcaagaggctggcagcggagtttgaagtgcgctacggacgtaacttgcattatgctcgagtcccgcgatggagccggctcggaagagttgttgctgatttccggaagaacaagccaaaatcaactcgactcctcgagctgatcgaggaatataagcgacagaaattattgcggtctgatgaccctgagttgcaagctcagggtcgtgagatggttacagcggcaagttgttgtgaggcggcgggcggcacagacgacgatctggtcgtccatgcttctctaggtgaagctgccgtcgggcacgtccccgaggatttggaggccgccgagaagcgggcctcgggcatggaaacagacggctcggacccggcag

SEQ ID NO: 9391 - DNA, 710 bp, Emericella nidulans
cgggcagcaggcagtgaacttctcgcaattgacttagtatccatttgtgcacaaccctcgaaatgatgaatacacgggggatgatttgtacactgtgagaatatgttagtcaagtgcactagtccgtaacgacgcatcaagagccaggagcgtcgagtgtcataagacaaagtcaaatttcttgccgatgctatgttgtagcaaccagtggcgcgttctgcctctgaatgtaactggagtgttatgtaaaattggcgtacgagccaggtatatgtggcggagccccaaggctaactgaatttatactactcgaagtctctgatgttcaaccatgtcgcagtcatcagaagtaaccaggtggaatcgtactcgaagtcgggagtacgtagtatgcttgcgttggacttagggaagttgacgggggtcggctctggaggtggagctgggatgtgtgccaagacgctagtgcataaaaggctagcgcactctgtagcgacctttggccctaacccacaaagcccttcgatcttgaattctcaagttacaacccgtcaagccaaactcttgaggtacgacgacttccaccaccatcgctggcgatctttctttcaaatactaaccaccaggttcgcaacagaaagtcgccatgggtcgtgtgatccgcaaccagaggaagggccgtggctccattttcagtgagtgcgacagtt

SEQ ID NO: 9392 - DNA, 1373 bp, Emericella nidulans
agggagaaaagttgtaactatatatatatacaccatttctttttttgtagggactggcatactgtcacctggggcggggcttaataaaacacgctactacccccttaaagatcagtgtaggctccaactttaggagtgtcatgataattatagaagctgaacacatatttgcaaaccgagcccaggtcggggctagaaaaattgatggtaaaaagcgaatggatgtagagataccaatatacagtgaaaccttaacagtcgccagtcaaacagatctcgcttgaaatgtcgataaatggagggctattatacatgtcgagctaacataaaagttgataagaaaaatcaggcctctccagctagaacaatactttagtttgtgcaacaagcatgaggtacgagtatagacaagcataccctaaatggtcgctgcgaaagcttagtaaaccggccagacaattaataatacggccatgagttccggaaactcactctaggcagactaatctcgccagcaagattagttatacctgcagcactttctcttctcctcaatgcattatatatgtagaccccaccccaacacccatttgcatgagatgcaacgccataaccacgccagcagatcgtattcaaaagatccaccccagcaccaaccaaaggaaaatccctgcgcagatgacgatgccggcaaccttcagaacagcaaccgtgtcaccctgtctcgccatccttgtaagccggctcgcgcttcctttcaagtttgtggagagggaggagaagacttggttctataattcagcaggaatgatcagcacgccatcatccacgcggataaaagaggacgggttatcgcaccgagtggtcaagcgtgtcctggtcccgagcattatcatagatatcgatcgtgacattttttagggcggagactttgcccgagagggagtttagaagctcgttgttttgtctatgacgaacaagacgttagcagactaacacgaagtataagtagtggatgctgaatagaatagaggtagaggcagggtctggatccgtactgttcacgttcgtaggcgtccgccatttcgagctctggagacgataatttctcttctgaaaccagatagacactgactgcacggtatggtcgctcggttcgacaataatcaggtgagtctcttacaaagagcacttggactttgaaagcgttagcttgctgatatgttctaggtgttcagtttgctgcgtccggggttggcgatcacccccaagcgggccgatgacgatggatacataatcacgtgaaatattagtatgataggcacagccacagttcaggactgatagagtgagtgggttttaatgatttgctc

SEQ ID NO: 9393 - DNA, 614 bp, Emericella nidulans
ccgagatgcgtgaggcttttgacagtcagaatccaggttgggaaatctctgccaccctaccgaccagctactggtatctgcgtggcttcgacgtcgaccgcatgcaaaagtacgtcgactacttcaacctgatgagctatgacctgcacgggatgtgggatcaggatagcaagtggaccggtccctacctgcagggtcataccgacatcacgcagattgagctcgggctggatctcctgtggcgcaacaacatcgacccagcgaacgtcgtcttcgggattgccttttacggccgctcgttcaccttgactgattccaactgctaccagccaaacggcgagtgcgaattcagtgacggcggcaaaccgggttcctgctctgatacgaccggtatcctgacatatgcagagatcagctcgaggaacaactcgttggacgtgcatacattctatgacccggaaaccacggtcaagtacaacgtctacgaagggacccagtggatatcgtatgatgacgagcagtccttcttcgataagaagaagtacgtctcggagcgctgcttgagcggctggatggtctgggccatagaccaagatacaggcgagtttgatgct

SEQ ID NO: 9394 - DNA, 570 bp, Emericella nidulans
tttgatctgctcaagggtcttataagtggcactccgacaaggagtcctcccggcctgtcacctttaccggatcacacagctcagccaaggaggtctcgtggatcccaaaataggtggtctttgactagtggaagcaagtctcaagtggtttctacacggcgacaacgaagtgcaagcaccagcattctgggctctggtacgggcaatgagaattccccgcagagacaagaagattcttcaagctcttttttcaattctatagatcaggtcaccgagtcgtcagcggtattgcagtcgataacagacacaacggagtctgcaagtcaaatactgaaccgaagtgacgtctttcaatcacctacaatacatacttggcagcagcgcacatctgggacagctaggtcgaaccgccgccattcagatgaaataactaggtctacaacagagcacggcctcgatggcatttctcttgcacgggacgggcctgaaatgcagtatacaaatagcgactctgagcaagaatcgaaagatgcatccagactttactcagctgttgcattaaacgaaatc

SEQ ID NO: 9395 - DNA, 875 bp, Emericella nidulans
aacaagatatcctctcacgatccgtctctgcaatttcccccggcggacgtttcgtctaagaaccgccgagcactttttgaaccgacctagcttgatttcttgcaccattgaaaaacctcagtctgcgagttcctctagccgtcctgatctcaataaattcttttttaaaggacacgccctcacgaatcctaccccctcccttccctgatcaaaacaccaccttcccaaccaaaatatgaaggaaacacgtaccgccaaaagaagacgagtctccgactccacgggcatggatagagatggcgacaccacgatgcaagacgtcgcgacaccgcttcagacccaagagaccccgaacgccgcaggaacggatactgctaatagcagcaacggagacgcaaacacagacacacgaacagacgctaccccttctcgggcgggattacggtcaagcgggcgtcaaagaaaagcaccacagcggtatgaggatgaggttatacacacgagatcggtgaggaaatcgaggtcgacgccggggaaggagaaggatgcggtgacgtctacatcttcgtctacggcagtgactacagagaaattgccccggtctggatctaaaaatgcacggcaacagccgcgccggtcgctacagcggagtacatcggaggcggaaaccgataataaggatgaggaggaggatgaggaggatgaggaggatgaggaggatgaagaggaggacgaggacgaggacgaggatgttgatgatgaatctgtgtcgcctgagccgaagactagacggcctacacggacgtgttcgaagaggacttctgtgaggtttctgagacaagggcaaatgacccaaagatggtgacaagaatggg

SEQ ID NO: 9396 - DNA, 1781 bp, Emericella nidulans
cgtcaactgatctacccctcatcccctcccctaaggaaactccacaatcctagagaaaggcaattctgccacgtatgaagaacagacgccctgagtggccggttccttgtgttgagctttgatactcattgacctgcatcccgctaatgcggactactgatgtctaacgctcgctaatctacgataacctatcagtcccgttttctagatccgccgtgatatcataccctataatccatcagggccggatgtctggatgcggagattccgctggcctgacgagtgacggagctacggagcgcatgtttccaggttagttcgaggctagtcttacattgactttctcacagcctcgcatatcgctgcatgaatacccgtctttgtggccatgaaagatgatgattcggccttttcctcaaacatgcagaggcgcgggtgctcttcgtacgtaggtgccatccaatagtcccagggcactgcgtcgtacgagcatgacgccatccagaaacttttggggtgatttagactgcgagaagacattattaaatgagcgttggtcgcccactgtccgagatcttgtcatcaattccatatccatcgtcaagatacgtgctcctaagaccgtaactttcctaccaacgcacccttcctaccaagcccaaacgcaaccatgtccacaaagacccaagtcattaccgagaacgcccacctggcgagcgcccgcggtgccgtgagcaaagaggcctgcatggctttgtacgaccactgggcctcgtcctataacaaggacctcgccgacgcctctcagaactatgtcgcgccaattctcacagcgcaaactgcagtccagatgatcaacagtgccatggcccccgtcaccgtcctcgatgctggatgtgggactggacttgtcggacaggctctggccagcctcaagcacggcgccattactatcgatggcgcagacctatccctcccaatgcttaagatcgccgaagagacgggcgtctaccgcaccctgactcaggtcgacctgacgcagcccattggcgcacctgccgggacttacgacgatgtcacctgctgcggcactttcacccaaggccatgttgggccggaccctgccctgagagagtttgtccgccttgtcaagccgggcggcttcgtagtcgccacagtcctccacgagatatggctagaatggggcttcaagaccgaggctgaaagactcgaaaaagaaggtctggtcagggtggtcagtaccgaagttatggattaccgaaggggtgctggcgacaaggccactttcctggtgttgaagaagacacaggcatgaggtcgaccaaccaacttctccgatttttagggttcgatggacggcgaaggcgcggattccctgacatttaggtccacaatcagtttgacaaatggacagtttgcccgatgcgacttgcccttgcgacttgcccttgcgacttgcccttgcgactgttcccttgccatcctaatgcgactcttggaatgatccagtgtagctcgccgaatacgcagtgccttgtttctcgcgcctagatacgaaatcatgaaagctttactggatagaactagaaaaattggcatgtagtaagagcctgttaagcatttatgtcgaatatgcggccttggtttgtcaacccaatgtctgccaccttaatttgaccagtagcttagaacacatgtctaggtccagctggacgtctctggagaatagtgcaccctccgaggtgaacattgatcaacca

SEQ ID NO: 9397 - DNA, 175 bp, Emericella nidulans
gatattggttgtctggagattcagggggccagtctaaccaccaacgagagctatccatgacacaatactaaaggccggtgaatacgttgatattttgttgtccatcacagtattcctttcattcctgtagatgtaagagctttatgctgcgcatgccgagcgaaacagacgcatt

SEQ ID NO: 9398 - DNA, 1929 bp, Emericella nidulans
tgatctcagaagcgacgtacgtacacactatggggctaaccggatggcgacggttgctgactgccgttttaggctttctccctgcgacaacgaacagcatggacgaccacatgatctccgatgacccgcaggacaaaaaggacgaggacatggccgaaatcggggaatccccgggtgggaccacgtcaaacggggacagtgctgtgcaggaacctgaggaaaccggcgaatccccgacgcataccccgggcccctgcgctgtcggggcagcctatcccgacatgctacatggtgagcctgattgcctgacaaacaaagagtgtggggtgaacgtgaacataaatgcccgcgatactatcgtccaggacgaagtccgcgagcttcaacccacagtcgctgcagacggtgcagctgctaccgaaaatgccctggatgtagggacggcggccgatgaagaagagctgcagccagatgtagctactgttactccaggcggggaaagcaaggatacgatagcaatcccagcaggaatgtcagccgcgcaagagtcgagactcgtccgatcggcactacgcagttctctggatggagatgatacagcactgctgaataactttctatccaaggccaaagcgaaacgcgaagccaaggcagccgcagaggccgaggtggcggcaacaattattgcttcagattccgaggagaaggagctggagcagcctttgcaatcccagaaggttctcgttgaaattcccacccccgagcgccgtgtgctagaagacctagatgcgaacacatcgtcaccccagaagtcaccctctaagccagccgagaaaaatgagaacgtgggcgacaatgactctgccagtccagttactcgtcggagcacgagagtaagatcgctccagagagcagtcgcgccgagtttacggacgaccctctcgctccgtcgcgccaggggaaatgagtttgtcttccttcagcgaaccgaagcgcaagaaacggctctggcaacccggcgtaacaccaagcagaacaaaggagatgcgttgatgccaaaattcaagctgcaggagttggctcgccaaactccagaatcgaattatagcaccttcagcgacggtcctagaaagagcaacaaaccaaagaaatacgttacgtggaacgaagaacgtctcgtcgagtatgagggcgatgtgttaggaagcgacgacgaactcgccggcggcagccagaatctcaaggccacgacagcatcaaagccaaaccccgccgagagaaaaaggggggcagccagtagtagccgcagttctctgtcgcaggggtctctcaagattggtgctagcgcaaagcccgcggctccagctgcagcaactactgcacctcctactgcagctcggggccgtcgcgtgcggcggttgggaccaccaaagccacttgaatccaccgtcatgattgactcgaacgactcggcgtcatcgccgccgtcgcccaacaccgctgcaggctcaacacccgttgcgcagaggaaaaagctgacgcccaaatcgccgaagaccagtctgagcaggaccgctctgaaagttcctgccgccgctgccgctactagtaatactgagttgccctcactgctgagcggcgggcgctcagtcaagacaaatcttctcaaagtcaatgcgggctccaccccgatgccgaggcgtgttcgccgagcttaacttttcaatagtatcttctgctttgcccacagatttgtattgcatgggggtttgtgtcgtatggttcacgcagtattgctatttgatactccggtagcccggcgtttagtggccatcacccctcacatgcgcttttgttctatgacacccaaagttagtcatcagcttgtcgctcccaagtccaggtctctctccgggccttcccccccca

SEQ ID NO: 9399 - DNA, 2119 bp, Emericella nidulans
cggccacataatacgactcactatagggatcaatcattgccaacggtatgcaatggaaagcagtatcccaggcagcaaagaatgggtattcccatgaatccggcatagaaaggatatcatccatatacaaatgcttccactgctgattccggacatgttttcgctccggcggaggagcaatcataccggggtctccattagcccactgatcccaaacaaagtgatagtactgctttgtccacatcattcctgcgaatgcttggcgctggatgttccgcagatcatcactcattggcagagggctgatgtgatagtagaaatcatcggcttccgttttgcgctgctcaaccacatcgtctagctcctcttcgttgacaaaaggctccatcttccgtgacaagcgaaaacgcacaacagcacactctcccggaggaaccccttcaccctcattgaaagcataccaggcagcgaatttggtgcctttattggctggattgactgcacccttctcgtcattgacaatgtaacgatggaaagcgtctttcacataaagctgattgttctgcgtaccccacaaaagctcattgtttgtttcattctcggtaaagagcatctggggtacgacatcttcttgactgtctccagttgctggagagggggcaaaacaaacatatcgctggcccagcttttcgtggctggttctgacagcaagcggagcagcctgctcgatagagggcttttctctaccctcgtatccccatgaccaagtgttccgaaaccacacatggggaatgatgtgcagaggagctggctcggggcctctattgtaagcgattacccggaacacaatttcgtcttcatcgtcgtcctccttggccgtttcgatgaatatatcccagtactgattattgtcaaatgctcctgtatcaagtatctgatattcgcggtcctgtttccctcgtcgagcgttttcctcaaccagatcctgataaggaaattcgttctggggatatttgtaaagatacttcatgtacgaatgctgggaagtaaaactgttagaagaatgctaactagaccaaaaatggacataccgtatgtgtgttgtcaagatggaagtgtgcttccttgatgctctcaccgagattgccctgtggatttgatagaccgaacagtcgctctttgagaaaaccactataacatgcgaggttagacacggtcgcagtcagggccaactgctggttcgtgggcaacgggacgtactcttttccattccaaaaagcaaatgcaatattctgcagattatgcgtgtcgcatacgccagcaattccatcttcgccccagcgataagttctcgaacgggcgtggtcgtgggtaaagtctagtgtcgatcagtaggtaatcccccgcggggtcaaggatgcttacagctccaagcatcaccattcgctctaatggagaaaagttagtggccagtacataaaaacgctttcttacaaattgtgaagatgaaacacaactgagatagaaggagggaggggaaactcacgaataatcctcgcgaactgcggagagataaatgcagtttatcagctcgaataccttcaaagcatagtccaatctcggacgacaatgttgaacagaagagtagagagtcagaataacctaccagtggcccattgtctctcagcgacgtagggaccccattttttccagtaccttatgcgatcgcgatcttccttcaagcgttgttcctcgcgggaggtgtagctttgcttatcgatgaggaccataattgggaaggctaaaaccacaagaatggcaagggagagagaaagaatgagaaaaactaggagacagaaagtgaagggaggggagtgcagcagcaaaaaagacctgctacctctccaccgagtagtcagtagtagcaccgatacacgacagcaggcttatcgtgcatcccagctatgtcagtctggaccgcaacgccagcgcatttctgctccagtaccgggcgcttatggtccgatttcagggtttttctttggaggtggagtctaagcagtcagtgcactgacatcatcgaagcatcttggtttatttgcctagaggtcgggaggcg

SEQ ID NO: 9400 - DNA, 982 bp, Emericella nidulans
ctttgcaaatatgaaggcgaatcgagtctgcgttgttacagacagcaacgtggccaagttgacccccatgaagcaggccattgaagggttgacccgcgaaggtattgagtttacagtcttcgataaggttcgggttgaacccaaggacagctcgtaggtctctttggagtcagattgcttggttttggtctaatgcgtcgaacagaatcaaagaagctattgcattcgccaagccctataatcctgatgcctttcttgccgttggtacgtagcctcctaggttctcttggacaaaccagctgagtatgcatgcaggtggtggatcggtcatcgataccgcgaagctcatgaacctctataccgttttccccgaggccgatttcctcgactttgtaaatgctccgcttgggaaaggcctccccgtcacaaagccattaaggccgcttgtggcggtgcccaccacagctggcacaggctctgagactacgggcactgcaatttttgatctagtctccaagggcgccaaaactggaattgcccaccgcaacctcaaacccactctaggaatctgtgatcctctcaacacacgaaccatgccatcagccgtacacgcctcttcaggcctcgacgttctctgccactcgctcgaatcatggaccgcgatcccctacaacgaacgaaccccgcgccccacaaaccccatcaaccgccccgcatatcagggcgccaatcccatatccgacatcttctctctccaggccctccgcgacacagtcaagtaccttcctcgtgctgtcaaagaccccgaggattccgaggcgcagtcacagatgctcctcgccgccacgttagctggtgttggattcggaaacgccggcgtccatctctgccacggcatgtcatacccgatctctagccagaacccgggctataagcacgccggctacgatgtcgaccaccctatcattccgcacggtgtttc

SEQ ID NO: 9401 - DNA, 961 bp, Emericella nidulans
tggggcgaggaagagtccgggtccctgggctttcatgaatcagttcgaaagcacatacaacagattgggccggtagattggattttgctggctaacagttactggctggatgactataacccatgtcttacatatgggcagcgtggagtggtccacgcgaatttaatcgtcaccagcgaccacccagatttgcacagcggtattgacggcagttcgctgctagatgagcccttgaaggacttgactatgctgctcggtactctagtgggacccaagggcaaagtcaaccttcccggtttccaggaccctgttttaccattgaccgatgtagaaagggagcgatatggcgcgatcgccgagattcttctcaaacaacatccacaaattaaggatgctggcgccctgattgattcactcatgcatcgctggcgagaaccgtccctcaccatacactctgtcgaggttccgggtagcagcaagagtacaaccacaactatttcgcgcaaagcaaaggctagtctttccatccgcatagtaccgaaccagtcagccgatgaagttgccgccgcattgactctatacgcacaagagcaattcgatcaactggaatcgcagaatgaactcactgttgaaattaccggaacctctgatccgtggctaggagacccagacaatgagatcttcgagacattatcggaggccatcacagcagcctggacgcccgaccaacagagtctaaagcaccagtattcactcccgcgacgcgccatcggagatcgcacagcaagcccaagaggagcgaaggataccgttaccagcgcccttcgccgtcaagactcagaggacagcttagcttctcatatcgaccgaatcatcatgtccacaaccacctccaaaacgactacgcgccaccgaagctcgttaagcaccactgtccccacctcatcaacactcacaggac

SEQ ID NO: 9402 - DNA, 548 bp, Emericella nidulans
cctcgtagaacgggttcggggtgtctttgcgtccgtttatggttgggctagagacgagggagaaccacatgtacactcccgtttcggagtgcgatccctgaaagagaagcggatcaatctcgcggatgggcgcgaattgctctggtgtcatggtgatggtggtgccgatgctgcggacgggaagcgggttcagggcgccggcctcttcgccaaggaggagacggcgagtcttgctgtttcgaccatcagtgccgacgaggagacagccggtcgttgatgtgccgtccgtaaaggtgactgttaccgagtcgggagtctcgggggagacgtgaaaggaagagagggttttattgtagttgatgtccagtccctctccgatgagattgcccaggagtctgcggttcacacgaaggcgcttactaggtggaatgacatacttggggatcgcagttgagaggtcgaggaaacagaaccggcgcgagtcgtcgagtgtagggtcgacttgaatctcctctaatctgttgaataattctgcgggcagacattct

SEQ ID NO: 9403 - DNA, 395 bp, Emericella nidulans
  unsure (1)..(395): unsure at all n locations
cccgcctccatccttcgcagcgagattatacaaatggaggggacgccgctatgcacgaaccactttgacttgttattcttatgtgccgatctttgctgcccttgcggacacttctagcgggcctcagagagaatcttcccgatcaccaatgatactcgctaacttaatctggacgccaaactggtcatagacaggggacttcgtattgtaaagactgtgcgggacatttaaattgtttaaaactagcgttgttcccagttaacataatgacgncatgaagaaggtcctcggtttaatgatgccaggaatgcctgaatgtagagagaacttgtgggcccacattgatcaaggttgacagagccggatctatttgtgcaggcgaactgatcgattgc

SEQ ID NO: 9404 - DNA, 969 bp, Emericella nidulans
tggccggaacctagcaagcgacctgagcaacgttgcaccaccagaatcagggccctcgagtcagtaccgcggcatgaacgccatggtggcgtctagcgaggatcctggcatttccaggatatgaatcctgatggaattcctgggacggtatgctccacgcattgactcaaggatgctgcacgtttaaaacacctagaacttaggtatccatcacgaagaccgaaaatgacgattagtcgacggtgtatgtaggttctcgcacctatcacttgcgttgtaataccttactcggggagtggtgggctaacgtagacgtggtagattaaatggctgagacaggatgaggcattggtaggctgctcgaggattggcaggcgacgtggtggcgatgcgcaggctaacgcttttactctagaattcagattgaacaagtatcaagtaccgattcagaccgaattgctgcgtgcaactgctggcaatgcgtcgatctagtccgattctggccgtccagcccgagtgtctgtgatttagatctgtgacctagatgatgccatatcctttccaccaaacaccccacaccaacggtcccaatgccccaagagcagccgctcctacgggaatctccagaatgcaccaaacccacaatgtcccgatagctggcgcgtgcttcataacggcatagtaagaatcctcgttcgtcatggccatcagtttgttcccgagtatgacggcccccggaagaaaaacgagagtctttagagacggcgggaagagcagtttgcgcagaaaagcaaaggagagtttgtctgggtgccacgggaagagcgatatgacctcagaatccgcttgatttcggcggaaattcacgatgtgcccatgcgcgagatgaatgaggagggtgagcatcgggaacgcaacgaagccagagttgcggaagagggctggaagattaatgctctgtgcatactg

SEQ ID NO: 9405 - DNA, 249 bp, Emericella nidulans
ggcttggggatctgaatgggatgaatgggccaagggggatgtcatctcgtccattctccttcatccactgcctctcccttctcctcctcgacctctgtcacccccggtccatctacctcccatcccagtcaggagccatcacctaagtagaaaaggggcctctggatacggggcgtggtctttgactcttgaggtcatctgcgcttgaagaggaactctgggaaggtgcttttttcagggagttggcct

SEQ ID NO: 9406 - DNA, 1085 bp, Emericella nidulans
aagagtttgtctgcgtaggctagttgtagcttcgttggggttgaggtgtcccaatagtaggacatgtggccgggcgttagatcgcggagaggtgggactttttgtatttgcaattgtgacggagattgccaggtggttggacttggagcagttgtggttgttgtccggtatgatatgcgcgaatacagggtcggtcggcagctgcgacaggtgttgactgagagtttcatggtgataagggttcttgttggcggaacttaactgtcgccttgaaaggctcgatggtctggatgcgccggggagcttctttgcgttaggactaaagaggaatgtcagccgagataaataagggacggccatataggcatgttgcccgagatctccgcgataagctccgtcgatgatgcatgttccatttctttcgcagcctgcgcgtttccctttgcgactttattgtcgtcagcttgcttagtctatcagtcttcgggtcacatatattcgatatttatacaccatcagcctatatccgaaatgatcaacgccgtgctagtcttcaataacaacggccagccccgcttgaccaagttctacacgcaaatcgtcagtcactacagtctacgagctctagcctgctacgagccaaaacttacaaaacactcataggacacacaaacgaaacaatcccttatcgcccaaatatatgaccttgttgcccagcgtccccctacagcctgcaatttcctcccgctccctccgatactcgcccgcggcgccagttccagcgcaagcactggtccttctgacgctccaactcaaattacctaccgtacatacgcgactctctcatttatcatgatctcaacgtccactgagtccccgctggccctgatcgacctcatccaagtttttgtcgaggcgctcgaccgcatcttcgagaacgtatgcgagctggacctcatatttggctttgagactatgcatgcggttcttagtgaaatgatcgtcggtggagtggttgttgagacgaatattgataaaatcgttgctggggtacagagccaggagggaagtctggggaagaagag

SEQ ID NO: 9407 - DNA, 1176 bp, Emericella nidulans
aaacccgggtatcaggacgtgttgctgcgagcaatgtcgtccaattctggccagaatccttccacttccaaggcgctgaatatttccaacaaatcgtcctcatcatcgttccattctgcgccagccgttgacagcagtactagacgcgtaggaggatcgggcagtttcggcgcgggattggcgtcaaggagctcgagctctgcgcgaaacaaccaggctctccgtagccaacacaaacgacagagacgtcctcgactattggatgctgatattgatgagtcggtgggtgtttcgtcgccacgacagttacccccattgctgattatctagaccatcatgagatcaacaaccagccgaaagggacaaacgtccattacccatttgatgaacttttctcttcccccacgaccagagtaccacccgccgccccggaatcctcgccggtataactcatggggtctcggctctggctaccatgcgatggacaaagctcgctatgtgcatgcaaactaccgttttatcgtcgccccaaaccgagcatatcatgcccaagcagcgaatgctgatgtccacctggactgggactcggttcttcaaattctcgtgtctgcccagacccagtcgtccagctgcccaatctgcttgtctacgcctgtagcaccgcgaatggctcgatgtgggcatatcttttgtctgccttgtctaattcgttttatgcactcgacagacgacgatcatccagtccctgagaaaaaggcgcgctggaaaaagtgccccatttgctgggacagcatttacatttcagaaacacggcctgtgagatggttcagcggccaggaaggcgttctgcctttcgagggcggtgatgtcgtgctaaggctcgttaagcgggatcccggtagcactcttgccttgcccagggatggcgctgaaagccttgcccctggggaagatatcccctggtatcatgccgcggaggttgcagactatgctcgtattatgaaaggcggagaagattacatgatctctcaatataacactgagattgaagacttgcgcagacaggagcaagaagatgaagttctgtttggagacgacacaacatggacaaaaaaggcagtggcggctataaacgatgcaaaacagaagttgcaaggaatagggaatcctcctgag

SEQ ID NO: 9408 - DNA, 169 bp, Emericella nidulans
taaccttatcttcagtgagttcacttgtacattatgacttgaagtgatttggagcgtagagttgattgaacgcagcagagcagcatacttgctatcgagactctcgactttacagcagatgctctgaaagcgtcgacttcatctcgacgagccgctgactaagcatccc

SEQ ID NO: 9409 - DNA, 115 bp, Emericella nidulans
agaaagacaaaagatttagaaagtttattgtagcaactaccataacatctccacagctgtccatcccaggcaaagtcctgaagtaggcttttcctctcgtgagctataaaagaac

SEQ ID NO: 9410 - DNA, 798 bp, Emericella nidulans
gtgctgaccacaaccatggttttagattctccatatctcgatctacgttagggacggcctcgagacaaactgatttccttttggcgaacatgattgggtctgtctttaccaggggccaccatattatcagaatattgtattcgtcgaggcgtctggcgaccagattgagaggctgcctaacatccgggacaagcaaggcaagacattggtggtgggtgagtcgtcccaacaccctcatggaccacgcgctgaaattcctgtctagtgtccgcagccgacggagtgcgagatcacatacagaagacagtacggagacacctttatcagggcatgaacctttttgaactggagtaccagccgtgcgcagactgagagtattgtcagacatggagaagagatgccggattgttttggaaagcagtactttagattaccattgttcactctcctaaactttgtcctagttaataagaattattttatcacagataggttgagggcttggttttgcaatcccaaaaagtgtcgcgagatagtatatgtagagagaagtagaacttgggtggatctgtaagagcaataataaaccagcctagactcaagtcctttgttcaaaggattcccttgttcaaaggccgtagccatcagtcccacccgtcaggaaaccatctcttgttcaaccattttgatcattttgaccatgtatacaaccctcatactgactgtcgcacctcttgcctataaatactaatcagtttctcgctctttccaccatgctcctatttattctgccattgg

SEQ ID NO: 9411 - DNA, 708 bp, Emericella nidulans
tcctgagcaaatcgcgatgcccactagtgtgcatgccgcacaccagacgcgtctgctcaaatcgcctctgccacaggagacaggagaatcctcgtggaatccttctgcccgctttatgagcctgtttctggacattatgcattcatcatccggccagccaaatcattatgcagatacttttcctacgccgcctcctccattgcagatattccagttcatcagccgaaagtttctcggcctcagattctcagacgaagcttttgacgtcgaggacatcgatgctgcccataagctgttcgttcatcatccgaccgcctcaggtatctacgaggacgagtggcctgatttaattccatctattttcgatactcctgacggaggtggcgaatacgatgcttactatgttgtctgaacgcatcagcaggtatcgttcggcaagatgtggagttcaaggctgaccggagcatgctgagtatgcttaattagcgatcgatatcgcggaggtcagagatattaccagtgggagatagagaaccaagaggcctagtaggtagccacaccaagccgggtgcgacattaatagtaagagccagagcagctgctgtaacagttgctcatatctgcggcgagacaagcatcaggtgtttatgctcgttggagattcatcttaccaacaacgaatctatttctgccatctgtcgatatgcc

SEQ ID NO: 9412 - DNA, 799 bp, Emericella nidulans
gacacttaacgagctcaaattcgacgccatgacgctgggtaaccacgagtgggatggtggcgacgaggcgctcggccaattcctgctcaacctgaccttcccgatcgtctcgtgcaacgtcaagagcgaggtcgagtcgctcaacgagacgatcaagaactaccacatcttcgaggagcacgagatcgctgtcattggtgctacaacgacgacgacgcccggcatctccagtgtcggaaacacgaccaccttccttgaccccgtcgccgaggtccagaaggccgtctggcagatccgcaatgagacggaggtcaaccgcatcatcctgctctctcacctcggctacgaggaggaccaggacctcgccgccaagacggagggaatcagcttgattatcggtggccactcacacactcttctgggcgatatggaagacgccaagggtgactatccaaccatcgtcgaagatctgaacggtcatgaggtcttcatcgttaccgcctaccgctggggcgagtacctcggggccatcgacctgaccttcgatgacgacggccacgcgctcgcgtaccacggcgcacccatccacatggataacagcaccagcttggacgaggagctcgacacgaagattcagggatgggccgagcgttcgccgactttgccgccgaagtgctcggcgagacggacgcggtgctcgtgcaggagacgtgccaggagggcgactgtctgctaggccaggtcatggcagatgcgatgtatgagtaccgctacaaccagaccgagggcaccgacgacg

SEQ ID NO: 9413 - DNA, 119 bp, Emericella nidulans
tcaggcgcttaacaaacagccttcctgcttcgatgcagtcgtacaaggaagcactgcaactgccgatcgcctggagctccagaagcacggacacggtatccaacactaatccggagaac

SEQ ID NO: 9414 - DNA, 790 bp, Emericella nidulans
atcatcatagttggcgaaattgataccagtgttctgcttggttgggtcgttgggaacaccgaagagttcgcgctccagacgggggttcggcggaccagggatatgcttgccgtcgcgccactggccatctccggatcctcgggctgaggcaccagcgtagccgcctccatgacctgggtttccgtaagcatttgggttgaataatggacgaccggcttcagtggcagtccagccggagttggtgttggtgttaccattgggaccacgggggttgaagtcaggagcattggcgttagcccagttgccgccacgggggcctctgtataggtgacggttagtgagctgacctgggatctgatgaaaataaaggtgtagaccgactatcgcacacatacctaggaccgccccatgagccccctgtaggaccaggggggggagcagaagcgccatccccattggcgttaacctggcgctggcggaggtgtggaggaatgtaggcagcacggcctccagaggggggacctccaggcgcaggcgcatgctgagaatcgttgagggtaaggcttcccatatttaagccgtcggccatttctgcggtatttcacgaactaactcaatccaccacgagtaagctagaagaagcgcgaaagacgggagaccagataaaagacgtccaacgtaaaaagtgggaaagtgagcttctcaaaaagtgcgtatgtgctcttgcttcccaaagaccgaaaacagtcgaaattttcttccggttttgggcaaaaaaagctgtaaaatc

SEQ ID NO: 9415 - DNA, 123 bp, Emericella nidulans
cataattacttttgtactattaaagaataatttgtcgcgtgtgttcataattactgatgtactattacggaataattggttgtgtcccataagtacatgaaactataaccggacataagtgtg

SEQ ID NO: 9416 - DNA, 170 bp, Emericella nidulans
  unsure (1)..(170): unsure at all n locations
tcaattatgaccggttctatgcatccaatcatcanggtggtcgcttcagctcgaggtagccagntgaancccagcnaccccccttttcgntatgagantgacaaacctattgtcgctagatnngaaacttcncgaatagnacgattcggcgcgatcgaccctagacatag

SEQ ID NO: 9417 - DNA, 1098 bp, Emericella nidulans
  unsure (1)..(1098): unsure at all n locations
taaaggttgatcaagctgtaggtgccgcagaccggtcagcgctacttgcaagtacggcactttttcacgcggggcatccccgcagtctgatgtcatttgtggtgatagtcacacttggatatggtctgatgcgtgtagccggtctatagagctttttacgagactcgaaacactagacgtgaggcttgttggaatacggatgtatggagttgcaagactcatcattgatccctttttatagagtacaggaaatgcaataccagatagaatggcacgcctgattaaaaagtaacaggaaaccgaaccgaggaagtgaaatatcgcaaaggatctagagcaatccgccgcaaaacatcgcaaaacatcgcaaagcccaattcaaatcaaattcgtggacgacatcacatatcaggctggcgaccgagcaccagcagtcataagtcggtatcggaagtaatatcgtgaagaagcaaggagatcaaatagatcgacgcggtcaagcactaattcctgatcagtcagtcagcatatctacccaacgcgaaccaagcaagaagaccggtgtcagtcactcacaataatcccagcgtcaaatcaccatgaatcttcgccttcagctgcacctcaatatccagattcagatcgagccgcagccgcagctgctcatcactccctttacctcctccaccaccactctcttcttcctgctggccaccccctagtaaaccgccaacagccttaccggcgctccctgtaaccccattcactgctttgcccgctgtgttctgcacgagatcaccggcctggttgatgccgcctaggccacccaatggaccgccgtcttgaccttgctggcgaggacgccgttgctggcggggttggccgcggcggcggcgctggggtctctgctgctgctctggttccatttcgggacgcgggacgtcttctgtgtcggagtcgttaggctcttgtctgcgctgacggctgttatccggtgtggcgtcttgctcaggagcgggctgttgttgttgatggttggtggngaactcgttatcggaagactcttctttggggttgggagaattggggtttgagccg

SEQ ID NO: 9418 - DNA, 784 bp, Emericella nidulans
acctttttaggctcgagatatatacaagcttcaattagttcagtgtagctccagcataatgaacagataccccaatcctagttttctaacgccggcaagaatcattaaatttgtggctcaaaacacgaggatttcaatcttcttttctttcgctccgtaccgctcacgcaattccgatcgagtaagcagctgtaaaagagggagatgtgtctctttcatgtcgaatatccccctttgcttctggtcaacgtatgagccgtcgataacaatacgtttcagttcatccagcttcagggatcctgctgcagtcagcatcaaccagactgaaagtaagggagctttcaaaaccatacctgagttaatcaggtcagaaatacgagcaggagttccagccccaattcccattctatatagaagttagcatgtgagacttggacatccttatcggtttcggcctaccgcgcccgctcgaggaattgcttggcttcctctaacttgatgtgttttgcaaacaatttgccgattggagactcttttgtttggaacattcggagggccctagtgaacggtaagcgtcttcagaatgctatgccctgccacgtagagcgctatcacccacctgaccacattcgccggacgaagaccagcaggggaaacaacaattgtgtgcggggtacccttttgctctgaaaagtctgaaaggttgacgcccttgggactaaagcccttcaaaaatcaagaagctttttcagaattctcgaaaacctaatgacgatgtttaagg

SEQ ID NO: 9419 - DNA, 562 bp, Emericella nidulans
tccacttcaaaacccagctcaaaacccgaccgcgatcgcgccaaaggtcgggtatccatctcccaccaaaattcagtgcgtggaatggcggacactgtgagaggccgattccggatgcccccaagatcacaccatagatgcagcgcggcattccaagtcacagccgccatgtttcttctgcgcacgtggcaaaggtcttcggttattgccaagtcgagattatgtcgtctggatagcccgtcttcgcgtctaagtcaggtggcgtcgtttgaactggcctctagcgtcttggctctggagtgcgtcggccccaaggcggcgttgagaacgtctgcgcagtggggcgcgcgcatgggatgatgccgcagccgaaggctcctggggctccgggataggcctccttcagcagtctaccggtggtgactcgagtccggacactacgaaaggaatcttattatcctcttaggcactgcattaggagttcacgaaattatgaagatcatcgctcggctgggggattattctatggcagccttctgagaaaccgagaccaatatttgga

SEQ ID NO: 9420 - DNA, 1345 bp, Emericella nidulans
gtacgctctcactaactgtcgcaatgggttcactctggtcctccccatcattattaccatctcagcaagataacgagacagagcccttttcacaccttcctaaagagataggtacagacccgacactgagggaagactccaacgtctcgaaccgtaactcagaggccgcgagtaccagcactgactccagcacaaacacaaacgaaaaccatgcttctacatcccagtcttcgcttgaaggcgcccccgactcgggccccattaagattgctatcatcggcggcggtatcatcggcataatcacagcgctgggtctgatccaccgcggcatcaacgtaaccgtctacgagcgcgcccccaagtacaccgagacgagtgcgggcttctcattcagcaagggcgcccgcaaagcaatggaaatagtatcgccacgggtgctggaagcgctgctccgcgtcgcggcgccaaacaagcacccgtttatccggtactttgacggttttacgcccggcgcagacgaagcgcagtggcagattcctgccgaacggccggattactatggttgtctgcgcgcggcgtttctggagagcttggggcaggaagtgccggaggggatcgtgaagtttgggaaggttctggagagctatgaggacaatgaggaggggaaggtgcttttgcggtttagagatggcagcacagctgaagttgatgctggtaggtcttttccccctctctacacattacagattatcaaaggataaacgaaccggttccgctgacatgagcggctggcgatacagtcatcggctgcgacggcatcaagtcacgcacgcgccgcatcatgctaggcgacactcaccctgctgcagcccccggctacacagagatcgtcgcctaccgggccgtcctccccctcgaaggcgttgtggcggcactcggcgaagacaggggacacagccattgtctcgccgttgggccggacgcatacaccgtgagctacccgatcgccaacaagcctctcgccaacatgatcctctttcgcaagcagcgcggttcgtgggcgaactctgacaaactgctcgagacgtgccaccgctcgaccgcgcaagacgctgtcaaagactggaagcctgaaatccagcgcctggtcgacctcctaccagagaatcccaacaaatgggccatcttcgatacgtcagacaacccggtgccgagctatgtgtctgcctcaggacgcgtatgtattgcaggcgacgccgcgcacgcgagcaccccgttccttgcgtcgggggcggcaatgggggtggaagatgcggcggtcctagctacggttctaaatactgcg

SEQ ID NO: 9421 - DNA, 529 bp, Emericella nidulans
aagaatgcctgggaccgagtcacttccacgccagaagcctccacgaatgcgagcgcactgggcttttcaacccttacggtcaccctttcattggcatagtccactgttacaatgcgggctacgaacgtagccagcgcctcaactgtttggaatgaagtctcttcaacgcgcttaaagcatgatggtcagcttatggtttcaaggtaaaaaggatgaacaacgaacctcagcaacagccctcgtcatcgcctgataggtatccaccacagttgagccccaagccaactgtcctggtcctttgaattccagtgagataatcaccgcctgcttctcaacccgctcgtgcgagttcacacccaggatacagtagcaccgaatcccttcgatacgaaacccctcttccaaaaccacagggcaccgctctgaactacttacatcgctcccagcagtgctcccttgtctatacccccaaaccgtagaactgcggtaatgaagcccgttctcggcacgtaacagagcctttggtaga

SEQ ID NO: 9422 - DNA, 1328 bp, Emericella nidulans
ttctcctccgcaacagcatcggcactaacgtaatcatggtccaggggcacctcgtagctagtcagaatttcagtttcatcgctgtcggaatatacactagcgttgctaggtgtcgcagagcaaaggccatcagcagctttacggcgagaagagttcccagaaagatccatagattcaagctgaagccgtagagcactgataccgcctccagaaaccggctgcagcatggggctggcaccattacttccagccagaggccgcggttgagtactagtggcgcgagagctcgttgttgagaaatccgagtcttcatcgccagagcctcgaggtgtgaacccacggacagtggacagagccggccctgcatcgatttgagcctgcttcttctttttcttgcgtctgtcgcctttcgcggtcagcgggttcgtgtccgattttgtaaataggccgggtctgcgttccgggctgcgcgcactcatccgaaatccggtttgctggctgacagtgttgcactcctcttcaattttcgagtggcacatatcagcctgggggctgaacacatccccaaccgaaagatcatcctgagctgtatttggcgacatatccgcgtataattcccacgatcctcagaaactcgtggcaagattaaatagcaccccgcggtaaatcaatggtagtctcgccgatgagtcgtcggaagaggatttttaaccagaaaccgtcacatccgctcactcatacgcacagaaacgacaaggtacgattcacgataccgacctaatctgtccacgagcatcatttagccaagatttttgagcaaacgaagaagatattgaaaaaaaaccccaccttctagatcaaattacaagcaccacttttttcaagcgcggcgattagaccgctgcttccgttttcctccttgtaaagcaaccccagagaacggacaagcagtgtagtatttaccgtccgcccttcttcaggacggacgacgaacccctacccaaatcacgtcgttaacgaaagcctcgcgcacgtggaatctggcacggaggtaacagcagcagatagcgagcagccggccagagcgaacgatgaagcggcagtcaaatctggggttgagatgaggtgaaggccagcagtgcgggcgagatcgagcaatgaggacttgggcgcagacgggcacatgaagaaacggcggacgatgatatacggaataaaaagaatatatctcgagatccgagacacagggagagttgcaaatgaggtaatcccgtacaagggaaagtgtaagcaggaaagggagtaggaagaaagacaaggccatgcag

SEQ ID NO: 9423 - DNA, 627 bp, Emericella nidulans
ttgtttgctgggagctcctgttcaaacgtcttactgacttcccactgcagcatgactgcagcagcctgaaacccgggcattcccaacattaggtgtcagagacaacactgcgtccgtcctgaagtcctagaaaaggtctgaatagagctttaagagtttcctgcacccatgcaatctacgattggctgggtgacaagcgagagagggagctatccccgcaatgacccaggcaaacagcatgtttggccgtggcccctggcctcattctcaatctgtagcatggctccctaaccaggccgagagactgagattagctcataaagccgagtatattgttctagccgctgccagtgcgtatcgcccagccaaagagcactccgggacccgaagccacggcgggcggattcgctgctggagcttcactcagctggataggtgactgagaagacacatcttcattgatcgccaagcatttagctgcatattccttgttttgatcctgccaataaactagaccagttgtcattgctttagttagagaacttctagctgggggtgacaaagagggcagagctatgattaggtagcgcatcacaagctattgtggccacagtcttataacgatac

SEQ ID NO: 9424 - DNA, 956 bp, Emericella nidulans
accgcaagaacgataagtgatgaaaaatggagtctgacgtgagaatcgacgaagttggtttcacgcctcggcggcgccagcatagcggtctgatggatttggtggtaaaatggctgacttggggttgacgagtatgagcttcgcaactgtcttggagaagaactctaggactctgagacttgagaaatgtaataaacggcacataaactacaatttcccctgcggcggccgtatagcatccatgcaatcgattagggcacaggtagaatcggttctgactacaatctcacactgaatgtcagcaatctagcatcatctgggtccttgaacgtgagcgcgtcccgaaattccactctatcacttggacagctgagattatagaacatagaataggaggctgggcccgtctcaggcattttttcttttggtttgtgacaaggacccagtttgaaagtctggcccatgctgagtggatccagtgagaaggcaagaagccgcaagacttccactcagatctaatggagaaccatttcaagagtccacaatgaggtggtgggccagatagaatagagccagcctagagggcctggtggacgtttccgacattcgttgcgttctccattcatagctgtcagcccaaagctcgcaatctagaccgtccagcgagtggatgcttgtggattatcctctgatcagatccgtagacacagattcgaagaaaagtggacactggttggctatcactcccagagtcaatcattatgttatacttgagctcgttgacggcccagcgccatgccctctaacctcgtaaagagccttctgtgctcagttcaggatggggcagccccgggccattgccggtgtaagctggattcgctcgtgtattcgcaaggcggtcaggaccccgttctgccatttatgtctgcggttgcagagcccccgagcgtggaact

SEQ ID NO: 9425 - DNA, 206 bp, Emericella nidulans
tttgggatagtcatgagggggataacgtcatacttagggtcagatatgatgtcgagttctgaatcatatgtgcatagagtgaagcgggaagagaagactatagagcagaaaatgatgtgtaactctagatgtagaaggcagtgaaagtgaagagaggggtgcttgatgcacatttattcaaatgtggacgggtatgtaattttggg

SEQ ID NO: 9426 - DNA, 1810 bp, Emericella nidulans
tgtatggctcatggttacccagacaaagaagaccagctcaaactgctggagttgagctgtcagggtatctggaacgcgacaaggcccgtcgtctttcttgctcctttatcgcctaggagcgcgaggtacgaagtttttgggcgttacgtcggacagttcgtatgcgccgtgattctccaagtggaggtccgatagggtctggaaacctgccactatcattggctcatgcaatcggacccttgtcaagaggagcctttactctgtaggtaagcgctgtggctacggactccctaaaggccaagcattctacgtagccgccctcggtcgcatctattttggttgacaacagtgcaagacggctggtcctcggcgattccttgtctgcagcgcgtctctctcaatcacgttcccaaaaacatatggccttctgctttgtttagcagtcacaatgacgctccgtgttgctattcttaaaatatttcagccactcagtgattgtgtggcggtgcaatgtagaaaggcagtgtggcgcaggcgtgggtatggcgcttattcatcagggtcgataaccacttaaaagacacgcctctagagttccaagagcccaagagtgtagcctgctccagattaattatctcttgttcctctttttctgtctctgttcgcctctgggacttctctctgcttgctaaaccatagacgtggttgacgcttttgaaacttcacatttgcttgcagcttaacctcgcgaccgataacgtcatctaagtccgctcaagacttcaggacctcagtgctcattctttgagcgggcggcagaccagcattgcaaaatggcctcgacttcaaatgatcctaggcttctttacagcataaacaatgtccacgcttttcatatgcagaacggtgaagagtctagcttgactccatccggccctcaaacgctctcccttctcatggttctgacgacgacctctatcgctgagaaccaaaatacagctttctcgtcagctcaggaaactcagcctgaagaagatttttatctacacttacacctccctccagagttggatctggctcttcccgccaccactcaaatctaccaccagccgccaagtagctacctgattccccgctgggatttaggaccagatgcaggcgcattcattcgtatccaatttcctggaattggtgatggtcccaacaaagtgacgcaggaggatatcgatacctttgaaactatcctcgctcaatgcacggcctttcatgaacgtgcgaaggtcccgaacgatcatgcgtcatataaccctgcaagttttgctcccggtgagggttatgtatcctcggcgggcgctgctgggccccatggcaaaacggatccgcacggacggattgtgctcattgatgaggagaatggcagtgtggtcggtgaaatggaaggctatgatgtcgtcgaaaaccccgacgtcaagcccggctcaaaaagtaagcctagctctgctttatttaaacattggattaggctgacgtagtctcaatttaggacccgtccaagttcaactgcctaccgaaggcgagggtaatgttgtgagcgtgagcaatgtgtcggaggagtaccttgcaacggcgcggcatcccgcctataaaaattcgtctctcgttcagtcgtcggccacagcttctcgcttgattgttactggatctacatatcttgccaacgtaatgaccagtggtgcagatgcattcactaaaaaggtcaaacccaacccaaagccagcgaccttctcagacgccactcatactcggattc

SEQ ID NO: 9427 - DNA, 1519 bp, Emericella nidulans
tgtttatcatgatgtgagtcaaaatcaatcctcgatttaaagatttgatatagtttcagttggtgccaatagggacgcaatgttgccctagatggttcaaagcacgagacataccccagagactgaggtcaagtcaagacgatatatctatgagccggtcccaatggaagatgtcgaacttgctgatataccgttgagccatctcctaaagccagggcctcatttcgacaatttctggttaagcactttcccgaagaagattcgaggtccactgcttcgactacctggacctcatggacaaaggtgttgttggatggggtattcgagtgaacgagtgtttgaattggactatgatcctacttttgatactcgccatactccttgtaacttctgctagcgtcgtcctctacgcgacaattacggcagttaattcgtctgccttcgcctttggagcatacatggtggcaatgtatatctaacagtatatctctcttaccagtactttgcatggagggaggccatatgacgtcagcaggcgaaggtttgagagagacaggtatcttcacaggtgaactggcagtccatatgtcctcccagggaggtttatattctggataattgcacttgagtagctgatatttcgttatctcctgacagtcttgagcccacagaacataggacatgattttcgctatataaacagcagactcccagcaaactagcaattgaacgggtattaaggagccggagttgccactgtttgaacgctagtgtggtttgcgctgtttgcagcattggcaaccccaagatctgcatcatgatcacaggcgtggcaaaacgtttatgtttggtagctgctgtgagattacccagaggctaagatacaagcatgatttgcatgacctatatccagcgtaggtgtcccttggcatttgggcttcgaggataattctttttgagtatcaagaaaccggaaatctacggaaatcaagaaaactgtagttttcgtctagctgggctgaactgcacttgcaggactcaacccaatcaaaatcatgtattaaaaaaaccctaagaaaaccgcagtcgcaatcgcaatcgaaatcgaaatcccaagctatcgtgttcgtatcatatccacaaaacccaaagattaacaaaaaaaagatgaataaaacccaaataaaaccggacccaatcctgtccgtcaaagcgagaatccatccatgaacagacttttgtctatcatcgtctatctctatcccaagccaaacaaagtcgaagacgggttttgtacaaatgcctcccgaaaattcagaaagaacgagtaattaaacaaactaaggctggctgttgaatgtttaatcaacgtacttaggcatcgtcttgagcacgccatcgcgatcgatcaactgcatcgccgtggtgatctcctgcaagaagcgcttgtcaccgcgaagatcatcaccgaagaggctcttgatgctcaggatctcgtggggttccagcctccagcttt

SEQ ID NO: 9428 - DNA, 133 bp, Emericella nidulans
  unsure (1)..(133): unsure at all n locations
attaccattcttctaagggcttccctgtgcgcttcataagacgggcaccactctaactgtgctgatggagacgaacgactcatctcagacaccagtcaggtgngccgccatacggcctgccnctatagagtaa

SEQ ID NO: 9429 - DNA, 1206 bp, Emericella nidulans
ggcaagacaattctacttgcaaggtggataagaagcaactgggatatgcgcatagtggccttattctaccatagacgtccaaaaaatacacacatgagcttcttctcgatgcactggatgcggcaagggaaacatcctcttcatttctcggctttctcgcaaacccggtctggtgataatcgctatagctccgggtttccaaaactaccattcttgcctcagatataagcaaggaagaaatctctgattatgcttgggagctgtgttctttgcttttgctttccgcttccggcgtcggatacttgaacctgaatcctctccactgtcacatcatctactctcgcttcctgagccaatgctcctcacactccttctccgactcgcgacatgcatccgaccctgctacataacatcctgtctgcctacattgcttgtcttgtttatcatggatagtctagcgattgaactgagcgggttgaattgatcgatttatcgccttagtgtatcgattttctttttggcgttgatgttcttgttatttacacggtgccgacatcactggtctggtcacctccactcatttgcaatacagttgaatttaaattgatcgcttctacgtcgtttgtcttcaattaggttctagttgtgtccgtcctttggaactgtctggttcaaggctcgcttgccaggttatcttaatggtatgcataaaaatatatattgtgattcaaacgggcatctccgtagaccccgatgcagcctggaattgcgctaggcttacctaaacttgaatacaatacagctagagaaaggattgtacttcgctcctaccaagcaaggcaattgagcgctcatcgtagcagagtaagtccaactcgaaccatggcaacagttcaaaaaggaaggaactagacccaagactgcgctttccatatttggtctagagcggttatgctgtatttgccccgcatttccgcttttagcccgcgcgcttccaacattttctttaccgcccgaaattgtcttgactagtctggccgtgcaactccgaaatgcgaacgattaattatagactgagatggaatatgcagtgtgcataactgcgaataatgctacgctgtagccgtggtccgtcaagcccagactgatatgcccattccttgcttgtcgcatcaactacatgttttatggcatcgaatgcctcca

SEQ ID NO: 9430 - DNA, 1694 bp, Emericella nidulans
gagcagacttaatattatttacgattatctgcaggaatagcaattagacagtactagatccactgccgtccatctttcagcagggcagggcacggaagtggatccgagggctgctcacgccttagagcttagtgagcacagagccgtgtgcctgcctacaccttaggcaaccttgccaaaagggaacaaaagtagaccgagacaaccaacgactctggcttgatctgacggtgacacgatcgaggacaccgaaattgcacatcgcgtttctcagctgccagagacagcacacataccaccccgttctgtttggggccagcaagcggagcccgccctcggacggagggccaggccgggcaaagcgggcgtactgaacaaagcctcgtctctgccttttggctagccaacgtgatcagaggctgactcactgacattagagtaatctgctagctgcaaatctgctaaagcgttatttactgattttccagggagcacgaatcaggccccgccctttagccggtcctcgatctaagtagaggatcgatgctgtcactccagaggatgcctcgggggccctatccacattgtggctcaggcatagcccgtttggggcgtgatgcctggctgggatctgcctggacgagagctatgtgattcacatctcaggttaaatactctctcctttccctcgtctcgtcgctcctcatcaacttgcactttacgcttcgacatcattttcccttgatcaatcggtcaaccaaaggaacagtttcgcccacagccaactctaccactctgtctccctctttgagtcaaagcctatctcgccgcatcaagatgccctcataccttgctccctctcagaccccagagacttaccgttctctgtctggtctctctggctccttcgaaatggagacctcaccggctctgcactacacccgctctcaccgcggccacggtatcagccaattccaacggcccaaatactttagcacctccagcctgtacatctgctgccagtgcaacgatggccccaaagtatacagccacaatgttcagtgtgtgttgtgccatcatatcgcctgcgatgaatgcactcatgtcaaataagcgcttaactgaggtgagaagacgacaccagtgaagcaatcgccgagttttggattaacaatctgcaggtttacgactcgtctacgtgcaattgattgacgctggattttggattttggtttttggagcgagtgatacgacacagcatggcatacagtacagcggaatcagacgttctgggataacatcgatttagacttgggcattggtttggggttacacatacacaggattgactcttggatctgttggtttcgattttcgtttgggatattatgagcgagctggcctcgatggaatgaatctatgagataattgtgcagcatgaaagtgcggcgttgggagtttacttgcttcaacttgtttcctactcaaactcaatttgataattgcttttcaccttttctttttttttgtgtcgagattagaaatttgtgaatcaactatttttatctgacgagcttgatgattgtggttggtaaggttcctgcagtcatgggcgagcttttcgcagtccagcttaacaagacagttgattacacgaaaccagctacgggcatcatcagagattatgaccaccg

SEQ ID NO: 9431 - DNA, 102 bp, Emericella nidulans
agtggaatcggttggctgctattataccgtctgccatattctaggcggaagcagttaaccgtctgcattttgtgcggaaaacatctgaagaggaataagcga

SEQ ID NO: 9432 - DNA, 1332 bp, Emericella nidulans
atgaacgattagattacttgatgatttgtaaatgcatgagacgtagactgagtggcgaaagaccgaagatgatggagatggtaagttgcaggaagagaaacgaaaaggcggagtttccccatatcaaaaagtgaggtgctgcagcaaatcccagccaccaaattcacaactgcctgagtaaatgtcgatatttagatctactcccttgtacttaggctttacaatctctggcttgtccagttcacaccagcagcctctaatacctcttcaccatccaccaacacacaccaaccctccgatccgcgacctccatcaccggctaccaccgtttcaaaatgcgaccgcgcaaagtcgagtattgcgtcgtcaaatgtccccggttgtaaccagacggcagggatcccgacagagtgagcttcctgtagcagaggaagtgttactgcaggcggtgtcaccaccgacagcgaagtctgcgacggggaagacagcaggcgaggcgatgcgacggtgtcgtaagaatgtgaaggcgagagctgcatactgggggagcggggatttagaggagtcactggcaaagaatgttgatggtaccaggctagaactagcacagagtcagtatgcagtccacatcttgatccaggcttagggctcgtacgtttgtaaccaaacttgtgagagtcattgctagccccagcgacggcgaatcgaggcgatgagaagaaccgtttgactgcttccatcgtgcaaagtagaactcgtgcggagtaaagggaggtcgggttttgtagatgaagacttgaagaatgaggggcagctgtcatcattaaatacctccggatcgtccctcgatttcatcatttccagacctcggttcctcatcacatttgacaccttcaaatgcatgttcttctatccttttccgattaattacctttatttttcctgccttctggatgcccccttttattcggtccaaacgccagtcctctgagcacaataccacttccaatcgccatgctaccactgcggtgaccacgccctccgccagcacctctctaacaccggcctccgactcttctttaacacccgttccgaccgaccttgacaatgattccagtaatgaagataagaaggttgtttcagattccgatgttacagactctgaggaggtcgactgggaagatgccattcataccgccgctcccgccaccagcttcgtctctccccatgagaacttagagttgacattagaccgcaatgaggtgcactagaagatatcttcaaggtcagaaagcgcgacgaagattgaacgccagattcgaatattaatac

SEQ ID NO: 9433 - DNA, 105 bp, Emericella nidulans
ccataattactattaccactcctccgagtcctcgatcctcgctccgcactccaccgacccatcttcgctccccaattcaagctttcttctacccatacattcagg

SEQ ID NO: 9434 - DNA, 485 bp, Emericella nidulans
ttatctagaaatagatagatctactaaataaataaactaggaattaaaagcctatttataatattttattttatattactagaataattaggagcaacttctacttattataatattaataaataatagctatatattatctattactagtataagtctattctttgtaacttatagctataatattaaacctaacaaaattaaaaaattcttaagaataaaagataagatactagttacttaagcagaaactcttatttttaaacttaaaaaagtaataaagatagcttagataataataatagcagcttaggaaagatataaaagacatataaactagaacccgtcattcttagactaattctatattaagaataaagtatagcttaacttaaaaaatataattatgaataggctatctaaaaagcttaattagtagaatactaaatatataatagctaagctagttaaattatatactattt

SEQ ID NO: 9435 - DNA, 102 bp, Emericella nidulans
gggtcgtcgagtaccgcttggaattcctgagtcctggatagttccgtacatcgctcaagccgtcactgcagcggttctatctctgggaatgatccttttccc

SEQ ID NO: 9436 - DNA, 115 bp, Emericella nidulans
aaggaagtaagtagaaactgcagcaagaagcaagaaagcacggactagaaaagaagggctcaaagaatcataccgttagaattcaagttcaaacatcagtagaaataacgacgcg

SEQ ID NO: 9437 - DNA, 114 bp, Emericella nidulans
  unsure (1)..(114): unsure at all n locations
caagcaagatctcaacacgacngtcaagccagattcccaacacnctaggaacgtaagaggcaacgcaagaacgtccgacagtaggaacaggagccgactgcatggtaagggcgt

SEQ ID NO: 9438 - DNA, 1394 bp, Emericella nidulans
gacggcttgcgttgctatgccatggggaggcatcctcgacgttcatgctatagtacggaacacaatagatcggaccagacttcttggcttacgggccaagaatatatagtgagcgaggcatatatgagatggagatcgggagaaggccgtgttagaagaggaaaagcatcggggaccaacagaggaagcttccccttgcgtcacctgtactccaagagcgctgcagcaaagagggggtggacgaatggctgtacgcatgcgactgaccgttgcagctccgcagaccacgggaggccgatcatgctcaggagtggaaggtagtaggtctcggggtctccgaaaggaagagtatacctctgccgacagccgaaaacaacagtagagtcagtacggcacatattcaactaggacttcatagagacggataggtaattgcaaaggtgtgcgggtgggcggttgtgttggtggatgtgagagcgatgcctgacacggggatttaatgccttaggctacgaacaatttcctccgcgttaccagctcggcccatccttgcggagactcaacctctatccatcatcagttttcttcctctcaaccacaactactgcctggaaacacatataatgtctcgcagatcattatgggggagcttaaggctcgtctctaaacgccaattcgctgtttccgaagctcaataccgctgcttttcctgctccttgcggacccagaaccagtccaagtctgacaaggaccgaatgacacactttggctttacgaatataccggagcacgagaaagagtcaatgggtatgtttcttcgcgaactgcgaatcagtctttgaattattcggctaaccagagtaacgtccagtcggtaaggtcttcagctcggttgcctcatcgtacgatactatgaacgatctcatgtcaatgggtattcaccgtctatggaaagaccactttgtgcgctcattaaatcccgggtccgcgcttccttcgcgcgacaacgactcagctgagaagggctggaatatcctcgacatcgccggcggaaccggcgatatcgcctttcgcatgctagcccatgcaacgaacatcaaccacgactaccacactcgagtcaagattgccgatatcaaccctgatatgctagcggagggcaagaaacgcagtatccagaccccctactacaattcggagcggctgtcgttcatgcagggcaatgcggagcatatgccctcgattccggataactcggtcgacctgtatactgtggttttcgcaatccgcaacttaacccccaagcaggcggcacttgtggaggcataacaagtattgaagccgggtggtgtgtttgcttgcatggagttcccgggatgtcactccatgttcta

SEQ ID NO: 9439 - DNA, 456 bp, Emericella nidulans
  unsure (1)..(456): unsure at all n locations
gcatcgatcgactgttctctacccgccagaacaatgcacatgcctatcccaacccgtgcccgctccatcggtggccatctctgtccgcancgcatcagggcaagcacggtcatcgggtcagtgcaattccctctctgagacccatctcgtccccggcgagacgcgagngactactccgtagggcacgcgactgtcncntgcgatctacgacgtcgtngatccgggcttctggcagctcactaagagacaggcttcggagttaccacgattcccgtgtancatccataanagctgcgtaaccgagagtagagtcgagcngattgcatcaaccctggatcagattcgtctattgcatncaaatgatggcggnctccaagcaaaatgcgatgtgcgcggnngggtggacggacgtgtctgtgcttcgatactacgtactgggtacactagctaagaaaa

SEQ ID NO: 9440 - DNA, 2001 bp, Emericella nidulans
tcatacagtcaggccctcgaacagtcatctgagacagtcaaatcccgtctttactggtcctctgaagtttgacagtgaagtcgactgtgaaatgagagaggaaatcgcgctgcccccggccgagttggtcaagatcgaatattccggtaccttcccttcgctcccgtgtagcatcccagatccagacgatgaggcgcaggctggatcgacaacaaattcgattgcgagctcggaacgaagttggtattattatctctccaaaattgcaggtcggcgaattgttaaccgcatcactgcggccttgtatcttctggatccagaagaatggactatgatgccggtccagaatctgctgcgcattgctgaagaactggacactcaagtcattcagtgggtggagaatttccctcctttgtccggtttaacagggaaagcaatgcagacgaattgtcgtattttcttcatgccggtatctggatctccgtgagcgaatctggagaccgtttctgtatctggcagcgcaatctagccctcaggatcccaacttgccaatctacatccagcatgccagccaatgtctagacacgactttcaagcacatactcaattgatctatcaaacaccgtcaccatgcatcttggtttgcagcgcgcaatctttttacgaaaggtcttctggtattgggtgctgcaaaaagccccaacatttctatgccgtcaaactgggtgactataatagacacttgtactgcaggtatttggtactgggaagacgaagcgccagacctgcgcgctgcaaggcatattcttcagcatatttgtcattcggttaagccacctgcatcagcatctggaagcaccattggataaggaatcacatttcttgatagtcctccgatttctcggatgagcccgcataagatatttcggctctaccaagggccatgtcattggcggactagtttagttgaccctgcgtgctcggggagacacggacttagttagcttcaagctgccccgcagacccatacagccaagtatgacagtgcaaatcggacagatgactgctagctacactgaaagatctccgaaagactggagtgctcactgagagtagttatatactaccacatctggatttgctgaagccaatctttccaaaggacacaaagatggaatcacagaaagagtctctcccaaccctccgttggggcataatcggtaagtcagtcatatcattgttgagccctcgagcactaaaagcccttaggagcaggccttatctcctcctggttcacaaaggacatcagcctaccccgcaaatcccctgctgcagtacataaaatccaggcgattggctcgtcatctctcgagaagggccgtgtctttgtcgaaacgcaccttgcaactctcaaccccaagccaaccgtctattccaactacggggacgtctacaacgaccctgaagttgatatagtgtacatcggcactccgcacggcctgcataagcaacactgcctcgacgccatagcggccgggaaacatgttctctgcgagaaggcctttacgcttaatgccactgaaggccgcgaggtccttgccgctgcgcaagctaaaggagtattcataatggaagccatgtggacgagattccagccactcgtctcaaagctcaagcacgtgcttttccaagagaaagcgattggcgacgttcgtcgtacattctgcgatttcggacttgacaaggatattgcttctctcccgagcacatcgcgcctaagagaccccgccatgggtgctggaagcctcttggatatcggcatttatgctttaacatggggcctcctcacacttgaatcggatccagcaaaaagtgaaagaccaagagtggttgcagcgcaaacactcagggatgcagccatatcgccacttcgttcatccttcattaccaatccaccggtcgccagggacttctgacctcgacaacagaagcccgtactcc

SEQ ID NO: 9441 - DNA, 988 bp, Emericella nidulans
tttcaatcccggggctgtaggatacgcatgcttcacggggaaggaggaagcattctttgtcgggtaccgaaatctatgtgggtgaggtttttcgaatcaggcggggcggtctgatcttcttgaaggtgtggttgacggttacggagtacaaaactgtttgctccactgctgccgcgatggcggtacagatccaagttgttgccatatcaatagagtactacctaccagggtcggacgagtgaagagaccgagaactgacgccgaggcttttgattctcaagcaagattaaaaatacgtcgtccatcatgcctggtctttgaaactgtatcagccgagtaccttatcaatctgcacaaggatggagctctcgctcacccatttgggggttgactgctctctggagtgtcagctggggagctttcggactacagaagcccgacggtaaaaatggtgacatagtggggtctgagaaagccacaattccagaacatcagaagagaagccttgattatctcggggatgggataactataatcctagaattcccaaaaaagtttagtttagcagccatgtgacttgcatcacgggacttccaacagccctggggcaactcgggggaactcgctaagcgtcccgttttgggttagggcgagccgcgccgaacacacggcaaattggtggccattgtgcgtctcagaactccaaccgaagcgacgacaaccacgacaacccggacgacttttgcgggtcattttgacaacctctcgacttgtttgtgttgcccgctcagaatcaccgtcataatgccttccgaacacggtcacagacgtgagtacgcccttggagtcaaaaatgatggcgacaatccggaggttgagaattgagatgcgcgacgattcggtattggaggttcggatttcttgaatttgctaacatattttcttgcttatagtctacgttaagtaagttgcgccatatctattgttg

SEQ ID NO: 9442 - DNA, 634 bp, Emericella nidulans
ttccaacagtacatccaaggcagcaccaaccattatttgacgcttgcagctcgccttatcgacactgtccacaatgtcctaggccgtcatcgttcgggcacgtcattccttcccggggcaagcgaatcgaaccccgtcggcggggggctgcgaatcggcaagatggacgactccggaagcgacggcgatggccagtaccaccattatctgactctgtggatgttcgcgctgaaccggatgagtatggcaaccaaagacccaaagtacaatcagcaggcgattgcgctcgcgaaagcgatccatggcccatttttcattaatcgcaggagtgacaagccgagaatggtctggaagatgactgtggatctctcgaagccgctggtcgccagtgagggaaatctagatccgatcgatgggtttgtcatgttccgactattgcaggctactgcatgccatttcgaaggccgaaacggcgagggtgaaaaagtgctgagagacgagattgaggattacgcacgcgtgatgaagcgcaagggtgagcatttcgtttcgtcggatccgttggatctagggatgaccatgtggactgtgcattgggttctggaggatgattggggacacgcttggctgagag

SEQ ID NO: 9443 - DNA, 1315 bp, Emericella nidulans
tctgatagaaagtgaaactgaactcacaaaactcatccggtccggtctaatactcttaaacctcattttcccctgcgatttcgtccctttcacccaaaacgagatatcgatccggccatgcagctggttcatctcgccgctaatccaaggtatcttctgcgcaaaatagatctcatcacccaatatctcgcgcgcacgcggcgacgtgcgcagagcatacagtgtgctgctcacgacactcgatgaggacttttggtagttgaagatgcccagcatggcggcgcccaccacgaccgcgaaaactggtaaggtccgaagccatcgtcgcccttcagagttgatattgggaagctgacggtctgctcgccgttccgttatgggaccagagttggccgctggggcggggatgagagagcgacggggactgagtcggttcgttgtgctgggaagtcgcggaaaccttatgcggcttcgggtagcttgtaaaatcatgttggagattgggattctctcagaggccagctgtccgttctgaattttcaggccagtacaatgtaaggatcggcaacaatgaatgtataagaggaattaagttggagctggcgaagcgggagttggaggtgaaatcaaacaagacaaacttggggcatatgatgtggcgctgagagatcaatagtaggagctttctacctatatctattttacttcagatcggtagaatctattggcgactcttttcattgccttacctcaggctgcgtggctatatggcttccacgaggcttcgcaaggcattccgctatccggttgactctggcgatgacggtgcgcgagcggaactagatgaagaaggtttgctgaagttctctgtatctcatttactctgacgctcgtgcctagaacaagaacgtcttatcaaagctctgagatcacaaaatgagcaacgagactcgcaatacagcgtaactattctgcccttgcgcgcgctatacagaactggcactgagcactatctatagctcgtcttcgctgcaatcccgctcttatcaaccactgtatttgtctcatcgctattgaccccagcagcgctggacttatccgtccgctttttggcccttctcggaactctgtcactcttggctacagcctatacgatcaagtatgtaccgctgcaacgtccagacccaaagggtaagaggcccgtacgggtcctagatctcagagaacgcgtggggatttatataatcccttgtaatgctgcgatgtgtgctcttctagggatggcttatttctttcgctcgggggcatctgctgg

SEQ ID NO: 9444 - DNA, 1244 bp, Emericella nidulans
aaagctagctaggtatcaactacagtatttttataatcctagtcatctacatcaatccacatcctgacaaatcaaatcataacttcctgttatttatcttcatccattgatccgtcagacgttcatgacattttctaacgtagagtgtcgagcatcaaggtcattgaaggtccaaataacactcggagcacctccgcccggagcgtctgaggaataggcactgcctcatttgagctcaaactgcgcgagacaatcaagggatatcgaaaacaggcttgagcttcttgataagagcccattcatccatggagacatccgaccggtagaactccttgagggtgtcgatgcttgcacgagaaatctgggagtatagtgtgtccgactcttcgagctgacggccgtacatgggctgattggcgccttcgatcttgacggcgacggagggttggcctcgcttgacaacgttgacaggcttgtggtcacgttcgataccggcactgcatatggtttagtgtttattgagaaagtaaaagtgaatggaaaacttacactctaccgagttcgacaacttccttagcacccgttgttgcgtttgttttgatggcggcgataggcgtgtgtagacggaggctaccctcgacaacatggacaccgatgactatggggtccttcttggtaaagacggcgacagtcttaagaacacaggggaagacggcgagcagcttggcctcttccttcttgcgttccgtcagttcggccatgtgcttggtgaaatcgtcgaacaggtggtagataatgtctgcggtgaaaatcttgacaccaaccttcgtctgggtatgcttgtgctttcttaataaactttgaatctaaacatagcatgaacgcgtacttcttgtccttatttagaattttccttgatatatggccttgtgttgttgcttgtaccatttatgttttgtatttgtatcttatttttcaatatatctctataagttttatattattatgttttccttacatttttttctttgttcttaattttctcttatttcatttctatacccttactatattttctctttcttattttttgttaatatatgtcttccattatgtctctttctatttgtttattatcactttattgatttattttactttatgatttcttgttcttataatcctttaatttattctattctttcctatttcctactgttattatgcttttctttattttttat

SEQ ID NO: 9445 - DNA, 1035 bp, Emericella nidulans
cttccttgtggcgcaggctcggttgacactgtgagctccataacgtatgcgtcctcatcccagtacatgagtttcatagctggattgtttagagggctgaaggtaaatttctcggtactttcagacgggttcatgaccggcacaaaaacgcctgcgtgaatgtagctgaccattactgggcgggatgagatggtgaatttctcaaacgaatgaagccgcgaaatagccgcttgagcatcctgatccagttagttgggcatccacttatttggggtagcatgtacctggattgtagcaaactcggcaaacccatatcgccagctctcgttagtcctgcgatctcggaccagcagaacacgccggattgagccttcccgagcgcctaggttagagtcgccagtagtcgatgccaccttggctcctttcttctgatttgcagagttgccgtctgaattcggacgatatagtttggccacacccttagccaagagctcttcagtcacggaggtttcgagcccacggaacagcaggaattgagagggctgattttcgggcgctgcatcgttgtcgccatggttcttcacctttggcggagctatacccgggggcccggttggtccagcatctgcattactttagccagagaatcattcccgaatcataggcacatacctggacgtggggcttgacatcggaaacacttatgccgggtggaatagttgacaatagagcactggcttgttagccctcgcacgccacataagggttcacagtgcccaccattttgcaggtccaatccccctcagctctagccttggcacgatcctctttctcccgactgtatgcaatgcggaccttggttcctcgatcatcctgcgcgctcggtccgcacaaatatattgttggaaagttttgttccataaaggcgcgagagtggttgagacttctgaatcgaagaaagcccaactgtcgagatattcctgcaaaacattaataaatggaaaacatatgggtataagacaacccactggtttg

SEQ ID NO: 9446 - DNA, 1666 bp, Emericella nidulans
tccttcttctgcaatgttcgcaagcctgctgagcacgtcatataccacacgcttgtgctgacgacgaagatgtacatgcactgcacgacgggatcgagccaaagtggcttgttgatgcggcgccaaccttcttcaaggtcgcgccaacggatcgcctgtccaagaggaagaaggcagagaggatccagccgctgcataatcgctttgctggcgaggatgattggcgcttgtcggcacagagaaggcagggcaggggtggtggcggtgggacttggggctagatgttctagtcttctggattataagtgtttttctatcatctcactctactgtgttgttctatgtcatgtatacccagttagaatatattttggaggttgtattataaagttatttcttctgcatgatctatttacggaaattacaaactttacaatgtacggggtgcaatccttactaccccgtgatacctggcacctgcaatatctcggcattcagaagtagatccagccgggtaacactcttccatcggcgatagataaaataccgacatcacgacatcggcatccagccgatctgtcggcgataacgatttccgtatctctgattatcgagtccacccgtcactgcaccagctctagtgtctcgctatgcaaataaagggtctacaggcactgataagagcctgacggccacggctaattctgataaaagaccccagcagacgaatctcgactgtcaagccgtcagtcttcagagcacagaatcagtctctcagccacgtgggacggcggcgaacggcggcggcggcgggcgtcgcgccatcgacgctagagtttcgactcggctctttcatcgaattatcgagtcgaatcgacttctcaattcttttacttaaacaggcttgtcacgaatcctgcgatacgacacgatagcgatgtcgggtaagctctccgcctccgcactggtcggatgttccgcctctgacaggtgcaaactatagggcagtgcgccgtagcgtcggcattcctaatcaggcgaacctaagccgcgggctctcgttaagattccttatgcgggaaaaaacgtcggacgtttgtccggttgcccagctgcaggctgctgcgttgcaaatcgtccaggctctagccagctgatcctgaccgaagccaaaagacctgatgctgacgaaggttagcatcaagtcttagaagtcgccaagtcggaattcggctcagacgtcgactgctgtaattgtaggtctattgaagccatcccgacagctatctccagagttatctctagagctatattccagagcatatcttggccgagcttgcaccacatagctctaggagctagtcatgaatccgccagttatataggaatccggaaataatgcagattcgctatctgctccgtgcttgagcgtggtgctatagtggctcctcgtgtgccttgattgtcagcttagctcgcgatggcgctcatggtcagtcttacgtagtagtgccggcagctgccaccatcagtggcaggctccagccagctgagtcctgccagctgagcatgtgttggcgccttcccataacacggtccacagtgggaaagtccgccggtaatcgctcgtgtcccactatcgatccctttagtaatggttgtttcg

SEQ ID NO: 9447 - DNA, 1066 bp, Emericella nidulans
cccagccatctttttttcgagcggctgcattctaccattcaagccggcgctaccgagtcgaaaattgtcgccatcaggatacgaccggtaaccgcggaagcgcattcaacaatatcaggatggcctgacatcagctcagctgttgaaggcggcctcggcctcagctcggaaatcggacatccacaaggcccaagctcccgtgaaaaaaactccgagatgctcaggttgtcaactggccaactccattctttactgggagttattattattgggcgatttcgtgacagtgagcagtcagcactagaatgggaaatatgctgttgagaggctacagggctttggatgattaattgggcgcacgagaccaccaaaagagggaagtgtgataatacgccggggcagtcgtcagtacggtgttaattaccgctatgtgacataattacggcatgatacccacgatggaacgcggtaaaccgcggatcaagatcttgatgcatttgaacctggtcaaagtcatctgccatgcgagaagtattactatcgaccaggcatgactctggtctgatccccgttgccagagcatgcgagcatctgatcttgcactgcgaagatgcgggtttccgactcgacctgtattcgtgtcagtcggcggcgctattcgctagggtttcaggattgattaaagggacaatgcaaagatattatttaagcgttatctcatcgcccccctcgcatccgtattcagactgagtgcgacatatgcaattcttaactttgtacagagcgcaatacagtcagactgcgcatcggcccctgtttggctctcgtattcgttcaacagctgagtagtccaaacactgttggcgcaaaccccagaggctatgcagtgagtttgggcatgaaatcattgctgcataccactgaaaggggtaagagcagtcatcgtagaaggcgttgcgaataggcctcccttctctatggtcgtgccgtaagtataccaagcacagcctcaccaaggctagtccttgcgataatcagcgaggcttgaccattccttcatcatttt

SEQ ID NO: 9448 - DNA, 127 bp, Emericella nidulans
gtaagtaaataatctacgtatattggcacagataccgttcgaccttaccagcgttgaatattatataacctgcttcgaaattgaccagcaggtgatctcacttcgtgttcgaaccgtggtaatggcg

SEQ ID NO: 9449 - DNA, 147 bp, Emericella nidulans
  unsure (1)..(147): unsure at all n locations
tcagacgaagctcaatgcgatgcagcacgctagcgcacagatccggactgaccgcggcttcaactgcaatgaccaggtcctagtggcaacagctatggagtgatcacggccccacgtgacgtcggtactcntagcctgtaggagacc

SEQ ID NO: 9450 - DNA, 938 bp, Emericella nidulans
agggaatggcagaaggagtggaatgggaaagtctttaacagtatggaggtatgttctgcttctttaatatgctgattcttatactgactgttagtatagccagagacatgccatgtggtttttgtcaagtctgtcgagatccaaggtgtcgatccggacgcacaaggttcaaacccaccaggacagcaagcttccttacctacgacttccgtacagcgacccggtgtgtcttcgacgtcgccccagcccagcactctagctgcagcgccgctctcgacaaaacctcttgcccctcccacgccatcgttgatcgagctacccacatgccccgtttgcttggaacgaatggacgaaaccacaggtctcctcaccattatatgccaacatgtcttccactgcacctgtctccaaaagtggaagggcagtggctgccctgtatgtcgctacacacaagacgactttcgcaagacgagccaaggctttccgttcgacgacggaaacgttgaatgcagcgtctgccactccgacgtcaacctctgggtctgccttatctgcggcaatgtcggctgcggccggtatgacggcgcccatgcctttgcgcattacagccagacttctcacgccttcgccatggacctctcaacccagcgcgtctgggactacattggagatgcatacgtgcaccgtattatccagagtaaaacggacggcaagctcgtcgagctccccgcagcggacaacagcgcgctcgacccacccgattggaccgatgccgtgccacgcgagaagttagaaaacatgagcgttgagtacacccacctactcaccagccagctagaaagccaacgcgcctatttcgaaggcatactcgagcgcgccgtcgataaagcctcccaggccagtaccgccgcctacttctgctcaagaagccgccgata

SEQ ID NO: 9451 - DNA, 1071 bp, Emericella nidulans
ttatgcacagactgaaggcgctgcgcaagatgtatactttgagctcctgcatctgcaacctatgcagctcgatatctctctgatgcgcactgaacgagtgaacgtagaggatactttgcagccttccaatcccttgatgtttattgtcgatgtgatgacaatgtcaatgggcaatgtcaatgatgcgcctattaagctgaacgccctaatgatagagaatgcccgcgtctctttccctgtcctcgccagcaacatccgaagacactatacccaggaatttcttcgtcagattcacgttgtactcggctcagcggactttttgggcaatccagttggcttgttcaataacgtcagctctggcgtggctgcgatcttctatgaaccataccagggccttgtcatgacggatcggcctcaggagctaggctatggtatcgctaaaggctttggcagcttcgcgaagaatactgtttttggtttctcggacagcatctcaaagctgacgggtagcatgtctaaaggtctggcagctgcaacacttgacaaggaattccaggaccagcgacggatgtcaaagacccgcaaccggccgaagcatgcgttgtatggtatcacggctggaggtagagcctttggaaacagcatcgtcagtggtatcgagggcattgcgcggcatccactccatggcgcggagaaagaaggtatccaaggattcttcaagggcgtagggaaaggtttcctcggcttggcaaccaaaccagctatcggcgcctttgatctcgcttccagtgggtctatcttattgttattgttaaagggggaacatattactgactatcttttagatcttgctgaaggtgtaaaaaacaccacaacggtgttcgatgccgaagtctcgaccgcgtccggcttactcgctttgttggcatggacggcattgttcgaccatactctcagcgggaggccctcggcgagttctggcttaagacagctgatgacggaaagtacttcaacgaggattacattgccaccttgagcttccagggcgcgacatgcttattatgttgacat

SEQ ID NO: 9452 - DNA, 1343 bp, Emericella nidulans
caattgttagataaagaggtcgttttcaccgcccaaacagatcataggtgcacacgactgaatcgacgactggctcaatcaaaacaaaacgacacttctaacaatgcgtctctaggagcggcagtcgctcaacttcgatgatgacttgagaacaagcccagacgacccaaaggccagaagtgggcatgcctgcaggctctttcataaccttctcctgcgggtccgtcccgacgaatcgtggcatcatcaaggcaatcgatgtccttctgaaggcttgaccatacacgctaaactgccgagataacgctaataaagccgcggcagagaacaaaaccccttatagagcagcttgagaagatggagtcgaattatgagaatgcaaagagtgcttcagagcagtatcagactcaactgactcaagctcgcgaagaggttgaacaagaacagtcgaaggtaaaagctattgaatctgagctgaacgatgaacgagctagtttactagagctggagtctaaactcgctgcaggcgagacaggcgcaggcgccctacgagaacatgttgcagaggaagaacagaagctaaataacatgtcccagcaactcgccgaaaccgaggctcgggctcgacgatcagaagaagaagccttgcagtggagaaagcgggctgaggctttgtctgagtctgataaacaggttgcagccaggattgatattcgcacggcaagacttgaggaactctcgagacagctgtttggacaagtggaaaagctggagcgcatgttggagcagctaggctttactgtcattcgccaagatggagagatagtagttcaacgatcctccaaagtcaatgccctctctgctactgcagacactttgagtcaatctggtgtggtttctgtgaagccggatcccagccttcttaattggatgcaaggcgaacaccctgaagaagagacggagagattcaacgccttcctggagtcattgcaccagtttagcgtggacatcttcggcgacgcggtagtgaagcgcgtaaaagacatcgaggttctcgctcgaaaatggcagaaggaagcccgaggctaccgagacaaataccaccgtatgcaaagcgaagcgcacgacaagatcgcttacaggtcattcaaagaaggcgatctcgcgctcttcctgccaacccggaaccaagccatccgctcatgggccgctttcaatgtcggtgcaccgccctacttccttcgcgaacaggacgtccacaaactccaagccagagactggctccttgcacgaatcaccaagatcgaagagagagttgtcgatccactttagtgagggttaat

SEQ ID NO: 9453 - DNA, 935 bp, Emericella nidulans
tccataatggtcattgtattctgtgttaaacctctgccctgttgattactttccggcaaatcctgtcgcatggccggtcaggagcgcgctgtcatcatcccatgagagctctatagctgctcaaacctacatacttcttcctattcaaccttgcaattgatcactcagacgtctaatcgctcaccatgccagtaacggactgggctgatatctgcgtgcactgcgctgagcttctcaccagcgtgcctctctcgatcatcattgccgcgatttgcgctactgtggctggcgtgtttgtttctgtacgtactttccagcgaattacttcgcccttactaatttcagcagttctacgctttcctaaccctagttgccccgaccccccgagaacccctccccgaagaaacaacctaccgcactatctcgaaagatggatcgatcacagaaccgcagtctctaccatcgtggcaacgtccaggctccaacaaggccgaccctggagaggctgagctgttcatgtctcttgtcgttccggcctataacgaggaggaccgactgggaggtatgctggaggaagctgtgaactacttggagcgaatgtatggaaccttggcgagcagtcgcagcgaagggaaacccctgcggcaacggaagaccgccaacggacacgcaaacggaattgcgaatagcaacacagagactacaccgcacaggaaaggctgggagatcataatcgtatcggacggatcgacggataacacggaagagatggcgttttccttcgcgcgagaccaccaactctcgttacatccaaagggccacgcaggcccttggacgcctgaacctcgagagggcgtgcacatcccgcccggaacaatccgcgttgtagccctggccaagaacaacggcaagggcggcggtcacgcacggaatga

SEQ ID NO: 9454 - DNA, 116 bp, Emericella nidulans
caaaacttacctttcgtccgagtgcaggtggtcacagtgcagtaagatatcaagacttaatggatgactacagcgtgagatgtttgtaaaacgaataaccgtagtgctaagccgcg

SEQ ID NO: 9455 - DNA, 1294 bp, Emericella nidulans
ctaaaggacaattgtacttttctcttaggttttgtatcaggtttttgtatctttctcgaatattgggaatatccctcgtggtcaacagcgtcattgatgccaggagacactgcacagtttcggcataaagtaagctggcttggccccgatctaggtcgttaggtattgcatcctcaggataaaagtcaggcaagtttgatctgctttgcgctcgatgccggctttgttggaccagaaagtctgccagctgtccgtatatcggctcgtgatcttcatatgcctcaaaattaaacaccgggtatcttagtaaataggccatctcgtcgtttctgagcaccggctcgtccccttggagtcgagtgttgatgtccttgaaaaagtgttccggacagttgttcgatgggtccaacggctgctggtatgcccgggagagcacagcacccatcaggaaagattgatacattgaacggtggaatctctcctgccacttgagccagttttcctgaggaggtgctgctttgttctcctgtttcaggtggaagtagcagtctcggccccattcagtgttgtagaggcaaaagtcctcaatgcaccttatcagatgcaccaagttgagaatttgccggagctcctcaaaggatacttcgtgagagtccgcgcttagtgaatcgagttggaaaggatttggtggaagctgtcccttatggaagtgatccaccacaacctttgttgcacgaacctgagacatcttaaccacttgctccgatgaacaattaagggtagaaaatcttactgccatcaacgcatcgccgaaagccgggatatcccgaggccctacttggcacaatatagagtacatgttggaggagtataaggaatgaaggcgcttgcatgttgatgcgagtgctattgcttgagataaactattgcaacattgaagggtgagaagaagagtctctggcggcagagaaaggaaggtaaccatggtgaaggagagagatggcgttggattaaggcaagctgatctcgggcgggggatgagaggcttatatcctagaaggaagggttagtcagtcatgtggagaccgatcagcatctcgctctctatatataaaagagataaaaatttatagtgaagtcaagactatcgaatggagatgagttctagccattgaccaaaagtattacactcaaaataacctaaaatctagtaccactttatatactggactaggtagggtcctaagtgtattaagttagccttccttgttagtggtaatgacttatatacgtt

SEQ ID NO: 9456 - DNA, 1106 bp, Emericella nidulans
cttccccagcttcccgggcttccctggtggtgcctctccctctggcttccccggccttggcggcgatgccccctctccttctggcatccccagcttcggcggtgacctccctccgcttctggcttccccggctttggcggcgagtctggcgagtcgggtgaggcccctgctcctacgggcacctcgaccatcaacgttaagcgccagtttggcagcctcggcggtgactctgctttaccctccggaattcccactctcggtggctccagcgacagctccagcagcggcggctggtttgacttcctgagcggcctcttcggcggcggctccgactcgagctccggctccggctctgactctggctttggcagcctccccagcggcatgcccagcggctttcccacccccactggcggctcgcctttccccagcggtttccctgagcccagccagggcgctcccggccccagcggcttccccagtggtgctccttcgcccagcggctcccccttcaaggcgtaagccttagaggttacaagacaattacgcaataattgcacgatgagtacaacactgccggtcggttgttggtatggtatatcgggatggatttgtgatattaggtgtggatagtgattgagatggtcatgtcagtcaacagcttggtgttaggttgggaaccgatgtatctagcatcaatacatggccatggcccacaactttctcttcgtaactcatcagtggtgttagtagacagtgatagggcagtcctagcccacgcattacagatatctcgaggtaatcttccaagaggaagcgcctgcttgcataggctcgtctgtggggctacaaccactaaaacccatctagggtacttagccctacattgactcgtgttaaagactccgaggttccccgcaaagacccgcctccacatttaaccccggattcgaccttgtgcttggccactggccggatgctgcatggttaactgtgaggggttgcaatatatgacagactgtcccacaaagcgccccgcaagtggcgttcccaggtctacaagagagtatatatcacgtacctctcggttacattcattcccctgc

SEQ ID NO: 9457 - DNA, 1646 bp, Emericella nidulans
cctcgggtattcgccaccggcattgtgatcggcctttgtgtgggaatgctactgccagcgggtctggtgctttttggatgtgggaggtttcagtctggcatgccggttgcagggagctgcagcatggctattgctgcggcgtgtcaccccaggggtcagacggatgaagatagagcgaacctggagtatcagcggctgaagtggggagtcgaggcgtatcagaacggagagatgtggcattgtgcgttctcgaataggaaagttatgaagcctgaggatggaatggaataccagtgagctacaaacttctctttcgttcatccctgctcaacacatcctgcgttcaatgcgataagcgccctgcctgcgtggggaggatccgtgtgtgccgacaacacacatgccaggctgctcgtcacagaagaattggccagtgtgctctggtctgacgcaaccttgcagccctaaagttggttcgagtctcgtcgtctcgcagtctgggacttggttagagcagggtagcatcggccagagtcagggtgaaccttatgtctgacattcatcgattttcttcatggcaggtctgccgccagaaaattccggtatgtcagaacagtcgtgtaggcataccccgggcgctattgaggatgtggttgtcagtcattggactgtctggtccatgtgaccactaggctaggtactgacgcacatgtcatgatcaatggatatcacccgcttcaccctcttattcacgtgcttccaatagagagatagagtaaaaggcttatttcacagattgggatttccactgcagtgtgacgatccattctggacgggccgggacgtcagactctggttgataaaaaagaccttcagtcagaacagattcataaggaagattattatgattttaccccctttgccctgctctcctccaataacagttgaatgtcaaattctcaaattccttttctctcagctgggatttcagctgcagaaaccgttgccggtctaatcggtccacgcttgaccgacagaccgggcaccggaacgcctatgctgcaactccttactgaaaccctgtaagctgcgcgttctgttggcaagctgggaatatattgtggtgccgtgatgcggctatcagtataaagctggcccagcctaacccggcactctcaaaacatggagaacatcacattcttccttctcaccccatccctcagccatcctggtcttgcttcatccaccacaccttaacataaccatgtcgaaggcttcaaagaaacccagaaagtcgggggcgtccagggatgaaaccgaggcgttagctgattacctcgcgagacttgctccgttcgtcgatgacggcgagaacccaaccgctactaggaccgccagacgtgcactccggcattatacagttgagcggcagaacttcttgttctccctgggcctcgactcaaacatgagctttccgcaagcactgaatcgcgcggtgaatatcgtccatcagctggacgatgacctgtatgaagccagaaaggagatcgaggagttagcccaaaatgtgagcgagttggtgaagaagaacgacgaactgcatactacgaattccgtcctagaggatgcccatgatacccttgcct

SEQ ID NO: 9458 - DNA, 228 bp, Emericella nidulans
gcgactcgccagtccgccaacgcattagggactagtcacacccatcgcatttggagggaggaccaagtggaataatagacctggagggcaggcactctcagagagaagctggggagcgaagtggtcgtgggccttgacctcgtaggggctcccgacagtctcggtctctctatttacaatccggtcagcttgtcttgacaggctatatggagcggggctggtggtttg

SEQ ID NO: 9459 - DNA, 1961 bp, Emericella nidulans
gttgcgaacgagattaatgagatggattgcaggtagggtagattgaattcgctgctgtagcagatatgtatttgaacttcaactggtaaagtagtactcagcttagctgcgcaacgaccacaaccatgtaacaattcacttgactgggcttcgctcctgagagcccaggtccagaaggggggacgttaacctagaagggttaaccgatccctcgcaagattattttagtggctgatttgagctatgtacaacaaaatctatggggtatcgcgccttgtatcctcagaaaacgatcctatctcttgcttgaagctctacgcgagcaagcagtcgtcatgaaagatccaccagcacggactctcgtccctcaatttgtccatcttcgctttgaatgctactattgtgctacgcaacacagctagacgctacgagctaccaccaagacctgctcgtggcctctcaagagttatccagcttacttatctagagtatgggaccataatgttgtttgtattgatctcccgaaaactggtcatggagctagggtcttgtcctagggccgcacagtttcgcatcactccggcagagttgattgagattcaggttgttgcagcttgagggctgccctgccacccagaacgtggcgttgggcgtgtccagcgtaagctggtcaaccgcctgcatggctgatcagttgagcttccgagcgccgtgtcaaatgctggtcagatctcctcatcttttcacgggcccatgtacggatcacttcctctctgatattgccctgactccacggccctatgattttcttggcttggcggggttatgacatgtgcttgtaatcccggtttgagtacgtggtgcgatggtagattccgcaatttccatggcatagatggcatttaacaagtctgatagatggtggagaaatttcccaggtcaatcaatagccagaaagttgcggcttcccgcggaaagagctttgaacagtgtcagctagcttgggaaacgttggtaaagacacctgcatctctgataaatcaagcaggaatgtgtttgcagccctgcattgggtggtggtggttatgttctcatgatagaatagcactcgtggactgcaatcatcttgcatagtaatttgacttgtgttctgacttcattattcaactggagtacacggagattccctttcaatggggaattaggcattgccgacgctagtaaggcctcaccaacagtcgaggcatcaagccctaactcctggtgatcattgttgtcactcatgccgccccatgcctgtgtatgagaagctgtgtgaatatccagtgatgaaacgtcaaactatcaattttctatgagcgttgtgtgcaaagaaattatgcagatatggctacccaaagcgcgctgtttctggccgacctctgtgtgcagtctgtggaccagtctctagaaaatgactgtatcaaaaggctccctgacctcaagcatcggtggtgaagctgttcttatcattcgtcccttctccattattgtcaagtatagagttgaatcaattgtagatctaagaaatagagccctaatggtttgatgggacttcatgatagacggtaactcatgccatgcctcgagctatcaagtattcatggccctttgtctaggactggcagtccgccaattatagatagcagagtcatcgtcgccttgctggaattgttccttctattatatcactccttagaccactttcatccactgacttggggtatcccggcactcctgcgtagatatcaacagtatgtcgtaaatatcaccggagaagatctaatgggtcgtgcccgtacgcgttagtatacgcagatcgcacgactgtgcctctgaatagtctgccgtacctacactaaatcagtacctatatagaaattgtactatttaacgtccctcggcggccgtccaaaacttgc

SEQ ID NO: 9460 - DNA, 1134 bp, Emericella nidulans
ttgctgactcagatcatagatgttgcaccgatcgtcatgcagagccctctttgcgtccatatacacagaatcgtcacatcgtcacagctcagtgcactttagggcgtatctagtggagatagactcggcaccgctgtttgttagggtggagaggcttgacaaaagtacgcttctaccatggcgaagctgcagatacctggccgatcgtacagccacaacaccccagtatcatatgcatagtgcttgcagctcatttcgacatgaggggtaaatctctgtgagaccattggtgcatctcagcagcctgttccaagattgagaacaaagttgaaggctaatgcgtcggtcaatcccgaaatcagatcaacgggtgtgatcagagatctggcaccccgactctaagggaaaaaataaagagcatacccactcggactaatgccgagtgtgtagacatcctctctgggaagcgctgccgggaccacctatgacatcccatgtcggcgtgagggatacccacggtgtccttcctgttcttctaccgtctgaactatttcgacttgaagggtccaatcatggattgtggctctaagtgtcgaaacaaatcccaaaatctcacaggtagattaattcgaacagatttctatgatttgcactatgaactactaacattgggcactcacctgggggatgaatatagtaaaacactcaaggacacgcgagatcaggaaagcagagcgaggcgaggtcactgcctaccgcaacgagaattcaatgattttgttttctttttagtaagataccacgaaaggctccgagactccgggtggcccgccccttcgggcgtctgcacggtctagttcatgcagtcagacaggtacaccgccacttccgagtgagacttggtggagcactgactctttggagtggctggtgagggttcaaagtatgtatccaccgtccgtgttggttctggtcagaaacatagacgactagcctgattattgctgcctgatcttgaacctggaatctccatgaatcactcccggcctggccggtggctgtagattacagatggcgttgatctactcttgtgcattgccgtacgtcgacattttcagctcgtgatgacctaaa

SEQ ID NO: 9461 - DNA, 285 bp, Emericella nidulans
gtttttttttatgaaggacggagatagcccaaaaacccggaagtgtccagacaagtctcgggtgcaacagaacgagcagatctatggcacgaagcgaaaagttgcggactacggcaagaactgagatatagcgtagagtataacatataggagcatttcagagctgaagcaggggaggacgagccaggagattacaccccatggaaagactagcacacagggcataaacgaacagttgaaggttcatgagaatctgaattaccggaccgaagagccaaccagtag

SEQ ID NO: 9462 - DNA, 1471 bp, Emericella nidulans
agacataaatgggctagggtaggcccgaggtgccagagctgtggaggatcaagacattacgatcagactcgtcgatatagtggtatgggtggcagatagaatcattgtctggcagaccctcattggtggagaggaaggcttcgaatggaagaggagagaagactgctgcaggcagagtctctgctgcctctcttgcagtggcctcgaggcgtccggagacaatgatggctgctgcagaggtgcgttgaaggagactgttgatagcaggggcgctaagcctggcagagagcaatagcaccggtactcccagtccgatcagagctatctcgtatatgaagagccctatgtcactctccatcaagagggcaaccggggcacccttctccaccgatccatgcaacagtgacgggagttggagcttgagattgctcttcagccaaccaacacattgtgaaatggcctgtttgagctgacgattcgtaacggaaactagcgagaggatcgatttgttgggactcttcttcgcctgtagacagaagacatgatcagggtttgcctgcgcattgaactcgacgacttctggtagagtccggataagctccgtctcattcacggcaggatataaccggattgccggacgcttgaacggccgcagttgctggtttcgagccatggctgagctggaggaagactaccagggctggaggctcgcttatcaagtttaactgggtgaagctattcctggagacccgagtacggacctcgatacgccacgttcagcttgcgtctagcagggatgaaggcactagaacaccgaaaaagcgtcagatctcacgcgatctgacactagaagcaaaattagaaaccacgaggtagcggactgccgatgaactgctgtcatacaatgccatgcatgatcggggattaatgccaggcacgctggatcttggccttgagtttctggattgcattaacatcacgtcctgcaactttagatgaaaagatgatgaatctgagtggcctaatatacagcttatggctgagatggcgctctgctttcttcattcgctcgcgctcttactctactccttcagggcacactacagcttcatcatctcggcaggcgcagcctaagcccagtcatgctgatctctatacgagaatcaaagccacatcctctgttttgggctattttagccccagttgcggcggacatttgtgtcactcgggtccttctctcgcccttataaccaggaaacctctttgggtgaaagcaaattcttcatcgcaacaaaagaacgcgagactatggcgctgagatacctaaacaagttctcccttctatcactagcggtacctactctggctgccccgattggttcctccgttggcggtcctggaacggatgccctgtatgactatgtcgtggtaggtgccggcaatgcaggtgcccctgttgcataccggctcg

SEQ ID NO: 9463 - DNA, 452 bp, Emericella nidulans
  unsure (1)..(452): unsure at all n locations
ttgcctaatctcacgctcgctttttatagaagccagtcgttccgggtattcatgggtggtatagtatatctttgctgcgcgaatcgcaagcgtgacaacatctaataagcgcataccgttgatttcatcccagctctgaagagctgcagccagattcgcctggtgttgcgaatctccatttggttccgtatcgccatctggcgagacatcgattcgtggtggaagcgtctccggtgaatgctgctgctgagacaccgcatcaatctctctctgtgctttatatagtcgcgtcaaagggtcctccgtagctgcagcagatcccgaggcggcnggatatggtgcgtcttaatgctataggtactgacagtccggggcagcatcacttcgtcttcgtcctcgacaacgtcaaacgcatcttctcctggatccgtattcatatcctnncgtgggct

SEQ ID NO: 9464 - DNA, 115 bp, Emericella nidulans
tacaggtgggacacggggcgtgtagaagaagacgacttcaccgtgctgagcggcttgatcgagtagcctattcatctgtagaggtctcagtgtgttatcaatgcagggatcacgc

SEQ ID NO: 9465 - DNA, 287 bp, Emericella nidulans
gcggggaaagacacccagctgaagcgagctctagggagggtcaatggatcgcttgacgtgggcaagggcgtaggtgtgtcctgtgtgaaacagcatatcgacaacatggccagacactagactagccgctagcggaaactgtaaaggctgagatgcccaaagagcgagctacagcacaagaaatgcgatgtgctcactggccacatcgcagtcggtaaacctccgagcgctaactgcagtaaggaaggcaacatcacgcgtacagagcatagtgacggatggtactc

SEQ ID NO: 9466 - DNA, 1040 bp, Emericella nidulans
gttggatctccgggtgtcatcgcagagcctgacgacttacccccagattttggagcacttgacccaatcaaggagctcaaggtttccacttacccaggctaccacctgccacatatttggctctcgaagaacggccagagtgagcgagagtctaccctggacctcgcaggacatggtcgttttgcattgttcactggagttggaggagactgctggatatctgctgccaaagctttgactgcttctgcttggggtgtcgaggttgttggctacaaggttggatttggtggagattacatggattgctatcgagaatgggcccaggttcgtggtgtcgatgaggatggtgttgtgttagtgcgccctgatcatttcattgcctggcgatatcctcgtcgtagtgacgatgccgaggcccggcttcgttgtgttctggagaaaatactaggcttctaatatctcacgaattgcaagcagcacaccgttcctttttctgaagaacgaagaccaacagcttctattcgtagctttacttcaggcctctgggttcgcggcttgttatctaaaacgttgaaatatcttagctcaaattcaagctagttcccaagctattacgttcaggattcgagtttacgggattattgcgaatacaatttccgccactcaggcggaggtaggttcgccgggtgctgagtcctctcgggtgagttgggtccggctcactcagcttacgataactccgaaatagttattttgacttcaagattattcagccgcagagccacgttacccggagattgtggttaaccgtggtcggctggggttgcggggaaggcggggaaggactaggtgttgcgaatatgttgttgagcccccggcgacttgtgaccgtctatttaaacgcgccactgaagcgctcctagtcgaaatgactttgctctaacataattctttctcgtcaagtaacatatcctacttcaatcatggctaaaaccgctctcatcacgggcgccaatggcatcactggttctgcgagtctc

SEQ ID NO: 9467 - DNA, 574 bp, Emericella nidulans
cgtgcttccttgtctttcagcgtccaggtatcaggtttaaaaggccacgcatatccatgtggctctctctcccatggagccttgaccatctcgtcgtcctccccttttaccatgccccactcggcgacggcacgttccgtaagatcagtgatcgcttccgtcagcttgaaaagctccctgggagcggagaccggcacttctggtttcctttcatgactttctgttggatgagcggccagactgcgcgcgccagtctcgggaagcatagtgagctcctccaagctacgtccaaaagccgtaggaagccaattcccgtaggtagagataaaatgatctctaccatcctttacccgaaggaccaggatttcttcgagcttcaattgtccattgttaagtgagcggacgaaccggatatctcgcacccagattgtgacttcaaccatggctagctccccaggcaagagcgtacattcgtttgatggcgctgaatgatttgagtcttcagattcatcatgatgaggtttctcaaccctgtactctagccacgacgttacctcttgatcagcatcacgct

SEQ ID NO: 9468 - DNA, 2540 bp, Emericella nidulans
tccgacaatagactggaacagggggtgggttcggtgactgatggggactcccacagcgatatctacctggtgtgtatatgtcgaaagcatcaggcagtaaacagcgagaagcactgcgtacagagttactccgtggtcttttgcaatgcccctgagggtttccagaaccacaccgtccagaatgacggagaggtcacctccatcgtagttgaattgggcaggccgcggataatccggtaggagctgtaggggctccaggccgtctagtctttgcagccaaaagtcggataatttttgaatctgattcttacctagtcgtcgacgatggtgctcggcatactccttgtactggacttgaggcattggtaggattggcatgttgccgcctttttcgtttgacgcgcaaaaaacgcggagctcccgctcgaagatcttcaatgaccatgcatcgaagcaagtgtgatggaaggacagggtcagataaagattgcccgttttgtgcgtgacaatttgcgccaaccagggaagctcagaatcgagacggaaaatgtgctgcgataggcgtccgactatggaatcaatttgatcaatggtgctcactgcacttttctcaatgatcaacatgcacttggcctcatcggtagtcaatatcttttggtagaacgtgccagttgcctggtcccgcagcagaaatgttcgtaaggcttcgtgtcttgaaagaatggtatataatgcctcttcgactcgagattgatcaatgtatggaggtagctcaaaggcagcatcgatattatatgcattgcctccaccttcaagctcgtgaatgaatagaaggcgctcttgagcgggagatacggctattttgcgtctgttatcataatccacaggcgtgatctcctgtatgtctccaacattgttcataattaggtgtgccagactctcgatggttcggtgacggaacagagcgctgacggagattgtgcggccaaatacctcgtgaatcttgaatgagagctttgtactcttcaaactatcgcctccgagggtgaaaaaatcgctgtcgctgccaattgtttgggcggatatatctaacaaccctgcccagataccgcacaggatgctctcgatttcattacgtggagccagcacgttcattgcgcctttctcctctgctgtaggtaaggcctttgtatccagctttccactgggagtcactgggagagaactgataggaatgaaacttgaaggtatcatatagccaggaagccgggattgcataaagcgccggattgcacccggagacaatggcgagctagccacgaagtaaccaacaaggaacttctggtctccttccttgccactctttgcaattacaacagactgtttaatgtcaggatgtgaggacatgacagcctcaatctcccccaattcgatacggagcccgcgaatcttgacctggaagtcattgcgtcccaaatattcaatttcgcggttactgcctgggatccagcgtaccaagtcaccggtcctgtacaagcggctgttgcgcccattttgccgttcactgtctgtttggaacggattgcgtaatcttcgctcagcagtcacttccggtcggttatgatatcctcgcgcgacgccttcaccacccagatagagctcacctacagccccaattggaacgcgtttcatgtctgcattcagcacgtagctcgtactgttgccaatctgctggccgatgctcttatctgtgcgccgctcagggaaagggtacagccgcttgtgtgtcgtgatggagatctctgttggaccgtagccgttgataatcagcccttggaaagtgtcacggatttgatcaaagacgggctggctaaaagcttctccaacgcagtcgacacggcgtaggtggtctttaaatcgactgaactcatacatggaaataacggatggggttccagacaggtatgttaccctattagtttcgatatattggtagaggcgctctttgtcactgcgcattgcatcgttgagcataactaatgtttggccgttgagaatggcatccgtcatctgttccacgaaatggtcaaagacgtagttggagaatgagaggattacctcgtcatcagtatcgcgcagcccgaaggttttagacagcgatatctgcagatttaccactccgtggtgctccaccatgacgccctttggcttcccagttgttcccgaagtgtagataatatatgcaagatccgtgctcgtactggacggtgcaggattcgacacactccagttaccgtcagtctgagtagagatgtcagaccgatacagacggacactctctcccgctaattcttggattcgtgagaggtaacacgcgtctgaaatcacggcaatggcgctggtgtcttctaggatatagcggatacggtcgtcggggtactcagggtcgatcggtacataggcaccgccagtcttccacacagccagaatggtagctatcatatgctcactcttatccactaccagagcaatgatgctgc

SEQ ID NO: 9469 - DNA, 188 bp, Emericella nidulans
  unsure (1)..(188): unsure at all n locations
gtgcaggcacccatgcacgtgatcacgtcaacacggcgcaagggccatncagagagatgcaccacagagacgagacgccagcagaggatacacaatggacgacatgatntccgtaacgagtagacagaggcaatgacgctcagagacagtggcatgtaggctgcgcgcagaggaaccggtgcncagga

SEQ ID NO: 9470 - DNA, 115 bp, Emericella nidulans
ggagcgtcttctgccacaacgaccggctctacgccgacattgctcccggtctcatcgctgtataccgtccagcctgtccagctcttgatacagtagctcgttgccgttcgacaac

SEQ ID NO: 9471 - DNA, 125 bp, Emericella nidulans
  unsure (1)..(125): unsure at all n locations
agtggccgtactctcgcgaanctcagtcaatggctcgnaggccagtcnaaggtcgtcgatcataagtatgatgccgacgtccgcggaggcattgctcacagcaactcggtgtgccagagacggag

SEQ ID NO: 9472 - DNA, 1068 bp, Emericella nidulans
catcgaatttgaggccgcgctcagcaagctgggaggcaggtccgataaagcgttcgttacgggagagcttgcgcagtggggcccgacccacacgctcaacgccgtcctcgaggtaggggttggagatacggctgatgatcttatcgacatactccttctgttcttgttcagagatgccgtgcttgttaatgatcagggaagcagtctcgtctaggaccttgtggacattttcacggatcttcgggtcgtggagagcatcggcaatagtcttcttaccagcaaggtggccatagtaggcagtcgtggcgtgtccggtgttgacggtgaacagcttgcgttcaatgtaggggtcgagcttatccacccagtggatggcggagacgttggggtgcgcgacgcccttctccttgaagggagtttgctcaacaacccattcccagtatttctcgatccggacgttgagaccgttgttcggaggctggttagggacaatacggtcgatggcgcagttggcaaaaacggcacgctcgctgattatctctggcttggtcttcttctcaatatggccgcggagggtatcggtagcgttgatagcgttctcgcaagcgatgacagtgagtggggtggaaacattgcgagattcgagacccttggcgatgacgggagcaatgaactggaggacccgcggtccaacagcgcacgtcacaatatcggcagtcgcgatttcttggaccacgtcggcttcatgagacttggagttgagtgcgcggtagttagtaatcttctttgtcttctcgccgtcttcgctgatctcggtgatctcgtatgagggagtgttctgaattgaagtgatcaggtcgtcgacaacatcgacgaagacgacttcgtagccagcctcatggaggaactctccaacgaagccacggccgatattcccgccaccgaagtgaatagccttgcccattgtgagaggatgtgttatgcaagggttaagaagtgctcaagtgacctagcgtagatagagtaggtataggtgaggtagtagagagaaagaggatggtatgtgtc

SEQ ID NO: 9473 - DNA, 1104 bp, Emericella nidulans
ccacgccgaatgcgtctactgactcttatctgacatctaaggctcaggcaacgaccagttgaaggatcactatgagcaagagaagcaggctcagattaagaggcagaaagagggacaggggaagtggaaccagaaccttgctagtagcagcgaacgctcggtgcgtatacctttatttttaccatcgccctccgtccttggtcatgaatcaggagtcgtacgtcgagtggagtttaacttgctaacgaatgtaacaggtcaaagctgaccggggagaggtcgacaataaggatagcttcgttgacctccaagataagacgaagaacgagcctaatcagaaggcgtaaaatggctgggcctggtgcttagcattagagatttcttattattctggtttcactcttgtaccgtgcactatatggctaggagagactttccagtctttctaacatagcaatgaacttaatccaaggtacatccgaatatactttgtaaccgaacatacttaagtagaaccataggactgctcaaagatacgcttagcagaattgtaaaactaaagacggatatatataaagcgaatgccgcaaagttggtacctcaacgccgtcccaccgtccaaagagtgttagcgtgactctaacccaagatatgaaagaaactacgccaccgcgccggctagatagaataactgaatatgacaagagggtgtagcagttgtaagacgactcattttaacaggacgatcaagataacaaggatgataatcaatccgatgatcgtcatcatgctccaattctctccagcactcctgcggatcttgtcgatgcgccgacgggcgttatccaatctgctctgatgccggtcaacagtgccatccatctcgtccagcagcgccacatggccgtcgagctcgtctccaatttgaatactcagctgatgctgtctcccgatcgactcgcccaatcgatcgagctgctcgtcctgctcccgcattacccgctcatgatggtcgtaaatatgttgattcgacatatcagacgtatccacgccttcggggcgacggtgagtctcggtacggctggaacagggtgcgacggttga

SEQ ID NO: 9474 - DNA, 239 bp, Emericella nidulans
  unsure (1)..(239): unsure at all n locations
aggtaaccgacgagttaacattatcgagggtggcncagaccgctcangtgaatccgtgtattcctgtacgtcatggatagagcccgcnaagttctaatcctgggcagnttagncagcgagaaataccccgatagctngttagaacgctctagtatgcatgctaacganctgagggggagaggccctgcgtcgcatnatcgaaaggcgctccggaggccaggagggcagcgcgcagtgga

SEQ ID NO: 9475 - DNA, 175 bp, Emericella nidulans
  unsure (1)..(175): unsure at all n locations
agcaagcctcctcgacggtgtcanngctctctgtccaacgcgtaataggcaagctgattaacgagacaggttgacaccgtncaataaggtgatcatgtcaccggtaaataaccgtctgagctncgtaaacatgtccagcgaactacataatcccgaccgtgatttccaggccggc

SEQ ID NO: 9476 - DNA, 1917 bp, Emericella nidulans
tcgataatttccccacgctcaaagatgttgagatgggctactctcagagcctgagccggattgacatgatccttaggtccggccctgttgcgcaattcatccaactcccttgcagctttttcaaaatccttccgcttggtgcctaatcttcgcatttcctcgtccgcgatcgcaatctctgtctcaattcggttctcagtttgcgaagtggctgccatatttgacttcgctgagctgataatcttgtgcaccggcgagagaattgaagacgcagaccgatgttgggagttatcgctttcatgagactcccgagagacagtaggtgatagtgacaggctctgctcgctgctgaagctcggttttctgagcgctggatttgccacattagttaaagaagattgccgcctagacttgaggtatgatggctttagggtcggactcgaatcctttcctgtcgaaaggttgttccaggtggcggaagccgggagcttaggaggaggcatcaagtcagactttttggggtctgtatttgcattgagcgcttgctgagttttcgaagtgctccgcttgcgcgacaaggtgattttgttgcgcagagtagtggtgggcagtccattgctatcaggatcggaagggatagaaacggtctccgagttcgagagtccagaagatcgggtttgaggacgaggaccggtcaatttgtacgactgagatatacgggaagagtaatctgcgctgggtttctgacggagatgattatactcgctgttgctcttcggcagtgcataagaaacgtacggagagacagttctggctccaccaggcgtatgaccgtcgtgagaagcaagtgcactagaactgctagcagcccttaaggtgatgctagacgatgtacttagtgcaaaatgcgacgtgctgctccgtgcttgaggaagaggatctgcatcttcatcgtcacgaaaagaaaagtagtttgcttttgaggcggtcaaaggagtgctcggtgttttggatacgtgttgtgcggatggagttgatgggtccgtatgatcgtctttgtcaaccaatgcctcgatcttggaagtcatcggtgttcccaagggaagtaggttcaacggtggcagcttcatgtttttcttaccgaacgcaacactggtatgcggtttggcttccggggtttttattccgcgttcatccaagacctcagagttacgctggccgctggttgactttgactcggagatatgggtggatctcaagagctcaatttccagaggcaaactagacttgcggggtgccgagaattgtggctggtccgactcgcccttcggggattcataggctttgggaatagcaggaactggcggcacctcttcagcattattcatggcatgctccacacgaggctttggggtcggaagccgagaagatgagaaattctgagacaatctggtttgcagtgagccgcccgaatttctcgcagagttataactggtattcgacgacagagacaagcctgaactgtaggattttctattcggatcaggagtagtgcgattggaggagggggtggcacttttgcggggaatgttggaaggggagtaagttgaggagcgaggacgatgtggcaggggttcagtttggctcggcggtgtattcggcagtgggtgagcttggggtgccgttgagaggcgcttcagccgccgagcatcagtcggactaattgtacgagcaccaaggcctgtcgcatggagaggcatcacggatactcgctttgcagatgacgttggtgttggaacctcccagctgtgctcttcattggggttcgaacagcattggttgatgaggaacgagagtgatccccaagccggtagtcgttaagaaattatcgccaagttcgcttgagggaggttgaaa

SEQ ID NO: 9477 - DNA, 651 bp, Emericella nidulans
taaggcaatcaaagagctgacctgtatagctatatggcaaaccgcaaaggccgcaccgcatcgtcggcggcgcgatcaatctcggtttgaatgcgcaaaattctggccagggttcggtcagcgccagcacgtacatcgtcttcattgtcatcatgtgcctgggcctgcctattgccatccttctcagcccagcccataaggtgctgcgcaaggaccggactcttgttctcgtgcacaagcaggcctcgtgggcggcggaattcaaggccgcgttcgccctgatcgcctcgcgccgtgtcgtcatgctgctgccggcgttcttcatcagctacttctacaacggattccaaagcacctggctgaccagctacttcactgttcggtctcgcgccttctcctcgttcttcaccaactttgccgggatcatctcctccttcctcatcgctggcctgctggacaggcaatccattcacatcaagacgagggcacgagtcgcctttgacgcaatcgtccttgtgctcactggtacctggatttgggcgacatcctgcagtaccaattcgactacgacttgcctgagtctccggtctgtgactggtttaagggcggcttcggcaagacgtacgcatgtggctgcttctggacatttgc

SEQ ID NO: 9478 - DNA, 1225 bp, Emericella nidulans
ttccacgcatgggcgattgcgcacctgaagccagacactctaccccagccggcgccagcgccaggccctcacctgctgcgcccttggacatgacggcggcgtgccttgatcctggaagcgttgggggcgagatatgagtcgatgatagtcagatgccgataccatatttcaatagtggaaatgatgcttgaattggcgagttccttcgtggattctaacaattgactagtgctcatacgttatattcacagtcaccatcgacctatccgcaaccatattgacatcgtatataatatctctcttctttagatatcctcctagtcatcctttaagtcttcataaaccctagtattcctggcccgtgaacctaggtgaatgtaaacctatatatattgcctttccaaacttacgtcctccaataacatgttcatttgaccctgtggcgtttgcgaggacgtacggatggagcggactccaattcggcaccggtgggtcagattcctacagattccattgccttcccctggcgtagccacgacagttctcgttgaactgattctctatccggagttcaatccggagttcaatctggggttagagaactagtgtgtccaatatgcagcatcccatattgaaacagaaacctatttttataactccttatatcatacagatcctatgttgcttgccccagccgttgacatccaggcccaatcgctccccttatgatgtgcttaactcttctttccttcagaatgaccgttaccgcaagcagttcacccacctcggccattgatagcatggtcgagaagcagaatgacacggaggggtcgccctgagaatgaatctgagctggtggcttcatcgccaaccagcgaggatgaggcaaggagatcagtacgatgacagagtgtctaatgcgtttgtccacgaatacgtccaaagtatcaccgtcgcgataatcatcctgccgaccactctggtctactttcgactcatgcttgacggttccataatctccgtggccattcctgccatcatcaccgagttcgactcgctgctcgatattgctggtaagacctacattgatattgtacccgggttctggtctgtcgactactctccagataaggtggggcgtagccagttctgctttccagtctctcagcggcaaaatctgaaccattcagtacaaaggtaaccctggcctgctgtccaaaatgca

SEQ ID NO: 9479 - DNA, 153 bp, Emericella nidulans
  unsure (1)..(153): unsure at all n locations
gcagcagagtacgcagacgacgatggggccgcaccgttgaggtccgcatgaaatgtcaacgagagtccgttntaatggacgtttaaagtaccaancggactggcgcaacccgagatcgatgcnncagacatcagttccgtccncttggccaaa

SEQ ID NO: 9480 - DNA, 406 bp, Emericella nidulans
cacccgaaggcggccaaaatgggagtttttatacaagttttttttagacccatgctccaatagcacgaacatggtctgccgtgtagtgaccgctgcatacactgcactgctcagaactgatcaaactgactgagagaggcacaactgctgcagcgaatgccatactttcaaaaatgcccaacctgacaccagtgctgaggtcattttaccccctatggggatgcttcactgatatccactggctggacggatgcctgactaccggaacagtacaagcttacgcattatcagcagcaacgctccctacatatgccaatctaccgacagatcaccctgagcacacaaaccaaaccctggccccactgaacgaaaaaactgtacatgccaatataagaaagtgggccgc

SEQ ID NO: 9481 - DNA, 1379 bp, Emericella nidulans
gggaagcagaagctcgaggatggtatgttcttcactgtagtgcctgttcgctggctgactgtccagcccggtcccaaacggtcgtcctccgctcgctgcccatcctgatcgacggcatcgaaaccgaaatggaccgtcgactgctggatcatttcgtctacggcttcagccgcgtcctgaccctcattaacgatgactcgaacccctttaaagagatcttacttcccatggcgacgcaacatcgcggcctcatgcactcgttaatgtgcctctcaggctcacatctatcggggttgacccccgaaccaagcgtcaaagagcgcaaattctaccacttccaccgcgcaatccgagacctcaaggccaacatcatcgctcgctcgaatatgactgaacaatcaaagacgggcgagcaagaacccgaactcctttccgaagaccccatcatcgcctccacaatcgctctcagtctgaacaccatctgcgagggcgaaaccaacggcgagtaccgtccacacatggacgcggcacggtacctgctcgtcacccagaaaccccgcaacgaaaactttcgccagttcattgtcgagttcttccagtaccatgacgtatcaaattccatcacctcgctcgatcgaagaccggctcatctcgacggtgaattgcgtctccccgatttcgtcccacatgcccaggccggctcgttcctcggtgttttcgacggcctcttccgctacatctcccaagtcacccggcttcgagaccgcatccgccagcgctttagcgagggctacgagcctgccgtcgactaccacgatcctgtcggacgccgtgatgatcgactcgtcaatccggacctgggagacatcccatccgcccaacacacctaactactatctcgcccagctctaccggcaatcgacatgggtctatctctaccgaacgatccgaccttcgcggccgagcgagaaaattgcacaggtcgttgacgacggtctcgagtacctggatctgcttccgcaagacgcaggcgcattcagtatcgtcctcatgccgcttttcttgcttggctgctcggcgttcctaccccgacagcgagaacgtattcaaaagggattcgaggctctcaaggcgtactcgaatctgaggaatatcgagcctgcgtttaaagtcgttcagcgcgtttgggaggttatggatacgaggaccgaggatagttgggactgggagaggattatcaaggagatgaatatggatttcctgattacttgattttgctcgggtcgagttcttatatacgcggttgcatggttcactctacctcgctatccttcccaggatcggaaccggacagctggagaggtggttggtggaccggg

SEQ ID NO: 9482 - DNA, 2123 bp, Emericella nidulans
tctacgactagtgagcggtacggccttcttcgctgtcaggtctctggcatcttctcctgtgcaaggtagactctttagcacgagctaaattagactcgaacgtcaatactcacgcttcgccgagtaatgacttctcagccatctctcggaaaagatggcattatcaagcttcttatcaaaaccctcaacaacaagaggtagtccacgaacgatgacgtgaagaaggacaagcttctcgaagttctcaagcccattctcgtcgatggcatcgcaatgaattcgcaccacctcttcgaagttgggcgaagactttatcaattccgcagcatccaaggctggagatatcggttcaaacgctgcgcggggcctttgagctggcattttcctggcactttaaggaacgtgaattgagagcgcaatagcggggaatatgcgccggaccagaagttgacctatatatacaataagaggaacaaccagcgaggcccacggagggagctttggtcgaatgcgcgggcaactgtgacggcgcgcacctagacagcaacagatatcgaaccattcttaaataggacgaggcaaccagtaagcttgtgagaggtacagaactcaggcagcaggcacaatagcagtaagtgatagttgacatttggctatcgctatcccgccgatgttcgcccagtcgagtctacttgcgggctcttccgcccgccgcggagatttcctgacggctatgctaacggttaagtttagaggtcctaagacggaaacacgcatggatcgcaacagcggaaagtcacatgatatggtccttccaatctttttcttctcggcgcgatgggaaaaaggctaagatcaggacttagttattatacatcctaacctatactgagtgagtgccacactctttacccattcaattagattcagggttatgcacagaattatgcattcgcattgaccttctctcaggcttgcgacgtgctgagaaaatctgtgcctacaacgtctctcgaacaaacttggaagcttaacctagaacccgcccaattcctcggtatcaaaatgatgcgtcctgcgactttttcttcccatcttttccggcgcccgcattggcgcggttgctctgggaggatgcatccgcgcaataccggcgcaatgaacaacacagatcgatctgtcctttgcacgtctccgagccaagtaacgtcgcagtccgctttgacacaacgcagagttcccattgccagatctttgatatatacttctttactccctttttcaacgggagccgcacacaaggagcagagacataatttcctgcaacagtacgttcctcctcagacaggacttatcgccttgcttccttggtcgtggataccatatgctgaattagtgaggctcgacaagcccgctggaacttactatttgttctttccatgtgcgttctccacgcttcttgcagcgaccatggcacctgcagtttcaatcctccaagttcttgggaccacaggtcttttttttattggtgctatgataatgcgaggagctggctgtgcaatcaatgatttatgggatagaaatctggatccccatgttcagcgcacaaagttccggcctatcgcgaggggcgcaatatccccgggtcaagcgctaatcttcactggtactcaactgctggcaggactaggtatcctgcttcaatttccgtacaagtgcctctggtatggaatcccaagcctttttctagtgggctcttaccccctcgctaaacgcgtcacttattatcctcaggccgtcctaggtcttacattctcttggggtgccataatgggattccccgccttggaaattgatcttgtaacagagccaaatgctttgatggccgctactgctctctatgccagctgcgcatcatggactgttttatatgatatgatatatgcgcacatggacattaaaaacgatgttgcctgcggaacaaggcaattcacttcacacgacataataccaagccatctttttggttacaggcgccaagcacattcttgttgtgggggtagaactgtgcgggcggttattaattgttttgagaaaaattgttaaaagggcccccccccccc

SEQ ID NO: 9483 - DNA, 1011 bp, Emericella nidulans
tcactccttccatctttggtctacgtttgcttctaaaaacacagcacggatctttctacagctcgggtttcgtcttagtcaatcacaaggaagcaatacctccttttacggggtcttccaccacgacggtgtcctgtgacgcaaatactcggcctgaaaccgttcagattagtttcacttctgcacgaccaaatccctttcatactcggatctcgcaaagttgtaactacggcgtcacgtaccgtgtgccagtcgcttactttccgctatcgatagcgatcacccctcccggctcatgaccgcccgcatgcattgagaaacagcaataccgcaccgccgcaccataaaacagatcatgatccgacgtaattcggatgttgaagtccagctgcccgatgctgattctgctgttgcgcctgacactctgagtgagccggacatagatatgctgtctgagagctccccgccttcactgagtcttcctgcccacctcgcaacgcgtttcgctcgtaaatctagcgtggctcgacgctcctcggccgcttcatcccgacgaagctcgatttcttcgttgagctcgcagcattcaaatgccacctcccatggcgcgaccgcgaccgatcatattgcgcaacatctccgacgggcgtcgattcttgatagccgtaaagcaaggctagcggaccgtgcgttacatgctgaaaaggtgaggttacgtgccgctttaacgaaagccgctactcggaaccttcaaagagaagggagagccctggccgctcaacaagctcgtgaaagattgctggcagaaatcacagccaagtgtgaggaggaagttaggcgcgcgaagaagaaggcggaggacaatcgtgagaaaaaggctgctgagcacgcacgccttcgaattgaaatggcagagaaacttgcggaacgagagaagagacggcttctatatcagcaaactcctaggcgccaccgtacaagcagttctacactcgaggagaaaagaaaagt

SEQ ID NO: 9484 - DNA, 1874 bp, Emericella nidulans
actttgatcatcctaactaatgtaaatgattttatacgccgctccatcataataacgctttataaactaacgcctgtcgcagctcggaggcatttcgcggcagattccgtatgcaagactactcattccgcaggcccccgacggatcttattcctcatcgcgaagctcagtctattcgagcgcacaagcaggctagccctgactctcgcagtctctgcaatcccctaacctcaaaattaccgccgacgcatcaccaaagcctttgggctactacaaacagcatcaaagatgccaaccgtcgcgcagtgatgcgccgcacacccttcggcatgactcctctcctcagccatcgtgcacaggccgggacgcactgttcagactcttctcgcacctctggatggaagcattgaagccacaaaccaagataatcacatggcaccggaagtctcggcgcgtaagggcgccgggtcgattatgacagctccttgacgccggcacaggactgataaacacataaggcgggaaggcatttaatgcctggggaaaagtatggcttgcttcgcagccgcatccgagggattttcagatgtcttgtagcaattgattgattgcggccgcgtgtatttcacccagggagctgatactaggctactccagggctcttcgaagtgccattacacgtgcgtctgggagaaaagtcgaaagaacctctcagatgttttattttattctttggttgccccgtcttgattgaggataagggtgtctatataaatgcttgcgatttgccttaacactgcaggcagagcagtagggtaataatagaccaggctcgttcttcaacgacggaaaatgcttaaatgcaggcagatcggcctaacatgaggtcacagggcgtataagttgcgatattatctgacctgtccctggacagtatttagtacctcagagatctcaactaaatagttccagtccgaaatcctcgtcttcgtcttctccatcctcaccgtcaacatccaaattacccgattccttgtctctctttcccccctcattatctggagttccaggcccaggatcacctccagcttcaacggtcccaagcgtagcgagtttggatgctcttcggcaatgagctggtttatgttagtctctccttttgtattgtacaccctactcggaagaagactcaggtgaactgttaacctcgtgaatatctttcccccgcaactcattcaataactgagcaacgcggacttcgtcggccttaattccaacagacgccagaacttctcttatatcgtcggcaccaggctcaatatttcccccaagagtgaggaagataggctgcgaggtgcttcatggttttgataggagtgttggtatggttgctaagtaggatgaatgcatggatgggtgaataaaccttgcatctcttcgtgttaatatagagatttcatatatttattcagttactccccctataaccgccttttcagcatttccattgcttctgttttgcggaaaggaatcattcgtgattcatcctggaatcttttatcttagtgacttggcggtgtctcactacgtattaatgtgagttagggctttgagtcagccaagacaaataatactcattacaacacccttataggcagagcaggctagggtaaaccagcacagtgttgagcttctgttggtttcgctcgagttgcgttcgttgattttctcgatcatgtttccgacgtgactgggtgtaaccctaagggtgattgtccctccgtattcaacgaatacgggccacaaaccagtaaagatgttttatatggtttcgggagggacccagttgtttgtcattcaccctttctgactta

SEQ ID NO: 9485 - DNA, 148 bp, Emericella nidulans
gagaagtcttcgagaagaccagagacgcaggcattaactaaggaggcagcggtaaggaatatcctgctctatggccgggcgcggtggaagcacagtcggatattggcctgggcgacttagctaaccctgcaatccagataggcatacg

SEQ ID NO: 9486 - DNA, 776 bp, Emericella nidulans
agttttggagttatgcaacaatatcattgaccacccaaaacatccgttgaccctttgggtagcagattatatgcacccacgattcgtcctacggctacataggatgctttggaacatgcgaacaagattcaatggcgaccacaaattcttattgccaggcgatcagccgttggcataaaaagcatatccagtagcagtaaggaaataaatatatatttgtcctcatattgcatgcttctttatactagagcccgttactaaggttggatatcatgactaccgcgcagtgcagcatatggcagtagaacagaagaagatgatgttacagacaacgaaccaaagggaactcgtcacaatcatgcggtatcaatgctgtaataaggcaaaacaatgcctgtaatggaaaatccggtgatgcggagagacatgccagtaaagaaagcacacggccaatatgatatattatgcaaaggtgtcatgcgtcgtccgcatgatagctatggggtatggccgatatcgtcccacacccgttctgcccatgacagcccgctccaactccttttcaaatgaagggtcatcggccagataggcacgaaaatcacgcagacctttcaagtctgtaaatgttttgagtatacgacgcatatacatattgcgaccaacagtggcactccgtgttccaaggtcgacaatgctcagagagagacgtgggaggtcgaagtgttcgcgaatgaagcgacgcaagactgaccaagaaagtatgcagcttcctgaaa

SEQ ID NO: 9487 - DNA, 1229 bp, Emericella nidulans
tttagcacggcgataatacataaataccatcgacttactctaaaatccccgtcaatttgttcctcgatatactcgatatacctcttacttctggaatagccttctaataaattctattctggtatatcatactgatttatcatcatgtgtggtcggtacgccctaggcgtagtatgtccccggaagctccgcaggaccatcgactaaccaagccagcgaatgagtttcatccgacggcgcatgcaagaacaaggcatgtcagtcgatgaagcgcccgaggatgatgatataagatatacatacaacttcgcaccggggaacgtcggtgccatttatcgtgctgacatcccagaccacaacaagggtgccgagcctcaccccgaccaggaacagacggagtcaactgaacccgccttatcggagacagatagtagccctccagtcaattacaagcttcagggtatgaaatggagccttgtcccattctggacgaagcggctgctggattatgggacactcatgcggactatcaattgccgagatgactcgctggtcgatgatcgcggaatgtggacatctatgaagcggaagaagcgctgtgttgttgtttgtcaagggtactatgagtggctgaagaaggggcctggagggaaggataggatcccgcattatacccggcgcaaggacggagatttgatgtatttcgctggactctgggactgcgttacgtatgagggtgagtacaagtttggtccagggatgaattcgggttgacaaaggcaggatccgaggagaagctttatacgttcaccatcatcacgacctcagcacgtccatcgctgagctggcttcatgacagaatgccggtgatactggacccaaaaactgaggcctgggatgcttggttagatcctaaacggacgagttggtcaaaggagctgcaggcggtccttaagccttacgaaggagagttggactgctatcaggttccgaaagaggttggaaaagttgggaacaactcgccgaatttcatagtaccagtcgacagtaaagaaaataagagcaacattgcgaatttttttctgaatgcgaagagcaagaccgaactgacgaaggatgaaggcgagggagtccctgccgagaaaaaagatgataccgcgcattctgtctcaggagtcaagagggaacatcctcacaatgcggatgctgaagcggaagaggatcaaaga

SEQ ID NO: 9488 - DNA, 1987 bp, Emericella nidulans
tatgcctgtttatagtgcactgctgggtccttgccgaagatgccgttaccgccgccatcaagaactaccgttcaaagagagccgccccggctaccgatcttgggggaacggccaaggaaatccccaaggaagccgctgctactgcttaaggagtatttgtgaatagtttgtgccgacgggagttgttgatttatatcctggtttaaaagtcttgagccctgatgtccagattgcacggggtggggttttattctagttcaggagttgtactttagtccacggtcgtttttctatatctcatggcgttaatgacattagattcccaaaagagaaataaacatgattatttttaaatttatttcttatctcctgtaaaacctaccgctactaatctagaatccaggtgaagagcccagtcactttttctgccactcgactgcaccggttgggctgaacgcatattccaaggccagtttagccgcaggcaaaatcgatctgatgtctgctccagctcgggcgtatttatgcatatctagaacaagcgttcaatcttatcagattaagaaccttgggcgtctagcccactgctgagaccaaagcctagaactaaggatcaggccatatcaatgacgagctggtgcctgaagcttccctcctgaccgtacgatcgggagatgacataagcgcgacaagaactctctcacatttggcagttgatggtagcgtcagaggaaatctgtacgttttttttttttttccagattttgaaagctatatatttgaacgggccatacaaaacagacactttgaaattgaagccctgctgaaagaggcggtgttgagctctacagtggagcttcagatgaccatcacactacgcctgcttgcaaccttgtcgacgtattaactaagaaattttcattataatgacagtgagatcacttccctatgttgactcatctctgttgcaacctgagcttgagccacactcctggtcagggtcggggtctcatttcggtctagcgtgtcgtcggggtcccaaaaggggcatggcgcctgaggatggcttgggagtctgagcctcaggtctccccagttcttgacgatgggttgctgcttcatctttttttaattcccatcgtcgattcctccgagtgagagagctctatctccgtgcgacttcgcatcttgatttttgcctgtcaaggcggcgccatcttcttgaattaaggctggcctcgaccatcaagcttacgccccgcaagtgattatcagcctcaggcctctatcactattgcgccaaacatcaagtctatatttacacgccttgaccctgaataccttcaagatgtccgccgacccattgttctacgcatgggactcctctgttcggcaggatgagtggctcgacttagatgccatgttccaactccctccagagtatctagacagcattcccacttccgtggagtcggtgtctccgcgagacctcgaccagtcgttcactgatacagacttcctgaactgggagtcggaccccgcaatgtgctcacaaaccatgttccctgatttcgtgggtaatgatggttatgatgttccagtgggagagctgggctcttcagttatggacttccagccattcatcaacccaaatgatgtcctacggcaagcgccgtcgtttccaaaccagtttgtcgacccggtattcgagaacacatgcctgccagatgcgcatgatttctccttgttccgagacctcgtcgagtcccaagctgctctggacccccgttgctactcccagaaggagaagcggcgcgatgcatcaatcgcactgcatctgcagcgtatgcaggatgagctagtttcagagatgaatactcccagcctttcaagcaatcaactctcatctccagactggtccgaatcctcactcgaggtaacgcccgagtgctattcccccgcgccagccgcttcaacataaaccgaa

SEQ ID NO: 9489 - DNA, 1472 bp, Emericella nidulans
  unsure (1)..(1472): unsure at all n locations
tgaatggagctgagccaaaaactccagtccccataccttctgcatactttaagctacctaatctggctggagactaatattgcttatggtgcccggtgacttggttattctcactcgcaagagcccctcgatatgacgcaatcaccaacggaagctcaccagtccattgcggccagttgtttaccgacagctaggatagcagctgacaatagaatattttacgctcaggctgtgaatatgaccccgctgcatcacagatgttggctcgtcacaagacaacatagccgcatgtgtagcacgcaagcacgcaatcccccaggtattccgtatactgcaaccccattcgatgagcccagcacttgttccaaaacgcaagcttaagagctgatgacgtgcggtcagacaacctacaaaacactgtttatagtgtgatgcccgccatgtcttcagaacccgagttaaacattcttgacccggacatattctctacagccttggaaagataaatagagatagacagtgacatggacactgacaaagaggtcacancgccgcttctagatggtcacgagggttcatcatatactgatctgccaggcataaagatcagcaaagacggctctcttgctggagtcgaagcactccatgagccggaagcagaatccgagaccggaacgtcaccgaatcccttcgcggacccagaagtagcagagcgctatgcagccctctacgagaaagcaaattatgaatgtcgtcatgtatttgaccctacgatgacctggacgagggaggaagagaggaggctcgttaggaagattgatgccaaagtctgcttatgggccgtacgtcccccgacactatcttatatgtacactcctgttgcaactggatggagtcaagctgatgctgccatgcacgcagtgcgtcatgttcttcggtctgcaggtcgaccgcagcaatctcattcaagcggtgtcagacaacatgctcgaagaactgggattgtctactaatggtccatacctctccaatccactctcgcaccaaactgaaactgacatacggatataagggcagactacaactctggcaacatagtcttctatctctcctttctcctcgctgaactgccgagccagctgctctccaaagcgctggggccagatcgttggattccgattcagatgtctctgtggtcgctcgtcgcgctctcgcagtcctgtctgtccggccgaggctcgttcttcctgacccgttcgatactgggcttgctggagggcggctttatcccagatatcgtgctgtggctgtcgtatttttataccagcagggaattgccaacacgtctcaggtatctagctcctttatctaacctagaggagggatttgactgatctgagtagtctcttctggacaactctctccgtaacagagattattgggtctttcctagcatttggtgtactgcatat

SEQ ID NO: 9490 - DNA, 186 bp, Emericella nidulans
  unsure (1)..(186): unsure at all n locations
ggaaaaaaaaagaagaaaccnaagaggagcacggaaaaaaccggaaagcaagcgggaaaagacagcacaaagngaacagaggagggaacgaaaccgaggaaggaacaaagagaacaaaacgggggacgcgaacgangaaaggaaaagggggcgggagcggcgaagaaacaaaaaaaaggaaaggaa

SEQ ID NO: 9491 - DNA, 182 bp, Emericella nidulans
acctcaacaacagccgagcatgcgataccttactcaagtatcctggcctcgagcactgataagatcataagcctcgtactaaccgttatgatgtacctctcatatgcagatcctcacgccttcgcagttcttcgtctcacaaggatcagatatatcgtcgaccgcaaagatcgcttcttaac

SEQ ID NO: 9492 - DNA, 1478 bp, Emericella nidulans
tctccatcaggcggcgaaggtggtaggtggtgtcctggcagtgggtggggtcaccggggccgttggaaatgaagacgccatcgaagtggtgagcgaccttgtggatggataatcgaagggaacaccgtaatgctagcaccgcggctaaccagcgtacgcaggatgttctccttgacaccgcagtcaaggacggcaacatgacactgaggatcggctgcgctcacgtggaagggagccttggtgctgacctgacggacaaggtggatctgttcaggatcggtgaaagcctcatcctgatcagcatcatactcctcacccactgtgatacgagcaagggaggaaccctgctcgcggaggtaagtgacaatggcacgagtgtcgacgccagagatagcaggaacaccctcgcgggcgcaccattcaccaagactctgtacagcggtccagtgagagtactgctccgcaacgtcggcaacgacgacaccagcggcctggagattgggcgactcaaagtacttgagaagaccatggcggtccctctcggtggacggaacaccgtagtttccaatcaaaggctgggtgaaaaccagaatctggccccggtaggaggggtcggtcaaagattcgggatatccgaccaaagacgtggtgaagaccgcctcaccggaaatggtggtacgggcaccgaaagattttccgtggaagataggaccatctcggatcgtgaaggttgccctttcaacgggcctctggttccggacagtagccatagtgcgagcctggtagacaggcaaaggggatgaaaaggccggagccctggcggggaccgccttgaaaaatcggctgaacatcatttttaagtatattggttttgtagagacgtggatcgaaatttattcgagggacgcttcaatagtttccggaagctttccagaggtggtccgagatgtaatcctggtaaccgttagcacagtggacttcccgtacaatttgtggacgatggaagagtcatcataggaaagagaagagagcgagcatacctgagaagtgaaggtggaaggtgccgctggcatgaacgcgatttttttctaccagttatttaaactgatataggaatgaatttggtagggatgttgttttagaaggacatgggctttcgtagtggtgctctcgaggcttggaaggaagtgagtcaagatctcgagggagaatccgattttaagggtgcgaattttcctgtggagtaaaggtggcccgagagtcgggccggttgcgccttccttaggtccttccctcaccgacttctacgtctgccctgtaataatagcctatttatttgttatgtgctaataaaagtactaatcgaacaactaagcccctgctgcacgctagccatagggtagtgtaccaccaatcacagcccccgtattattgctgcgttatcggagcccgtaatctgaagatagtgtaacgcgatc

SEQ ID NO: 9493 - DNA, 170 bp, Emericella nidulans
ccattctaacttaatctatcattacttcattcctaatcattttattcaacatcatattcattccatttattatcattaattaatacctaaacttactacttatactccatatcaccattattctcccaatcatctttttcttccatctctacttcttccctcaatcaccc

SEQ ID NO: 9494 - DNA, 281 bp, Emericella nidulans
  unsure (1)..(281): unsure at all n locations
agtaggcaaaggtgcaagctgcagacgggtgctngaagcttgagatctgaagtctctcggtcataggaactaatgtgcggtagngcggccgcacggaggaagacagncggnacgttgcaccgnacaaacgcgcaaaatccccctagaatgagaactgacgttaaggacctggttggcgtggaatcagtgtgatggcaggtagtcaaccggttgcatgctggcaactggtccagtgagcagtganggttgcggcggagtctactagggacttaagcacgtga

SEQ ID NO: 9495 - DNA, 291 bp, Emericella nidulans
  unsure (1)..(291): unsure at all n locations
gagccagttcgcccagaagtgcgctcgccagaaagcgctgggtctcgaggctgttgagttgncaggggaaatggatggttatgaagtctgggggccttccgttgttctagttggacgagacgggttggtttcatgcgcacggtgacagcgccagnagtcaggaagaagttgatggaattataggtcagggaagtggttttcactgtgcacatctgggcaatgatgtcncagngcaagcgagccgtggcttgtaaactgattactgaggttagttgtttgctctctatatga

SEQ ID NO: 9496 - DNA, 323 bp, Emericella nidulans
  unsure (1)..(323): unsure at all n locations
agcgtacttcgtccgggtaccccgcgtggagccaatccaaatatgcagggcacgcacagaatgcgcaatttctagtggcctcgcggcgtacgtgacacnctgtagtggccatgtcagcagactggacgtcatagtcnccgaataggngagcgtagcgcgaaatcngtangctgcatctgccgnggcgatcggccccgcagaggtctatgagggnantgcccagnatgcgtaaacgagtnnctaggctcagcggatcagggtctaggcgactctaagacggccgagaacgtccgggtgcttngcacgtgagagaagggtttggg

SEQ ID NO: 9497 - DNA, 1940 bp, Emericella nidulans
aggcgatttatctgtggctcctcgggacccttctgaaagatcgctgagcgatctctttaaagcctgttttcgaggttctgtttcagtatagtctgcgatgcattggtcaaggccctatacaaatggagcagggagctccattcatctctcttcgccgcaagcctggtttcgcaacatcagtataggctggatcttgattcactgaagcacacatacacatgtccaggattgccgcctctcgtgctctgagaggtctcgtatatatggcctcagtggccaccagtcccatctcattccagtccaagcttcagctgccccttgaacggtatttatccacccttctcgctgagggtggtcaagcagaattgtaccaggaacaaactcgcgcatctcgaccacgatccttgcccaggggtatcgacgatattctaagtatctagggtgagctggatccgtaacttggcagccagtctttttaccctctcatccagactaggatagacgaaattcaaaagatcgtggcgtagcctttggaaggcctcgcaaccgaccagtactcggcggagatggctcagattcgggaactcaacttctgacatatcgtcctcgtcctcctcgctgttgctgtcagactctggttcgtagccagcggccggaacagagtgatctctcaacgcgagtcagtcacgctctcccttcaagtactgctcaaccttgacttgatggtctattccatccggcgaacaacccaaacggtggcttagagccccgcaaccatccgtgaggcccgtacagaaaatactggacgcgttgcgcgaatagttcttgattaaaactcccagaatctgccggtcatattggtccagcaactgatctctcttcaagtttgtagcgcacttcattaaaagacgccgcagcttgttctgcacgcgccctggacgaaacctagcattacgcagggcatcttgacaacacgtcttaatgtgtttgtcctcaatgagtatatccagtaaatgcccgttccggcccccgccatatcctctatctctgctgtggtttgattggatccagattcgtttgagaagacgctgctggtggcatcgctaccttgccaactgtctttaggctcttgctttccaaatcgttcgcaatatcgctatcagccttgttgtcaaggttgctatcagactgccctttgtcctcatttgcggcgaccgtgcctcgcatgacagccttatcatcaggatccgatacaagtctgcacgacgcgcacctgacgtgtccacatattgtgcaccgtccaccgcagaggctagggttattgaaacaatcgcatacatggcagatccaccagcctgacatgccgtgccgcaccatggcggactgtattgcggtattaccagaatgggaagaagttatagtgaccaaacggaaatatctttgggatgtccctaaccgcgaagaagagtctctcttatagggtcctggtaattcaagatgatgctcacttctggatacgtggcacgcagcccgatgacttgcacaaggctcagcttatagtcaatctggattggctgggtttgatcaatatccctgtctaaggtcttcgtatcagcgctaagtaatctcatcgacaccaagattcacttctcaggcaaggctgagtctaactggcaggggcagtcttgcggcaaaagaattggcggagacggcagagatctggttaatgtgtgcgaacgtccggaccgacagtgtaggtcgcctaatgatgccggcgaccattagaagtatgatttcatactagtgagggataaggcagctcttagagactgcaaactgataatggcagatagactgttggggtcagtgcgtaaatagcccagcggtgacgaagaggatccaactagacattagctggcacagtaagctaagacatttgt

SEQ ID NO: 9498 - DNA, 506 bp, Emericella nidulans
gcggcggctcaagaacagggggattccccgggcggaacgaaagggttaacaagctaaacgaaaccggcgaccccggggcgaacagacagagaaggacccgagcgggcgcgcgaccgaacaatatggtgagggcgacagggcgaacgaggaaaacgagacaggcacagagagaagtgagggtgcagcagcgacgcagaagcgggggccggagaggccgcaggccggggacgcatagcaaacgcagataaccctggacagtaggacaaggaacggccacaggaacagcagagaagagaacacagagcatatggggcacaaaaacgcatgccgaaacaggatcctagatggccaggcaagtaggacgaacgtgaacggaagcgtgaagaacacgcagtccagccagccgaaaaaagcgaaaaaggcaggcaggcaataccccagggacccaagaagccggaagctctgaaagtaacggagccacaaaatgcccgggacaagaaataaac

SEQ ID NO: 9499 - DNA, 991 bp, Emericella nidulans
aggtcagtcccgcgcagcttcatgtgtcaagtgtcccggcattcagaatcccaagaaagttagaataatctttgacccagacgggcggttcgcgcggtcgatcgcctgacagtgctcattctatcggactctttaagagtaccacaggagtatgggatgcagcaaatatcatgccaaggtctgaatatgctaccgggattcattttcttgcgagttacaggctttgcccgctctgtcatttggcgacctcaatgacctgctcgggctgaaaatctcgagggttaatccgcccgaacgtctccgttttggtctatttccgaattaagaaaaatacccattcatcgatctcacttccttgggccgactaacaggaaactcgcctattgtgatatgcagtcaatcgccatcaacataccaccggcagttgggacatagtgataatatttttgtacactttgctttttacccctccgcttcttttttcaagacttccgtcacacagtaaaaagcacaggcgcgcctgttccagactgctgggatgggacggcgcccaactccgacggcagtgccctaaatttgggacagcaaagtccaaacagcctgaacggattaggaaataggtttcggttcgctcagggttgccggtatcaatattcctcttatcttccatataaatacatagattaccagcaatcagttgtagtagacaattgctcacccacagcgtctcaagcttcgcgagggtctggtgccatctatgccagacatttggttgtcacgcatgcagctttctagactccaaattgactttcaattcccggtcccggccgacccggtcgacccgcgacggcgttgaacctcgcatgaagccaacgcagcgtccgcccgggcgcacctttaattcccaacaagaagactgacaatggtaagtggtagcagtacgaatacaggactactgcggtacaaatggtataagaggtaactatggatg

SEQ ID NO: 9500 - DNA, 2026 bp, Emericella nidulans
caacggtacggcaaccctacctttccggccgcatcctgaaacgaacggctcagctcgcggcagtagaggccgaggccgcggaggaggcgtggcgcgtggacgaggtggctatgtttcagtcgataacagtgatcccaacgccggtgttgtccaaaataaccccaacttccggccgaagaactattcgcaagtaccaccgcccagtgggctggagtatcgcggacgaggcagaggccgaggcgcccgtggcggagatcgaggaaacggttatcgcggtcgcggcagccatcgtggaagaggagccgctgccacagctggacagtgagctctcaagctggatggtagaaattatgcgttgagatggactagctagtctactatatcctgtatagaggcgttgtgctctggaatatgggtataaagctgtagtcgatcatctaatgaatcaaactgggcactccccacctttccccgcattccaattccttcacggtccatccccgacatctccaatcttcagtatccccgccctcatggaaaaatatccgtcggcaaagtagtcggcgacggccgtgagttaaatagcctccttcttggtctatcttccgtggttcgtgctcctccaaaacaagatcaattcaaactccccagttcccgtagtaaaatggcacccctgccttctattcccaccttcgacaacctgaccctcgaccccaatggtccccctggcaacgcatggggtctatttggacctaataatgaacttgggatgcttaatttgctcacccccgaggtagttaagagagcagcctccgaggaaatccgcgagggggtccgaatatctcttgatcttcctctaaatcgactctcgcatccgagcttcaaccggaaacccttcatccaagagctggttaataaggcaccgaggattgtcaatgatgatatcttgacgttcaatacgcagtcgagcacgcagtgggatgggtttaggcattacggtgtgtcaatttcaagcaaatgcattgagctgtctgttgctgatgcgtggggcttatggtaggaaaccagacgcatgggtgttactttaatggccattcgctggatgagctgagagagtcgagggttatcggaattgacggttcgccactcttaattttatctggatacctggacaggttaattgactgactcgaccatctatccagcatggtccaacagcggcggcattgtcggccggggcattctaattgattacgcgacctgggcgcagagaaactccattgccctaacgcccttccaaacgtctacaatccccctctcatccattcagcagataatccacgaaaccttcctaaccccccgcccaggcgacatcctcttcatccgcacaggcttcacaagagcctacaacaagcttaccgccggtacgaagaaacagccatttgccttgccgaccaacaccaaatcttttgcgggccgctgtgcacggcaaggaacacattggtgccggttcgtgggtaaacccattttggggcatatcgtgattgatcatccatcttttttaacctgcgcccttcttttccgctcctttatgggctttttttactaattgtttcctttcattccatgtactctgtacccctttggtattaccttccgcgttctttatctccccgattccttctcccttgtgccatctctcatttttgttcatactctttacttttttcttacaacatatctttaacttttcctctattttttattatacctatcttctattcaacatttccctctcttacatcttacttttattactttacttcaatttcttgaaacatttctactttccataattcgtaagctccctccctcttatccccattatttgttcttttctcctcatcacttctataatatcactcatatttcttctttcttatctctctatcatctttccctcttcccatttcactatcatttctaatcttcttcatattctcatccactctttctcatcttattt

SEQ ID NO: 9501 - DNA, 294 bp, Emericella nidulans
cggtgctagtattgagcgctcgagcatgaacctgcgcatgagtcaagtgatctaccccctgaaagtagcgcgcttagtcttgcctttcgtgccgtggttgccttgttcttgcatgaaaaatgcggttctggggctcaaaggattggttgggatgcctagtaacgatatcctgttcccgtacttttgagaccacgtcgcccccgagtcttagggggttatcgactcttgccctagcacacaggctcacgacgttacgggtgtacgtatgtacactaataatgttgatcctataag

SEQ ID NO: 9502 - DNA, 162 bp, Emericella nidulans
tgcatcagccctagagcaatcttccataccttcacgacttaccctctctccattaacaccattctgtaaatatgctcaacattacgcagccatgcggcctatcctatggccttaagtttgtatcaggctcacaggacacatcttgtctcccacaacacgtta

SEQ ID NO: 9503 - DNA, 1163 bp, Emericella nidulans
tatcatacgttttctgctgaattggttattggggggaagagtctgaaggaggaacaggaaagattggggcggatgaatattcttgtttgtacgccgggtcggatgttgcagcacctggaccagacggctttcttcgagacgtataatctgcagatgctggtattagacgaagcagatcggattatggacatgggtttccaaaagacagtcgatgcgatcattggacatttaccacccgagcgccaaacgcttttgttcagcgcgacacagacaaagaaggtctctgacctggctcgactcagtcttcaggaccctgagtatgtggctgtccatgaggctgcgtcttctgcgacgccgtcgaagcttcagcagcattatgtcgtgactccacttccgcaaaagctcgatacgctgtggagttttatccgcagtaacctgaaatcaaagacgatcgtattcatgtcatcagggaaacaggtccggtttgtttacgaatccttccggcacatgcagcccggtattcctctactacatcttcacggtcgtcaaaaacagggcggacggctcgatatcacaacacgattctcacaagcccagcacgcagtgctattttccactgatgttgccgctcgaggtttggatttccccgctgtggattgggtcattcaactcgattgccctgaagacgcagatacatatattcaccgtgtcggacgaacagcgcggtacgaacgcgatggccgtgcagtgttattcctggatcctagcgaagagaaaggtatgctccgacgtctcgagcagaagagagttacggtggagcgaatcaacgtgagagcgaacaagcagcagagtatcaaaaatcagttgcagaatatgtgtttcaaagatcctgagctcaagtatctcgggcagaaagctttcatttcctacgtcaagtccgtctacatccagaaagacaaggagacattcaacctgaaggaacttaagctggacgattttgcagcaagcctaggacttcctggagcacctcgaatcaaattcatcaaaggtgacgacacaaaggaacggaagaacgcgtctcgggctacagcttatctaaccagcggtgacgaggaatccgacgaggaaggtggaaagaaaaagcagcccaaggaaaaggaagt

SEQ ID NO: 9504 - DNA, 118 bp, Emericella nidulans
acaagccggaaatagccggaggccggtaactctcgtgtgcagacacaggagcgtcgcctgcctcgacgtcgggcctttcgtactgtggcgcctgtctgctgtgcgcttggtcttggcc

SEQ ID NO: 9505 - DNA, 2917 bp, Emericella nidulans
aaaaaagaattataggaatggaggaatcctaatagtaagggtaggtcaccacacaaaagggaagaagcaacgctacaaaatcaggagcaggaagttttaacgagagtgccagaaaagtatttaatttggagaataaaacaagcattattggcccaaacataaggcattgatgaaaacaccgcctctcacacagtcaagaagaaaatcgctttaagtttacaatggggatatgatcgttgtaggcactcaaagcctatcaggcgcgggcaagacaaaataagtttttaacaagcagagctcggtgacaattgtgagtgcttgggcagcaaggatctcctatatgctctataatgaacaaccgcgcctcgtaagaacatcaattatgccccgacggctgaatatccacaaaatgcatccttgcatcacccggtaaggacttggcccttctcacctaccgccgaatattcaaggcaggagctaagacaagcacaggtgctgcacaacggagctaggttcagtacgccaccggccgatgacgggtttgcttccgggagtcttgattcggcaccatctgccaggtggccgtcacccgcacggagacaacacgcctcacgggcacgggtgttaaggtctcccagacagcgacgtagggcaaagaaccgcagcagtacagattcaagtttcgtcctgacggaacccctgagtgttttgaccaaagacatgacgcatgtccccctcaaagatatggagagccatgtaaacagaccaattgaggaacgccttgcagatacagccaagaacgacgggaaaatccctaggcccatgaattccttcatgctctaccgctcggcatacgctaatcgggttaaagagtatttcagacagcaaaaccaccaagttgtttcctcagcatcaggcgccagttggaacaaggaaacaccagagatccgggcaaagtatgagcgattagcagtgattgagaagaggaaccacctgaaggcatatcccgggtacaaattcactccggccaaagacaagaagaaacgttccaccttcgacgatagccattccttcagcggcgagttcacgcctgagggcagtccagcacagcggaatatcagtcggaacagtacgttcagcacccctgagattggcagtgggtggaatggcgggcacccaacacctcctgacatgggcgaccatggcctgccgacggacggttacttcccatctttgtggcccacaagccatcccgccagacaaccagtgggaatgatgctcacatccgacccttcgcacttcatgcagccagcctccaacccggaagagatacactatgctccgtcgacaatgctggctggtctgcccggagcagcccaccatgacctcctccagcctcaaggcggccaagtcgaccctgcattgctgaactaccccggtagcacaatacaccccgagggtggttctcaagtctacggccatccccactaccagatgtggcaggagggcaataacaatgtttatgctcctttcgaggcttccatggagcccagcccagactcttacgctggcgcaccgtccatacaaccaggtatagatggccatgaaatatgggactcaagccaacgggcgactctcgagcccgctggcggtgacttcgataactggctcaaccaacccgctgggtattgatacgcttcgtcttctcctgacaaattgacggacctattggagaattcttttcctccatttcttcccttccatctgtctctaagaataatcaactcacggcaagttctcgacaatgaatctcgcataacggttgtttgggtgtgcctgttccccgtccgaagacattgttggtgtttcaatttctttctcaaggtaatatatcttcctatcagttgtttggttaactcttcccggtgtttgcattcgggtggtggtctgttttccttgccatttgggggctagtttccggggattttcaatagaggtatatcggtttagggcatggtagatcaaccctcatttagactataaacctgttctaaaggctctcgtgtttcctccaaacgtgaatttcctaaaagccacatcgataagcaggtcgaggtatggaatatgcgaactttcgacgactaattgaataatcagaaatctagatggtacatggcaggagtctaagcatgtcaatatatcgtcagaaatggccagaaacactcaattatcaagcaatctaaatatttgccgagaggggggacagaaagaatctagggaattgatgagcgtagaggtagttgcgatgtccagtgctgcgaaaatctaccagcatcacgtggattatttagtgcaccgtgaccgcgataaggtcgagataaagagatccatcaaccacgcgcacatttacaaccaccgaatactctatctagaccgcaaccatataccgctacgagatactcgcctcctcagataactcccgaccttacttgccctcattccttctgtccgggtacgaaacgcggactacacgctttgaacacgaccgatcgttcggtcgcacaggatgtacggagaattaaggtaatcaactggtttcccaactaccttagcggtcgggaggaacccgggaacgtcaaattatctatgcctactgatatttgggtaaaaggccaaagcacccattccttgccactcttcccggccaaccgggttgccgatccgttacccgattcgtgattggcgggcctgtctcttctggcccttgagggtttttcccttttaaaacccctcccgggctttgcctactttttgatagggattgggttcttatacttaaattgccgggacttaattttttgggttggggttcacccggctgttgaacattgaatgtgttattatgcttcctgcttgc

SEQ ID NO: 9506 - DNA, 475 bp, Emericella nidulans
gctgccggcgcacatcctaagcaccaaagccccaaccacgcaaagataaactccggcctgttctgcaagtacagcgcgacgagctcgccgcgctcgacaccccttgataagaagaagtgcgcgtactgtgctgctcggtcgcgcgtctcgcggaatgtgtaaatgccttcccgcgaccagatcgctaacgcgtcggggtactgggaggccgtagcgtcgaagaagtaccacgcgtttagacggcctttggattcgtcttgtgaatggcgacgagctgcgcttgcggcgaccaggagcgttctgaggtcttttgtaaggtggaatttggcgtcaaggtaggcagctagggttagggcggatgccgttgctggaagtattagcaggacccttactaatatttgactggtgtaatgtaccgagcgccatatcgacagtcgagctacttgcttgaatacagaataacagaacgggagat

SEQ ID NO: 9507 - DNA, 231 bp, Emericella nidulans
  unsure (1)..(231): unsure at all n locations
ctaagagtattccgtggagtcatcttggaggtgttctgctttggaaaacagctatcactgagctatatgcgggcagatctaatccacggcacgctacgcgataggggtatagtttgtgctctctgtaaattatcgaagaaatgtgttgtaggggtcaataagttagctgtaggtttatatgattgctctgaaaagcancacaaacaggtgtgtctttcgcgtcaacgacaa

SEQ ID NO: 9508 - DNA, 1960 bp, Emericella nidulans
taagcagtgcgactcgggagtcctcccgtcttggcaggagctcttgcaggtctcaaccatatcatccatcgcgctgatcatcgactctgttgctcttccgtgacactggacgaaacacggaccctcagtgggctcgtcggactgcaggaaatgtaaataatccatgatggtaacatggtatcgcagccttatcataaacagtcaaggtaatcctcgcttcgctaaaccctctgcgtccctgttaacctggcttctgcaggaccgggtagattggagaatccggggtagtgagtctagtaaccaaggacatacggagaacttggtagaatgaagggtcaagacaggcttgttattgatgctcgttcctggcgagtcatgagtccacgaatcacaatcctgccattccagaaccgcacatcattgccgtccatggcacggcgcggtccacgggtgctgtcatggaacaagctccgtctcctccttttgtcggggcctctaagccctaagggaggttaggatccgtttcagggttgccgttcccacacttagcacccactttttgttggcccatccagtgtcctcgggccgcccaaccgcctggactcgaggatcgtcatccttgactggcttgccttgtggctgaatgcaggccccgttactaccggtgaccacggcagtgcggtgactcgtgcctggcggcgttggccagggcattgtggggatgctcaagatcaaacccggcaccctgaaagtggtctgctgtggactgtagactgtacctagagacttgcaagtccagcatgaaacaggtcaatctgtcgcatccttctgggcggctgccctggatctcttgtcatctcatctcccgaggcagaaacgggcaatgcaggttggattcagatcgctcgggtgacctcttgactgcagccgtgccctggtcattagcaaaaaacctcttgggtggctaggcctaaagatattgattccccgccagcaagctgaagaaccggatctggttgtatacgacccctgcagcttccggctaaagtcctgccccgcttgctgttgatatgtcagtctgtgacagtgtcggcacggccctgcaatctaaggcaatatgggtacttggctgttccgtattgagtacggaaaggagcaaactccttaaagagacagctatataagcaggtagagataccctatctactctcctctccgtcatcgtcctctcattctctaaacctctggaaggttcccttgagtcggatttgatatccttgcttgaccatggccatgtcgaagattgctaccctcgcgggtcttctcgcctctgctggcctcgttgcaggccacggatacgtgacgaagatgacgatcgatggagaagaatatggtggatggctcgctgatagctattactacatggactcgccgccggataactacggatggagtacgacagtgaccgacaatggcttcgtctcccccgatgcctttggtaccgacgacatcacctgccacaggggcgccactcctggtgctctctctgccccggtgacagccggcagcaagatcgatatcacttggaacacctggcccgaatctcataagggtgggtattaactttcaaatgcttttgcttgtcctactaacagataatcaaggccccatcatcaactacctcgccaaatgcaacggcgactgctcttcagccgacaagaccagcctcgaattcgtgaagatccaggccgaagcgattgtcgacgcttccaccaaacctgggttaccgatgaactcattgagaactccttcactactttcgttacgatccctgcctccatcgcccaggtaacttcgtgctccacacgagatcatcgccttcactctgaagccagcagaacgtgcccagcatacctcaggcttgaactgttggcaagggagcggtctgcaaaccattgga

SEQ ID NO: 9509 - DNA, 128 bp, Emericella nidulans
  unsure (1)..(128): unsure at all n locations
atgaggagcgcangaagaggcgattcgatgccgttcctctcattaaatcctacgagcagaaggtctgactgaatgcgttggagggctatcatcgtcgagttcctagggtaatcttggccgtgatctcc

SEQ ID NO: 9510 - DNA, 551 bp, Emericella nidulans
ataaaatcattagtatgcgtagtagggtatcctaattatgcaacgcgtaaagagcctcaatcaacctgaactccattcaatccaatcatgcccgcgagccagagccgagaccactcccatcactcacatcccatgtgcgagtctcacggatgatgccggtgcgactagagcagctccggctatccgcatacccatctgcatccgcatcccacccatgtgacgacgccgccgcctcaacagtcgtctcagactgccctactgtcacgggaacaagctcgtagtggtcatcgcctctgacgcgattaccgcggctttgttggcccctcgaatacccggaagaccgagatgccgatgcttggcccttcccccctgtgcccgccgaagactggtattccaggccccggatgcgcaggccattcgacttgagctggttcaggaacgggttaacctggccccaacaagcggtgaggatactcatggattgcacgatctgtgacgcgatctgcgcgaggcatgaggcgtaagttgggtcgtcggaatccgggttcggg

SEQ ID NO: 9511 - DNA, 1624 bp, Emericella nidulans
  unsure (1)..(1624): unsure at all n locations
gtcaagttattgaagatcccgacaatgactttgtcgccgcattgtagtcgtaatattatcgaagaccgatctggttcaggagacaagtccctgcgactgaaccatggcgggcgaagatgacgcaagcgaaagtcgggtcgccagagtgagatcgagccagagatagcagactatcgagggaacaggatgactcaaaaatcaaacgaagcatgcacctcgaagtaaatgggtgtaaatatgattcattattcgatcagatagtttaagaatggcagcgaacgtttagtgaaagtcccgatccccggattccgggctggatctgtctagagcccgagtggtcctccgtacctgcccaagcttaaggcttagtctcgagatttccagtccgcagcatcttttttccagctcgacctgccagcagcagcttatctatcgcgtcctcgtcctatccatcgcccatccatccaccttttctccagctggtcgaaagggtttcatattttctttttcttttacatattaattcttacctggtttgctttctccattttagtccatcttccatcttcacacctcttcgcttcggctttttctatcactgtctctgtgctaccttccacctccaccacacgacctctaccttgcctcgcacgccctacctggagcctcgcttcgtccagcgtcagtctcttattcggcatattcttacacaattcttggctccccggccgtctccatccccgtcctcgttcctcatctccaggtatcagacctcgaacggcggacacctgcgttaaaaagatcgatctatccacgccagccggccgttttgagtcgcatgcttgctttcgcttgtgtcacagctgctcgacgttaatgccgtgctttgtctctcgtccgcattcccactcttcgacggtccactaatcacgtccgatcgcttctctatttgcgcaacaggcacattctcctttcataccagctgcaatttcacttcacccttccccctcccccttgccgcttcgacccatcaagcttccagcgcttgtcgattaaacagagcccccatcgttcctcttcgctagtcgctgttgagacctacgtccgaatttcgagcttgctgagcatgcacggagcgtggtaggcccccggtttttctttgacaacgaaaaacggtctacggcttccctgtgaggtttaggctggcaaacaaatgggagagataaacatttcctttgggttactttacgtttatactttctcgttggattttcactttttattttggctggcatttattcccctttggcatcccttcatctccctggacgctttaggtttggcctggaacaaaaccctttgttttggacttttttncttgaatgtcccctttttgggacccataattggagtttttgttggcctttgaaacgacttggtgcaaacaccctcccctccctccgttaataggaatatttgtttgttatattatgttcctcagtatcaacctgctcccaataaacacgtcacttccttcctttttcctttatagcttggcctttttgtgtaaattcttttaatataatactcctccctctatatctctcctcccacatccccccct

SEQ ID NO: 9512 - DNA, 454 bp, Emericella nidulans
ggagcattttttgagaatatctcagagggcacccacagccgagaatccagaatggagcgtagcccgcgaatggggccggagacgaacaagacggatgtaaacgttcataagcaaaatagagataaaaatgggcgtgacatatgggaacagggcatccgaatggaaacaccattagagcaagccggatacaccaatatacactgcctggaatgctcaataccgtaacaacaacctcaaggaatacaaaagtatgcaggatgggcgaatgttcatcccagggggactaaaggagagcacccaaggcataagtctactggagcatattcctagcagggggtgagaactaataacccgtggggacaaaagaacgcgaggaatactgaaaggacggcccagacactggattgaaaaaagctgaaactggagggttatgtaccccgacggtgatgggggg

SEQ ID NO: 9513 - DNA, 1610 bp, Emericella nidulans
gaagggatggggaccctagcataaatgggaaaaatgcatcgacggcagctgatgtttagataatgtactggagcataagaggacgaaaagaggagtatgcatatcaataaaactaagccggccagcaaattccagaattccgacaataaactataagaacctttcgttcctctacggagagcgcctggttgctttgctctgggtaggcaactttgccgtttcggaacaggtgccaacggttatgctgacgaggctgtgtaatgttttcttttcttcaccagcatatccgagtggagtacatgtagcttgtataagtgttacgtataatagacccgagagtgcattatcctgcaacatgagactgtgaccagttggtagggtaggagaagcgcaggcttcaggtactctccacctacagttgtgatagtgggttggaagtcgtgagtgtctggagaaaagcttctgtaagtcacgtagaatggtactgcttaggcttagacactgccacgccgcggtgattgtaggggatgcgatttttttctaatgatagctgaaaaaacatgaagaagccggcatgttagcggaaacttgttccttgtcgatcgatgccatattcgttgactatattggccgcccagaatccaggagaatatcatcgacacccaacatacaaagcacccaatgtaagccgccagatgattatgaggggctcgatgtgacccgtagctgatgtaagaagtctgtgacctctaataagcatcgtgcaaacgtgtgtacggggcagggttttgcctaggttgtaagtgcactggctcggtatcagctggctggagcatgccactacgacctttactgatctgcggcaatatcagaagcagcctgagatttttttaacggccgatttgctgtatggcgtaccatctgaatggcatctacaatgggtgtctcaagatcgcggctgtcttgtgaagcgactgtatctaacgtttacaatctaaggtatgaagtcaggagcagcttccatctctatccaatggttggtaaaagtgcgcctttctgtatagcaagggcctcttgacactgcataacaaaggactccaggcacgcatccgtataccataaccctcgttcagacatcgactttgtagttaaaaattattgaaaagcgcgcgacattagatcaacggacgctgacgcaactcaagccccggcaaattgcaatgaccatgcgtcaccgaggcgctcattcgactctgcaagtccaccgtgaaggattatactagacccgtaaagcacgtcggcgtcgaaccaccctcgagatggaggctcctccccttccacgagaattttgtcccacttctcggactcaatgtcgaacgcccaagcgtctgagagcatctttcctgccccctggtgacccaggctgctaggatcgtgttctccaaacatcgtcactagcgatggctttccgccgatttcgagcgcgagaaggcagcttacactccgcggactggggccgttggccccgtctgccggatattcaatcgtcctccatgtcttgctctcaaggtcaaacacctccagagcacccccctgctccgtcttgccgt

SEQ ID NO: 9514 - DNA, 129 bp, Emericella nidulans
ggtgcgatatatgtacgggaccaagctagtctggaggctgcaaacgacgtggacgacatctatgtatacatagctcgatacttcgaaggctacatgtcagagccgacgctcttgaaaaccagcggttag

SEQ ID NO: 9515 - DNA, 371 bp, Emericella nidulans
  unsure (1)..(371): unsure at all n locations
agacaacagagattcgaaacacagtgcacaagcggtggccggttgtccacgtcacagaaaaatagggattccgtggctggtcgcgaacgagaagtccattcgccaatgtatgctgagacggctgaagggtgaaaaccgtcctacgagttagataatgaacagtaagttggggcantttaacgcaggaggnttcaatttgtcgccgctcttacgtacgtaaggaagcttgtggatctcgcgaatgatcgcctcaagtgattgggngagtcttagggtgatatattggagtcacggtaatgtgttgcgaccaatgccgggggtgcacntgcgctagagttgcagtgatctcggtagtttngacaacaagtaag

SEQ ID NO: 9516 - DNA, 210 bp, Emericella nidulans
  unsure (1)..(210): unsure at all n locations
ggaagaggggatgaaaaagaaaaaagaaagctagatttgtcgcacaagagacctgtaccgagagccagcnctacccgaagangatccgtgataggaaaaaatgccnangttgcgcngctccagatgtagagacngaggtaggagaagagggtngggaagagtgaggaggagggtgaggtgtggaagtggttgagaggaagcatgcgagtc

SEQ ID NO: 9517 - DNA, 1567 bp, Emericella nidulans
agcccgttcgtttgttttgctgcgggatgtgcaccagacaaccaccgcgtccattccttcaacacgcgattcttctcaccagccttgttgtatttttgcaagggtgggtggtccgatgctgctgcttagtctcgttttctgcgtcagtttgagaatctacgagggagcaacctatctcctgtttactgacttgaggcaatattactagctcaacccaaaaaagatcaacatccaacgctcgtcgtcgtatagtacaagtatacaatgggtatctatctaacgcttctctgtcattttctactctaatcgcggagtgcctcaatatcgtccacctgggagttgcaccatgttagcaccttcagagcgatttaagtacacggttgtcatcagagaacttacctctttcactgcttccgtagtcaatacaataggattgtcgtcgccgacacaaacgctatcctcaattcgaattccgacgcctcggaatttggccggccatcggtcatcgtccggaacatagatgcccctggtattggtaagtatggatatcaaaggtacagtatggatactcacggctcaatcgtgatacattgaccggccttaaggtcatagcccctagaatacccggcacagtcgtggacatctaatccgatgtagtggcccaagtggtgtggaaaaagagtcctcaatgcctggttgcggtcagcgccgacggtcaagccacattacgtacggttgacatacatctcccgagagatcaaagcccagctgtgtcaattgatctttcaatccattttcagcgataccatgtaagcggtcaagcgagaggccagcgctctccctgcaaagggagacgcagctgcgatgcacgttcaacaccgcattatagaggtcgcgctgcggatccgagaacttgccgtttactggccaagtccgggtaatgtctgaaatataagtgcccaattcctgcagcaattagcaaaatccaagtttttgaacccaaggagacatacaccgcctccgtcaacaaggaccatatctccgtcccttcgatgagttagcaggcaccctaacaatgacgctcattactcttacttgaaaatgtcatcattcttcgtatagtgaatacttagagcattctatctttgttagtaaatcatcttcccttttcggggaataaacctaccgagccagcggcaacaacgggaacgaaagcactgccatcacagccattgagcttgaagttatattccagaaaggatgataggtccttttctcctgtgaacgagtgcctcatggcctcggtgaatgcccgcccagatgcctggccgactcgccgcagctgtacaacctcctcttcacttttgaacgctctcatttcattgaggatgggcgccagcggtttactttgctgtgatcaaccagcttttgagtttccgagtgccgagggccgatagaagcgtgcatgaccacgtcgggatgaagctggatatccggagatttcgccgtcgcagacttaggagattcgtgaacctcatatcgcgctcaacacggtgatatgcatact

SEQ ID NO: 9518 - DNA, 871 bp, Emericella nidulans
gagaagagagaagagagataagggttggggtctgttgcggacaaggcagggactgcgcggaggtggacatcgacgcgggtgcctgggttgacgccgccgacgagagcttctctgagaatcctgttcttggaccccttgtaatcgccgaattgaagtagacggcgccagtcctcgggctcgtgtggccggtcctccgctgtgttccagggactagtcttgaggcttttcatccctcggtatcgagccaagcgttcgcgcgcgaggacgttggggtgaagctcaatctcgtcagggaattctaggtcatctttcgcttcattcctacggctggctctgtactcttccagttgctgtgcttcatcctctggtgacgggtcgaggaacatctctgactgagggtattcagaaggtccgccttctgtcatggcgtcgtggttatcggggaatacgccgtcttcgggagcaccggagacgtccatttgcatatcctcctcatcgtcatcgtccataacgtcagatccagagtccgatacatcatccaagaaccagtgggattggtactcagaggtaccttttggcagccttttcggtttggccgggatgtggtcgtcgtcgtcggaaaagtagtggtgatcatcaagaagcacacccttcctatctgtgtctggcatggactcaatatcatcttccatttcgatttcctctggagcaactgtagccaggtcatcacgatccgcagatggactgtccagtaactgaggcgcttcgctttcatctacgttcattgcatcgtcgcgcttggatcgcgcagtaggtagcggagcaccggtgatagaatcgatctggaaatcgccccagccagtgacgtgca

SEQ ID NO: 9519 - DNA, 588 bp, Emericella nidulans
caaagcaaaccaatagaacccagtctcaactcatcccaatatcaaccctgatctagggtcttggagtcagtccgcactgctcccgtccaacctgcgtccaagtgatgtcaacgcggcccaattcggcggcgcggccacctgtgaggaggtccatggcctgctgtccgacgttgaagccgccaggagcagtgtcgatggcagtcattataatcgagttggtctggccagttgcagaggtgtaagtgatctggtagcacgagccacagttggggctgttccagccgggaatggttggtgcgccgccaatacgtgcgaatgtaggcagagagccaaaagtcgtgtacccttcagtgatgaggccgtaatcgccgtccgagcaggcaacagtagtcagagaggtgtcggcaacgtcgtacttggtgtcgtaggaaagagtagatgtgccggaagtctggcgggcgacgagcgggtttgagggagctgcgagggccgcagcagcaaacgcggggaggagggttgcaagcttcatcttgtggtcttgagagctggtttgagcgttgaaagcagatgacgagatttgagatatgg

SEQ ID NO: 9520 - DNA, 355 bp, Emericella nidulans
  unsure (1)..(355): unsure at all n locations
agatcgaatgacaccaaccacggttaaatgccagcttgctgctggaangatgaaagntggntanaatatggaaatagctggaggaggctactagaangctaagaccatgaccgaggnaatcactaagattgagaaggggattcgccctggccgaggtattaacgtaaccatgatctacgctaatccgngtgnaacgggttgcnaaataaacgtcatcggaacccttagggnagaccgagtccgcattgagcgtcttactattggcgcaggtgtcnagtccactcgaagtggnnaacgagtcnattgaaactgtcggtatcaagccacactctgcttcaagnatgggtaagtggat

SEQ ID NO: 9521 - DNA, 751 bp, Emericella nidulans
agtctatcgataaccactactatatggggagccaagcttaggatcacaagggtttagaaggcgaaaacccacttttcctcaacaggcaatcaactcccccactccgctctcatcacttttcttctatcatcatctccaacttccagccctctatcccccccttgtcagtccaggtccgaaagagcaacaatggcagacaaaaagccctcagagtatgtcctcatcgatttctctccagccaactcaaatcgcaaccgccgcagagctaacatactgaaagcccaacacaaacaaacccgcggggcattcctgtggctcccttcgtcgacaacgtctccgactatgtctcctcccgcgcagacgtcgaaccgacgatgcgctcatttcaagaaatgatttcaaagtaccaattcatggaagtcaacacctcgcggcgcgctgccgggctgcgcgagaagatccccgatattaagaaaacgctggagatggtcacgttcttgaaggcgcggaaagaaagttcgtctgcgacaccgctcgagacaaatttcgagctgaacgatacgctctatgcgcgtgcgaccgtcgaccccgcacatacggaagaggtgtatctttggctaggagctaatgttatgctggcttatccgattgcggaggcgcaggcaatgttggaggacaagttggcggctgcggcgaagtctagcaaactgtgatgaagatttagagtttctgagggagcagattacggttt

SEQ ID NO: 9522 - DNA, 1437 bp, Emericella nidulans
  unsure (1)..(1437): unsure at all n locations
cggtacactttaccatgtctctaacatgaaagtctcacgtatgaaggctgccgcttacgtcggctctccctcggcctacacctacacctcggtccccgagttcgaaatcgaagtctcccccaacaagacgatcatagcacgcggcacaatcgagcagatccgcgagcaggccctggcgcacaaccccaattgggatgaggagtactacgctcccgcccagaagctcgctgaagagcgataccaactcgttccagctggcgcagacgccaactcgacagggtcaacccccagccttgagaaacgccgcgccgaggactttgacagtcttcgtatcacttgtggcaggccatggcatgctgtctcatacgagggtgcgctgaaggaggcgcttcgtttgtatggtgtcaagggcacgccacaaaatggtcccgggccgggtaactgtgggcgtgtaggctgctcgtacgggacggcgataatttggtgtaatgatgtaagcactctctcagtcttgccagaatggtcagaagttggtgctaatgaatcatctaggacacggagacgaagacgctcagcagctttgatgagattgcggatggggcgtttgctatcatgcagaagtgcgcccatgacaagcatggtgagggtaccaaggtgagcgggcaggcattcaacaaggcgaactggaacgttattctgcgtggggaggattgttagtgctgtcatttcagtgtggttttctacagcatgtatagttgggagtacctaagcctctattttattgcaggctcagagtacaggatcgactgctccagatgcagctacactaaattaagaaaaaatgactcacattctagtatactatattctggcattctgtgcaatatcattagtatcaaccagcaatcagctctcagatacatgttctattccctagatagttcaaatcgtccaatccgcgtccccatctgatactgcttcccctcctccataccattactgaagttcaactggtcctcaaagataagaaccacatcggaacctccaaagtggaagtaacccagctcctcacccttgtgcatttcggtcccgacctctaccgtaaggataacggacggtagaatcgcggtcgaaactggcacaacccgtaccaagccgaagcccggtgttataacaaccagccccctagattggcaaaagtacgacccagnttcgtaataccagtaagttatttgcggtagacccgtcggatcgccagcgaggggacttgatctgattgagttttgacatgatcggtgtgatccagaccttccacacagggcttcacgcataatgcttccattaacgcacggaccaatccgttcaaaactcctaaagaagcctaacattttatgcccaaaaccttattccctgtcccgcggacatctcttcaattaa

SEQ ID NO: 9523 - DNA, 963 bp, Emericella nidulans
cgctatctcctcggaacagggaatctcgcaagagactgaaacgggaaagtctttgaccgatgatgcgataggcctgtccgtagctgtggggttgaagatcgatgatgtagtcacccatgggtcgcggtcttggccaatctaatcctgcgctcagatcggaaatgggttcggagtcaccgttggtctcgcttcaaggcgccctaaagacagagactgttcataatatttgcttggaagtatgtacagctctcttggttaccttctaccattgaaaatactctttaccaaagaactagcttcccccctttaaaaaaaaaaccgaatcatatagacaaaacgccaagtctgggggccagcccagccgagccgagcccagcccgactcaattcatactccgtagaaaatagctaggatatcgcaattggggtatctgacaggcaacatgtagagagaggctttcaagcagaaccaagcaaatccttacaaactgggcatctgtactgacattgcgcatgggactgaacccgaagatactcgaaccatgatgctaaacatgccgtatggaagacgtggttgcatcgcgtgaggatcagcacgcctcggtggccgagcgagcccgaggcattggtacttgcgttcgtgtgcgatcttgtttcgcaactaggacctcgactgagatgtaggttccaaagcgaccgggacccgggccggttactctcgtcgtcattgtttgctgatggtatgcagggttcggaatgtgaatgcggatgtcctatgtgtgctgtttcggggggacttggacgaggagctatatgttgctgacattgtggtagggtttgcacagtggagctggacatggatatggatgccgacgcagctaaggtggacggtgcgagtaaagacgtgagacagatggggctagaagggagcatcagcgtcagcgtcatctagttagcaagcaaa

SEQ ID NO: 9524 - DNA, 183 bp, Emericella nidulans
  unsure (1)..(183): unsure at all n locations
aaggacaancantncaacagaacaangtaagcagccgatgcaaaaatatgtaagnagnaatgacgctgaagaacgcgacagttncggactaggcagtagtgncggncatgacntcangaatagagnaacgattnncaagggaacagtcgngtagcgctaatgcaaacaagagtagagaaagca

SEQ ID NO: 9525 - DNA, 533 bp, Emericella nidulans
ctgttgcccaggctcaggtcggacagcgataccggagacctctcttccatgcagctcatgcagcgagatgggcatctaacgtctattttctgacccgtctggcactcctgctcagctcagcgcgccaatcatggccgatgtggttaatgctcactattgaatggatctcagctcgtacgtctcgtcgccaattccgcttattcccgctggttctcgtgccctgctaacccggacaaagatggctcgcgtcaaacctatctctcagccatcgctgccgggtacaaggcacagtcaccccgagcccgactgcggctagaggagaccagcgctgagaatcttccctcagtcgacgtttttatcccgacctgcggcgagcctctcgacgtagtcctcgacactatccgcgcagttgcacattggactaccctacttcccgcttccgcgtcctggtattggacgacgcgggctcagcgacactcaagaagtcgatcgaggagctccgcctgacgagctacgctaacgtgtcctataac

SEQ ID NO: 9526 - DNA, 710 bp, Emericella nidulans
ggtctcagctatctctgtgccgtttagggacgtagagatccgcacaaaatatctctcaccatcccccttctttccagccagagccacgacgcccctgagcactcctccgtcaatatcgtcccctctcagcagagttccaccactcgaatccgcgatccgcgtcttcggcacaacctccacccagacgttctgccagatcccgctcgtcggtgtatagaatatgctctcgggtacaggaccccagtactgcttccccctcggctgcgtcaggtccgtcggcgagtctcgcacacgcacggtcacccgcacggtatctttccgttgtccggcggatatgaatgcatcggtaatgtctacatcgaacgggacgtacccgcctctgtgcgaagcatactgaatcccatcaacccacaccgcagactcgtagtcgactgcgccgaagcgcaggaggaccctggcgtccgcggcagtttgactcgagggccggatgtcgggcaccgtgcgctcgtaccagatgacctcgtgggcttcctggaggttgatccctgaagccggtgcttggaatgcgtagggaacagtgatctgggtccttttatggccgtctgcctcttcggggagaccggtggtctgccattcttgcgagaggccagcgttggagtcgtcgaagaggaaggaccatgggccgttgagggaggtccaggtaatgttcc

SEQ ID NO: 9527 - DNA, 258 bp, Emericella nidulans
  unsure (1)..(258): unsure at all n locations
agagagaatattcgctagagacaattaagcaacgtatgaataatagagtgcngctatcctacctctgtccagaggccctaatgtancttcgagactacacagaagacttcattataatggcgcnatctgccggattcgcccgccggtacccaggagtacgagcagacgttannatgcgaanctgggaccaatggcgaacaaggtaacacgtactattgaaccataatcatanancataangttcncatgtaaaaggaa

SEQ ID NO: 9528 - DNA, 760 bp, Emericella nidulans
tgcatcgtttgcacggacagctcaagagcttagtacaatgaacatgatattacgtcaatttcacaaggtgattacaggagtatagagatagaaatgtcggaaaacgcaggaacgcaacgcctatcactccttccgcgattgcattccaaaaattttccgaaaatcaaaactgtctggttgatgcctcgaatgaactatgtagaagacgctaagccctacttgccgcggatcagggcttcagctatgcaaccatgcttactaacatttgaactgcttgtggtggaaacaggaatgtactctatttatttgtgttgtgagtcagggcatgacatgtgtgtcatttgtgggctcctgcttataagcaataacctatccatagtattgtatttgtactccagaaagtcttcgtagcgctttcctggtggaattttattcgacaggtctattgatacggatcagttcaattttgctaatgttgaatatagccctcccgacgaattaatattgggcaggtgaagtagatatgacgggaatctaagcagctgtggttgtttggacaaccatgcgaaggcccgctggcgaagaacaaaccagatcaagataacaatcacgctgcaataggtgattaggttctgtaacaaatatcagacatatggatatcatatagcaataggttaggaactgtcagtcggttccatatgggagacaatgagaatcttacttttacgggcaatatgcagtaagtttgtctgatatattg

SEQ ID NO: 9529 - DNA, 361 bp, Emericella nidulans
  unsure (1)..(361): unsure at all n locations
agagtgaagaagttgatagagagataggacgatgataaccacaagaatgtcggggatcagaggtggaaacgagtgcatcagcagcggcgaacatatcgaggagaggtctacagacttgggctttgccaagaagcttcagagcatagtagttgggatggtctactcagagggtgtcatgtcctcagggcaatatggcatctgagagtgtcccgcgcatggtgtagtggtacaatggtctgattatcagatgtgagtggtcctggggtctcgggacttgcaattgtctgaggggatatgagttgccgataataatggaanaactggagccgaattgatgcagagaagtgcgggaggagtgata

SEQ ID NO: 9530 - DNA, 968 bp, Emericella nidulans
ccactcgcccggtttgtgctgcacgtgcccaccccatctatagcagctacggagtacagagttacaagagatatctatcttatttttttttcttgaatgccgatgaatgaggctagtttcatggattgagtcagtctctatctttgtacggttgctgagatcgtggcaatattgtggggtgcccaagaacgtcaatgctgatacttactacaacatacctggaactaaggacctcatcttgaaataatctagcagatctctctatccatatccaaaatctaaagccacaagagcatagccatgccttcatcctcagagaaaccccaagactcttccataccccaccatgattcccagagagataaaaagttggcaagtttacccagctgcaatatccaactaacgtcctactaacgtagacttaggcgagtctccgcgcatcagtaacagcccttgaatcccaatgcgctcaactcgaagctcaaattgccgacatacgggctggattgaagtaaggcacgccttcagcttggttttctcgttcctctctgctgttaaagaacacacctactaagctacgtcaagggatgacccatctaaaacggtaaaacggcatattcggctactgcacgagtataacgagatcaaagatattgggcagggcttgatgggtctcattgctgatgcacgcggggtgaggcaggttgaagtgcaaaaagagtttgggctgggtatgaaagattgagcttttcaggtggatggatagcttgtaatgatggattatgacaaatgcaggagttgtggagtatggagtggtttgtctgctttttcttttcatctcatctataaggtacataggtagaggagagtgtctgctatgagacgagaagtctaataaaaagaaaataaaaagaagtagaaataaaagaaataaaagaaaaagaaaaaccaataactaggcttaacga

SEQ ID NO: 9531 - DNA, 460 bp, Emericella nidulans
acctggtgaatttttggacggaaccgggggcgggctccctggaccaaaaggacataaggagcaaccccggttccggagaaacattcttctttcgaccagctgtcagcctcgaaagaatgggggcggcggggtcttcggtcgcaagcgcggccactggctcctgggaaagaagggggaggaggccagatttccaaagtaggaagataagagcaaagggactaaggaaggacgcggacggcatgatgcaagagaaaagacagatgagggcaagaaggtaagaataatggaagggttaatatggacacacatcgaatctaaggacaatgcgagaaaataaacaactggggcaaggcaggttagcttaaaggggagacgtggaagaacggtaaaaaagaaaaatgacgaattcaagatgatgattgacggttatgatcgctaacgtgactcgcctaaagaaact

SEQ ID NO: 9532 - DNA, 531 bp, Emericella nidulans
  unsure (1)..(531): unsure at all n locations
gttanaacaaccaaagagagaccgacgaccagggggggggaacgggaccacagcgggggggcgccctatacacggacaaagacgcggagggggacaacaaagaccaagagcgcggcagagagaaaagccgaaacgcaaggacatacacacggcgagacagagggccgcacaaagcgaaaggagcgggctgactaaggcgcgagaggagcgaaaacaaaggggacggagagacagacagaaacccaccatgcaaaagacaggcagccatcggagaggaggacaacagaacaacgagaggggaggagggaaaacggaaccagaaacgcgatgagcacggcacagggaagaagagcagcaaaggaaagaacaacagcgaggaaagacggagaagcgaagacaagggcggagcgaacatgggaaacggaaaagggcgagaaagccggaaaaaaaaggaggaacgaaaggcaaccgagaagaaagggacaaaaaaaggcgggaaaaaggaggaaagaaaagggagggacaaaagaa

SEQ ID NO: 9533 - DNA, 1580 bp, Emericella nidulans
accgcgtaggggcctttttcagggctgcgcacaacaaggaccggggaaggatccaagcataaataggcaggtttggaacctcgtaattcgccatgtttgggctcacacttagtgacacgtcgaggtgaccatgtcaaaggtctgcccgacaaggtacacgtacacgcagggctaagtagccggccgctcgtgcccagctgcccattaatcgcctcccattggacattatccaggccaggtggatcactccatagtactccggggtgggtataagcaaagaggattagttcacgccgccaattacgagtatctgactcgaatattgttccgttattcgttccccccttggaggctaagaggctgagaggccgggaagatcggcttgcaagcttgacagcagcccagataagcttcttctgcgctcgattccttattcccacttcactattacaggaagatgaaaggagagaccacaaaaccgtctaatcgcaagagagcctatgctccgaaatcaagaacagggtgtcgcacctgccggcagggaaactacgcccgctctacctgcttcgataatgattacagccatctctaatgaacgacaagggtgcgccatatccggtgcgacgagtcccccgggggtcagtgccagaactgcctctctgcgggctggcagtgagggctacaacgacattgaccggctgccggggcctaggcaacttccctgcgcgtactctaatacctgtatacgggatatcggcacaagggtcaaggccgcgtggcccatgaccgccgacgagcagcggccttttgcctactttcaacagcatcctatcgtcagcctgacggcccttttcgaattgccgctatggcaaaggcacgccctgcaaatgtgccatgccgaccaagccatcttccacgccgtcaccatgctcagcgcagcgcatcagagctccgagctgaaacatatgcagagagtacaaggtacctcagtccaccgcgcctactgcttctcgctgcagcagtcgtcgcgcgctatgagattgctaagtcagcgactggcctcgcaggaccccgaactccgccacgtagtcctgctctgctccttgctcttcggcttatcggacgttctcctcgacaggcacgagagcgcctggacgcatttcctctcgggcctacgcatcctcaaagagatcgaacaccatccatatctcatctccaaggccgagccatccctagttgctgtataccgccggataagcctgcaggcagccctatacagcaccaaaatctcgtgggcagatgtccctccatcaccggtaccaacatacgttcctccaccaccgcctgacgatgctcttaaggcctctgtctgtcccttcagtagcctcgcccagatgcaatctgtccttctcaggctactggacaccaagaatcccgtgatcgcaacgggcctggggctttctggctacgactttgtcgccactacaattccttgtatatcgggcaatccccgcttctttgcaaattcgcttcattcgttcaaaaattatttttttctggaatcggactcacccaccctt

SEQ ID NO: 9534 - DNA, 708 bp, Emericella nidulans
gacaatagtttgaaaagaggaccagacgatcgactgcttctttccgcaaggatcttcagctgtgacttcgtgctcttatgcttagagctcatgtggtcctcataatcatctctagtatgaaacactattacgccgtgggatttcgctgtacagcgccatcgtaagctgtggtgacgcatatggttcaaccagtcctcactgtggttatacagctcgttgggagagtcacattcatcaaaaaggcacacatatggatcgaggtcgtacttgacatggtcactgcataggatgagtagtgctctggcggccacacaacaggagcaagtatatgtcccctggaaaccaaaacaggtgtggaaacctacatccatttaagcttgttggtgacgattgagctcgataaagagcagcaacagtaaggacagacaacttccatacttccattgttgcatgcgattcggtcattttcaattttcctctcgagttcctcttccaaaaatgacttgctgtctatttgcattgaagatgctgaggaagacccgtgaaaaagtatagcgttcaggtcatggttgaaagcgcatccttagtgaatcgttagcacagtaaactaggcgtagatctaacgtttgtgggcgggctcggggcacctttgtcttcatagggacacggccatagatacttatatactggcaaaggggttttgttagt

SEQ ID NO: 9535 - DNA, 603 bp, Emericella nidulans
gatgtttggatagagctatgagtccagagaagcgcagtggctctacgcatctcatttctcttatgttaatttgtatgtgttatgcttcgactcacctctttatatgtaaggttgggcttggtttcaagcaagtagtactggccaggacggaatcagagattttcaagggacctggtgtcttttattatgtaataactagtaatggttcgattcttcttcagcatgtaatgcctgtatgtttctcgaaagtgctccgcagcacagagctgtctcatagttgttgtcgctgtgaggggtgaaatgaaagaactagcaacctttattgcctgaggccacatgcacgaaccaacccaacccacttgcgaccaaaaccaggccgcccataattttcccctccttctctccctcctcagtgatacccacctcatagaatcttctgtcttttaagaatatccattctcaggtaaacgttgcggacatattatatccgagtaattcaactcaccagaaacgcagtaatccaagcccatcttcaacatgtctgacgtcgctgagaccaagcccgaccccgccaccaaggctcaagaggagacaagcccgaag

SEQ ID NO: 9536 - DNA, 205 bp, Emericella nidulans
aagaactggagaccatggcatctatggaagcgccaatggctcatgcattgatagacgtgcttgcgccgtcgaatccggtgatcgggatagtcacgctctactacgtgcgggacgcgagagactcggtctcgtgctaatgcgagcaggctcgtcgcgcctgcactcggcctgctagaagctcctacgctggtttctgagggagctc

SEQ ID NO: 9537 - DNA, 547 bp, Emericella nidulans
  unsure (1)..(547): unsure at all n locations
gcagaaaagaggggaccccgggtctgaggaaaacggtcnaaaacccaaagagacagcggagaccgggggtggatgtagaaaggaaaggaggaggggccccccgaacaaaaagagagaaaaagagaggacgaaagcgaaagacgaaagacgaggacagccggagaaaagggaagaaaaccgagaagggagacaaagagagaaaaggggcaaaaggaagagagaacagaagaaaaaagcggccaacagaaagaggaggagagagagaaaacgaggggacaaggagaagaggagaaagcgcagggaaaaaggagaaaagacggagggggcgggagggaaagagaaaagagagaagaaggcagaaaagaagaaatggcagaacgaaaagaggacaaaaggaaaagagacaggagaaaggcaggcagcaaaagggaaaaagaagaagaaaagggggcagtgagaaaaaggaaacaggagagggggaagaaaggcaaaaacgaaaaatggaggggaaaaaaaagaatcaaggggaaagaaaagcccaaaaaaa

SEQ ID NO: 9538 - DNA, 1316 bp, Emericella nidulans
gggccatttcccatgttgagtaaacgcaccaatatgcaagactgcaacttatctctgcataagcataatacgacgacgtttggggaggtgtcgtgaaaccatcctttgatggatatttagagaagataagcaaccatttcgtcgcgctacccgcctgttgctcaccgaagatggctcccattgtgtaagttggcaaaacggagttcaccacgaagcttggtttcttttcctggctgagcttccacatttcctcttcgacttgcgcttcgagagcagaataaatgtcccacccacgttccgcctcgtaagggggtggtctccacgcagccttgatggcctcctcgtcccaagtttccccattgatcggatctctcgagtagtcgaacgattgcttgctgcttgatcattgctggtaagaacgaaacggttgattgaaggcactttgctagcagcctcaagaagtcttcggagagcttctatacttggtgtaatgacttcggtcgggtctggcccaaagctcacgtctcctgcgacatgagcaatgccatcaacatccttgagaacagtgtcccagacgcaggcggtattccgatctagtacaattaaagccgcaaaagctgcagaagggttgcgtttggtaagagcttgcgtcacccaggctgcctttcacttgagcggactgttccgcgcactctgtagccgagctcaagcagcccgttcgcaatgtaggagccaataaacctgtgacctcggtgacaaatatcagacctccaggaggcactatgctggagacgcaatcatatttctgatgatagggttcgaatagcgcagtgggatcgggtagcgttgtgtccgcaagatgtggcagtaaaaaagagtccccctaagaaatatagtgcactgcaatgttgaagtacgaccggcgactcgggtatcacaggcaagctataaatgagacgtgctgtagtcaagaacttactgctagaagattagtgcttttcctcctccacccctttaatcaactagaatccggtttgcgggtaagtacatctgcaatattctttccaccggggagatattgcattgccagtagtatctggcgagcaaattagatagaccaatccggtcacctgtttttctgtgactcacacagctcatcctgtcatcggcctgaacacgtattccaggctgccttctaaaagtgggtatcatttatccgagatatgaacgacacccaatagctctccgctacatcgtgttcatttgtttggtatgagcaagcatggtacatatattccggtcatcgtctctcttgc

SEQ ID NO: 9539 - DNA, 1608 bp, Emericella nidulans
atgcgattgatccaaaatcccgggaacagtttattcctaccggtcaactggagaattccatgcttcaactcttggactccgagttcatcgagcatgacgcattcagtttgttctgctcggtaatgcaaagcaccagagtttactatgaacacaatacgcatcgatccatgaatggacaggctgatgcacttccgattgttcttcgatgtgagcacatccataacgatctacttgtggcgacagacctagagctcgccgaccatctacaagcgctcgaaattttgccgcagatctttttaacgtgagtcttactcttatcatctcatggcgaatacgcttgttgactcgccgtttaagtcgatggatgcgtcttctgtttgggcgcgagtttcccttccaagacatgcttgcgatttgggatcttctcttcgccgaagggctccgatccgagctgattgacttcgtgtgtgtggctatgctactccgagtccgttgggagtgtaagtcctcctgcatctcttccagacctaaaaactcatatgaacagtactgagctctgattcatcgagtgctttaactacattgcttcgttatccctcaccgcaccctcatgctccactgagcttcgttcatgatggtttgtacttggaacagaatcccacggctgagagaggatcatttatcatttccaagtactcggggaagcctcccgagctattgagaatgtccgactcggcacacagattccgcccaggtcggaggttccagttccgcggtgatgttaggggcaacagtgggacaagctcccctacaacatcatcggcaagagacagtccgttgagtatcgaagctctcctacaggacgtgtcagagggcatacagcgacggacagagatatggggtgtggcaaagggctgtacgcggagccgtcagtgaggcgaagaagaatatgcagtcaatgcaatcggagcaagtctcacggctggcgagcacccggaactcggtacccagtacgacttcatatcgggaacccgaggccacaacccaattgaagtccaggattgaaggtatctgggagagaaaccgaggtcttgccaagtcactgggcgaagcagtgaatgaaattcgctcacaattggcggatagtgtgactctgaatgcggatactgcaaagtccgtggaacaagctcttacaaaggttgaatccgtacagactacactcgagacccgctactcggatgcgaatataacgcagaattcccccggcgttgaagaaccaacaaatagaacaaaacagtccgacaactcagcaactgctgatgggggctctacgagcttagaaaacgacaagcctccgcgcgcctcgtttgattccagcgtaatcaacacccctggttccaggtctcccatcgagagcgatactgggcaacgcaacattttatccccaaaacctgtgaacaaggccaggcctctacgaaaccctgcccgaccattgttggcaaactctgaattcgcgtggatgctgggtggcgatcgcaactttctagttttgttagccctgcatcagtccgccagaacagtcgaggcatgttgaccgcgagctaacag

SEQ ID NO: 9540 - DNA, 921 bp, Emericella nidulans
atgcatgcgatcatcccgcgtctcccacaatccctgagccatgtatactcgcacccgcacactggcggccctaaccagcgccagccacgccccaagaccttcaggatgctcttgatacgtaccagcgcacccaggaccgctggtctcgctcgtcgatcgggatcccgctccaccccaaccacgcaatcaggcgccgagccatccataacaaaacaatctctttcgagcccgctgagtctcgggctgcattcaagttcctgaaacaggccggtgtctccctgactgctgcgttcttcgcctcaatgactgccgctattgcacagcggtacccttaccgtgcaccttcactcgcagccgactctgctcctacctctgggccgcagaatgtagagccggagcttgaacccgaaggagcgcacctcctcttctctgcgcacggccggcggtggttggatacctctgcagccaatggccgggggcccgtcacgatgcctatcatcccgtcgagcgcctgggtgtcggccaaggaggtcgatctgtgcccaagaacgcaacagggtctactcaagctcgctgccgccatcgatgtagcgcagaatgaagacatcacctctccgcatattatccccgtcttcgatcagctggcgccagagcttgctaccgctctagccaacgctcatactccccccagtagcccacctcctccgccagggcgaggccgaccaactctcacatcgcagggccagttctcgaacggccgtgaccggcagggggcggtggggattcatggagacgagacagatgcggtccggatgacggacttcaagaccggtggccgaacaacagatcccactgtttgttttgcgctgaatagcttcaagatcagttagatatacatgctcttacgagaagttctttccg

SEQ ID NO: 9541 - DNA, 530 bp, Emericella nidulans
gatacgcgagggccccgatttcgggctcacatcgatgtcaatctccttccctctgtcccggcggcctttgttgaacacagccaacgactgcacgatactgatgtacggcctggtcctacggccccaaaccccacttaaccaatatccagataatgcaatcaagtccattgcagttgccactgtaacctctgatgctctgtatgggcatcgatgacataaccgccagtgtacgtgtttcgactaatatgtagagaataaacgccctggtccaaaggccccagatcaaagtggctcagaacaaacggccagggggcaggggattcaatcctctctggattagaatatgccatctccccagaacacacatataccgcaccctttgctgagccatgcggcggctcgcaaatgaccagtatctttccgtcatcacagatggcaaggaaagggtcataacaatgcgctagtgggaggttgtctgggtcaaaacgatcccactcagcgcagggttagaaggtcaaatgactctgctg

SEQ ID NO: 9542 - DNA, 445 bp, Emericella nidulans
acgaagtcataccaagctgtctatgccatgcatcccagctggaggaagctgctagactaattatacaattataatgatcagccctatgggaaccctcaccttcctgcggtcgccgacatgcacatacagtgacgcggacaccctacactgattgagccccgttcactcctatgactgtaacgaactagctagcgcacacttcctaaggtgcagccactgacacgacagcctgtgtcgcgcagaatcaaccgcctgtaggacactcgagccccgcagcttgccgatcttaggagatccggcgagtctagctagctgcacgaccccgcccagaacacgtagtaggacaggataccgaagggaatcagaatgcagccgactccgtaccgatccgcaaggatttgctcatctccgaacagatggtgcgccgacgcaatggctggcctgc

SEQ ID NO: 9543 - DNA, 1990 bp, Emericella nidulans
atctcccactgaactctaacacggttgctacatttagcttatctactgaactgccgccatcctggtagaggaacagttgtttaaagctacaccagtccttgtgaagctatatgcgctccatggcccctaccaagtccctacactttcgctattaaacactctaattaccactgctgcgttagactctgacaatgagccgccatccctagttggccacttgggagccgaaacctcccgccttttccttgacgttctatcccgattcgacaagcctctcagtgacgcgaatctgcaattatctatatggcgcttactgacgactttagttagcaaacgacaacaatggcttgcggtctatatcctcacaggttcttctccccgtgaatcactgaagaagccggatactggagataaatctgcagttaagggcacaccgttcttacgaatggcgcttgaaatgctctccgccattgagcagatttctccccgagtggccctttcacttctcgacttcgtctctaatgctcaagaacattggccgtgggcaacccccgagctcaggaaacaagccaacttcttcacgagtctcgtgaactatgtctccaagctgaatatattatctctttccagcattgagcaaattttcgccacccggatagctgccgttgttgccgatatttgtgctgtttatttacattcggccaaagaggcgaaggaccagaatttttacaaaacgctgtttccgctggtatcttggtacgcgaaggccgctgttgaagtctctggctataatggctccctacacgccaacctcaagagaaattttgagagcaggtattcggggtgtaaactagacgattttaagaggacgcctctgctgccacggagtcttgggcgagagtattactacgatatccagatgggcaaaaagctcctttcctatgattttgcgtgggaagggtccaagaaccacggatttgctgaggagtttgagcgtgctaatctcaacttgtcgcttgttgaagcccaagtggtatgtacaagactctcgatttactggataagatctaacagagtcccttcgacagagccttttgcacagttggaaattccttgccattgagcattgcgcggacttcatctctgagagcgaaatccaaaagacgatagcatttgttgtcaagagctgcttagaggcaaatatgaatggagtcccgcaggaggccatcttcgagcgaattcagcaaacacgggtcgatttcgcacagaatctcctgcaacgcctcgtagaaaaaggatctaagggcgttgaattctccagccttcttcaggtggtttgggagtcattacgaagtcgccggcccacctatgaagatgcattgatcaacgatgattccgaatactaccggtcgcttttgaacacccttttcttggccttacagttccatcttgatggcggcgcgaaagcagcgcgcgaactctataactccaaggcggacccaacaccggacctggtcattgttgttgaaattgtgaagactgtggtagcacaaggtttcaggtcactgacctcataccttcacgagcagccagagaagtgcacaccaaaagactttgccatcataaccgcaattttgcaaagctcactccaagtgaaggatatcgatcggatgtacgagcacattgtataccacattgccgacaatgatacagtgcgacatgccacttcattattctcttgggcagatcagttagccgttgcaggtgaccccgtctacggagaactaagtatttcttttctagacaaactatccaccatacctatgctagccgagcaccttgcagtggagtcagtcctggcccaactgtcaaactgccgcttaacgaacgtgctccggcaacccaaaggatttggtccgttcgacccgattccgaggatatacgcaatgtggactggcggcattctccccttatgcttgaacctcctata

SEQ ID NO: 9544 - DNA, 315 bp, Emericella nidulans
  unsure (1)..(315): unsure at all n locations
tgcatattaatatttgatgagtggttgaaggcttattcactcgaaaatgtaaggggacttgcattgggtgtcgcgagagcaggttatgnaaaggtatatatatatacttgagacagtactagtaaanagatgtattcaaggatcactacgttgtataggagtacagggacnatctgnaggacaaatatgcccaaaggggcatntacgtggggtatgtgatagangcctaggnagagattaanaaagttttgggatatagtcagttgcaataatgcaagtggtgctgagcgcatgaaggncanctgaanccaggag

SEQ ID NO: 9545 - DNA, 296 bp, Emericella nidulans
cgactcgggattccgctctcgttcgttatgtgcttatgctctaccggataggacccattgtccgcattgctcccgatgaacttatcacccgcgacccagccgcagtgaagacgctctatggggtcaagtccgggaccctcaaggtatgctgttctatcggatgtacgctatggttcgatatctgaacggacacagaccgacttctacctcgcgttcaggtcaccgttgggtaagtcagcgtctagaccgcagcacttgacgctgctgaagtaggaagctcgctacgttcagcccgg

SEQ ID NO: 9546 - DNA, 576 bp, Emericella nidulans
  unsure (1)..(576): unsure at all n locations
ggaaaaagtaccggacaagccccgggcgcgcagaacagtggaacccccgggttgaggaaaacggataaaccccccgagaccgngcaccacgagcgggggggagaacaaagccggacgcgcccacaactcaccgggagcaaggcggccgccaaccaccaccggccacaccccaccgacgagaaacacacatgacgtcacgaccaaagcaacacaacacacgcacgcggagaaaacaagagaaacgcaagcaacaacacagaagacacgggacagcccacgaaaccaagagcacccaccggccacgaccgaggcggcaaacccggccggaacgggcagcggacagacaacaggcagacggacggaaccacgagcacggcgaggaggcagaagggccagacacgaaaaagagccggccggcacggcagagcgaagaacccgcaggggacacgccaacgaaaaaccaggcgaagagggcccggagaaaaggcgagccccgagaggcaaacacatgcgcagggaccccgcaacgcgaacacaccgaaaaggcaggggggcgacgaaaaaaaaaccacgcgc

SEQ ID NO: 9547 - DNA, 1333 bp, Emericella nidulans
gaacgtgatcgtgggctgaagctttgcggcgtttgacgaggcggggcgatgccatatcatgggcatggttatatgcgtgaggaaccgcagatgcacctaaggttcaccatgagccagggtgacaaggtatgtgagactggtatctttgcagtacatacgacgtagtattggcttgtgatatcctatcctcggtcctaatatctcgcggaacctttcacgaacgtcgggtgtgatgacagagcagttctgctcccggatcgatgtggactctacaacttcgattttccccatgttgtcgtagtagatcaaggcataatgttcgaatggaaggctcggagttgtacggagcgaagcccccatttgctgtcatgccaccattagcacaaagtccttactaacgtcttatcgtcttcactaaccgcagggctggaccagccagtacaaccatcttgcatagtcgacagaggccgcttgactcctcctgaaagtgccgatgccgagaccggtgtattgacaaccatggcgctgtcaatagaacccaacgctaatcaaaggctaggagtgcaggttgggtaaagatgatccgtggtcaaagacagtcacagatctatctaactctgaagcataagaatgatccaagagcggatagtagcggtgcgtggtgggcgagcctatgtttttgtactagttccgacgaagtcaagtgtactttggtcgactggatgaacctggccgagggaacgagtgtttgactgtccgctgcaattctaccgaactggcaagaagaatccaagtcagcagccggtctagccttgtgacggacgcataagtgcatctctaccaggcaaacagaatggcagaaaacagggcagcgcgggcatcattgcagaccaacgggcagagccgtctaccgagagcagaagccagagcagccgctaaccagccgcgcgtagtcaaacagagacgatggtctggggctgaaagtgacaataaagaagaaggcggttgcttaccaggactcggactcaaggggtgtgcccgcagcggagcggacggccagcggttcgagcggcggggtgaactgaagagaaactgcaggccgcgctgtcggtatccgagtgtcacagcctgacgtgcgttccggtactggatttggaagtcgaagcctttgtcgacagagccggcgggggaagtaaacaggaccggtcacacggcaggatgtacacagtgttcctcatcctgggcctgtatgtgtaccgcacagtatacggtcctggataatggataagaaagcgtagtatccggcggaatgctgtagagtgtccgtccggct

SEQ ID NO: 9548 - DNA, 1449 bp, Emericella nidulans
gctatcatcctctccactgacttttagggtctaatggctggagactggttgttcgcggcaggggctttgtttgaggttctgctatccagagcttttggagtggtcttgtctttggtcgaggccaagcaccggtcgagctcatccaataaatctccaatatgatcaggctctgcaataaccccgttgccaagtcccctccagccggtgcctttcgagttatatagcctctcctgaagtttgtgtttgaattctggttcacaggaaccatcttgaaagctcaacacatctctgagaacccagacgggttgattttggtgttggtgggctactagtcggagccggcatttctcgtaggggtaatggatttggaaggacgttgcattacgcacagtaacgtgcactatagatgactcattgcgagaggggttcgccatgaatcgatccagtgcttgcatcaagggaagtgtgaatgatagtatctctgtcagtgtgtccagacctgcttcagcggtaggccggttcaggttggaagccaaaggcccttgtattctgcgatgggggttagagtgatcaaaacttatgctgagacgataatggaataaatgacccgttctgaacgcgagcttcagaggatccatttccgtgggaagttggggctgtgtctccccgatatcgagttgcgcaaggagctctttattcggtccataggcgaaaccaaggcgcgacaacgatagaaaacgcgcgtccatcttcttccgccgaaggatttcgtatactgataacacacattcaagtctttgcagtgattcaagaagggcgacaacgactggatagccaggggaggctagcagacgaagcgcgaaaccggtgcctgttttttgaaggaccaacgagtgatcgtcttcggcgactaaatcacccagcgcaggaaaagaagtggacaaattgccgtaggcgaccattatggcgactttcctgcaccggtcgatgccgtgaaaagccaggcgaattgtctttttgacgaatgtcttcctcttaaaaccggcgggaagagctactcgcagagcctccggtaactttgtcgcttcgtactcaatgttgaggtctggcacttgaaggccaggcccgattcttaagtgttccagatgcggccagattttgataaactgcagatcttgcagaaagcgcgcatttgcatatatggccaagaagcctgacaagcaatgacccaaatcggcaagtgatgagtagtctggttgctccgcgggtagtagcaagttgcaaatgacctgcgcagagcgaacagcagagctggcatgatgcacggcagcatccaagctacgattgatccgtacagaattcgccacggagttggacaaccaacatttatctcttcatactactcgtgcggagcaaccggacgctcccatgatgtgccaaagacgagac

SEQ ID NO: 9549 - DNA, 774 bp, Emericella nidulans
ccgattgctggggcaaaggcgggtcacacctcccatctcagccacgccatgttatagcccgcgtcaggacgagatccctgatgagagccctcacaatccagaggatattggcgcctcctcgcccttcgactcgttcctccagcaggagcagtcgtctttcggttttgatcctgccctcaccgtcactcaaagaggtatacagcctgaaagacagctgtcgcaaagcgagaggctcagtcgggcgcggaggttccagcctcaaagaacttcaagtctccggaacatactcccgcaagatgatgacgagctggtgagcggcgtgagccagttgggattcagtcccgactccagaagaagtcacatccggcgagctgttccgacagtgctgtcacgcgaaggtctttccgggagcccgaacggcgaccgtcctacgtccctcacaactgtatcgaccatgtcgcctgttattgatgaggttcaaacccctccagaagcctctcggggcatgctttcgccgatttgcatgtcgtcacctacgcagacataccactcacccgaagaccgcagtgcctcctggtccggagggtctgccgttccttttggcagcaagctcagccgctatcgaagtggtacaacacgctcgcggcgatcgacggcctcgagtgggaagtcaccagcgagcgcgttcctttccatgtggagtacgcgggaggaaccagcgcccaaacctgacgatgagggtcaaatggttgggactgaatatgttcttgggaa

SEQ ID NO: 9550 - DNA, 385 bp, Emericella nidulans
  unsure (1)..(385): unsure at all n locations
gaatactgaaaataggagtctttgtaggtcgtcggtagtagtaacacaatttcagtgaaaaaaggaaactagtgaaacttgaaaggaactggatgcgatgtgctccatgagtagcggagtcgggnaacgtctttttgatgtcaattctgaaagaaaatggatcgggctcgaaaattaaaaggaccacattaaggattttagatcgtaganagcgtagacagaggtagnnagcagtgnagctgctttaatgatagggagcaacgaaanntgngtggtttaggctgcttaagcgtggttagcgtggtttgggtggtttcgaggangtgctngtttaagttggtttctgttcgctgttgggtcgtgttgttgtgttggtgttgtgttt

SEQ ID NO: 9551 - DNA, 982 bp, Emericella nidulans
aaccaatccgaatagaagcgtccgcaccgctttcgttcttggcactttcctgggtggctcgtaattcctcctcaatctcctcacggagctttttgcgaatctcctcatcgcgctcccgctgtttcttgctcgaggatttaaaatctggggtctctccagcatcggagtcgacagaagctgcgtcttgctctccctgccgcaggtcatctgtttgtacccccttgttgtaggtgacgacttctggtttggcttcaggggccggctggagttcagggatggcgacgaagggctcagttccaacagtctgcactgcaatggactgtgaaagtggtcgcgtgggcgggcttagtgcttctgtgttgtccccgctgagctggctggcactcagcaccgaattcggccggcttcctttccttgaaaggccatctgcaccgctcaccgcggccgaaccaggacggtcaacgagacgggaaatcaggtcatcaagctcagctctactgtcggaacggctaggtactggcgacacgacctagaacagtcagtatgaatattcagcccgtagactgagactggcgcaacagtgcttacctctgaagcatctcctgtacttgcccgagactgagagaactccttttgacgtaactccctctggcgttttagctctgccaacttagcttttttggcgagtatctcagccttccgttgttgattggcggccgacgacatgacggtggacagagaaggcgtgttcttccctgggaatattatttacttggggagtatacactgcgtgaatggaagcgtggactggatgaggatgacataagcgcaggtccgacgggtccggaaaaactcgcgacaggaacttcgtcttgttcggtcaccagcatccgaacctcctctgccggcttgccattatcgatcactttgtccgggtccaggcctttctgcttctccagtcccttatatttctgcaattgtt

SEQ ID NO: 9552 - DNA, 1015 bp, Emericella nidulans
tcaagccttcttggaagcaccggctcctacttcgaactgattgaccaatggtttttgactgattgtggtcgctcaggttgctgaggcccacgaggtcgacactttccacgttcccaaggcgttcttcgacaagcacccttccggccctcacttgaaaaatctcgatgaatacaagaagctctatgaggagtcgactcgcagcccagacgctttctgggcccgcaaaagtccgcgagctgctcacttttgacaaagatttccaaacgacccgtatcggctcattggagaacggtgacgttgctcggttccctgagggtcggctaaatgcttctttcaactgtgtcgatcgtcacgccatcaagaaccccaacaaggtcgctatcatctacgaagccgactaacccaacgaggctcggacactcacatctagcgagctgctccgcgaagtttctcgggttgcctgggttttgaaacagcgcggcgttaagaagggcgacactgtggctatctaccttcccatgattcctgaggccatcatcgccttccttgcgtgctcgcgtattggtgccgttcactccgttgttttcgccggtttctcgtcagactccctccgtgaccgtgtccttgacgccggttccaaggttgtcatcacaaccgatgagggtaagcgtggcggtaaggtcatcgggaccaagcgcattgtcgatgagggtctcaagcagtgccccgacgtgtcgaccgtgcttgtttacaagcgcaccggcgccgaggtgccctggaccgagggccgtgacatttggtggcacgaggaggttgagaagtaccctgcgtacattgctcctgactctgtcaactccgaggatcctcttttccttctatacacttctggttccaccggtaagcccaagggtgttatgcacactactgccggttacctcctaggcgcggctatgaccggaaaatacgtttttgatatccatgatgatgaccgctacttctgcggtggtgatgtcgg

SEQ ID NO: 9553 - DNA, 1593 bp, Emericella nidulans
gggcatggttgccgttgcattcatgtatgtggagtgcaggatgtgatattgtaatatctgttgagactgactggattggcttagtgagaaactcgtcaagctagattcagagagacgcaagtacgatatcgtcgtgattggagaagagccgcatattgcctacaaccgtgtaggtctgtcgtcgtacttcgagcaccgcaagatcgaagatctatatctgaacccgaaagaatgggtaagtggtccaggggtagtccgggtggtccgggcataatacgggcgtggcccatggctcggagtgtgctcagctgacaatgtgcttgcagtacggctcattcaaggaccgatcgttcgactactacctcaatacccgagtgaccgatgtttttcctcaacacaaaaccgtcaagacctcaaccggtgacattgtttcgtacgatatccttgttctcgctactgggtcagacgccgtgcttcctactagcacgcctggtcatgatgccaaggggatctttgtttatcgtaccatttccgaccttgaacggctcatggagtttgcggccaatcacaagggccaaaccggtgtcacagtgggaggcggtttactcggccttgaagctgccaaggccatgacagatctcgaagactttggcagtgtcaaattaatagaccgcaacaaatgggtgctggccagacagctggatggcgatgccggttcccttgtgactaagaagatcagagacctcggtttgaaggtgctccacgagaaacgggtggctaagattcatactgatgacgacaacaatgtgactggtattctcttcgaggacggccaggagcttgattgttgctgtatctgttttgctgtatgcttccaagactttcatcctgcttgtatggtgctgacttaaccatagattggcattcgaccgcgagacgagctgggaggaagcaccggtattcaatgcgcaaagcgtggcggcttcgtcattgacgaaagcttgcgaacatcggttaatgacatttacgctattggcgagtgtgctagctgggaaaaccagacttttggtatcattgctcctggtattgagatggccgatgtgctatcatttaacttgacaaacccggacaaggaaccgaagagattcaacaggccggacctaagcaccaaactcaagctgttaggagtcgatgttgccagttttggtgactttttcgccgacagagatggaccgaaattccttccagggcaacgacccgtctgccgaatctattggagctgcagaccctaaccgtgaagaagaacctcaggtcaaggccctcacgtatagagatccttttggcggagtctacaagaagtacctgtttaccatggatggaaaataccttcttggcggtatgatgattggcgataccaaggattatgtcaagctgaaccagatggtgaagtcacagaagcctctggaagtaccacccagtgaattcatcttgggtgcccagagcggtggagaagaaaatgcagacgatctgtaagttcgatgtcgagttgcgcaaccgctcgttcgctaacaggtccaaaggtatgaccgaaga

SEQ ID NO: 9554 - DNA, 2336 bp, Emericella nidulans
ttattgcgaagattttagtatctgggctcttctttaatccaaccgagtacagtacaatagaccggtcaaaagggatcacgacagcgctgatggaaaagggtaaaaacctcatcacaccacagcggcaattctccataaggaaatcatcagcacaaccggaaccccagcaagcatcgatcatacgaaccttcacaggcgggctaaaccagctagagcagcagctggctgatgatcctcttcagaagcgccgtatccgtcttgctcaccgcgccttcctacggcactccttcaaccgactggactttgtcgcggtgcttgcatattgggtgagcttcgtcttaaacttaggaggcgtcgagaatacgcaccagctctacgttttccgaatgctcagctgtctgcgtatcctgcgtcttctcgcgttgactagtggaacatctgtaggctatcacgccagcgtcttgcaccttatttactgacttgaatcaaggttatccttcgaagtttgaagaaagctgctcccttgctggtccacgttgcttttctaataggtttcttttggcttttgtttgccattgtagggattcagagtttcaagtcgagtttccggagaacatgcgtctggcttggagaggaatacggcgagcaaaacttcaccatgaatgatccgttcgggacacttcagttctgtggtggctggcttgatgaaacaggcactcagaggccatggtattcttccgatggatttgaaagcgactcgaaacccaaagggtttatttgtcctcaaggatcgatatgtgtcgaaggaggcaatccttacaatacgaccatgagtttcgatgacatcttgcattcgctcgaactcgtatttgtcataatgagctccaacaccttcactgatatcctctataacaccactgacagcgattaccttgtagctgcacttttcttcgcctgcggctttgtgattttgagtttgtggatggtgaatctgttggttgctgttataacccactctttccaggtcattcgtgaagaaagcaagcgaagcgccttttgcatctcaaaagattgaggcgtccgaggaggaggaggagtcttcccgcaaagttagcacgttgaagcgcatctatgacgcgacgtattggttctggattgccgtcatcattttcgaccttgttatgcaagcccagaggagctctagcatgggtgatggtcgggtccagctcattgacaattgcgagattgtcgtcacagttgctttactcggcgagattttactgcgattcatatcggattggcgcaaattccatcagagccgccgcaactgggtcgatttggcacttgcaataatcacctgcatcattcaagttcctgctattaggaactctaaacgaacttatgatatccttaccgtctttcaaatcctccgattctatcgagtcgttctagcatttgccgtcacaaggaatctcatcacgctcgtctttcgcaatgccgttggtctactgaacctgatcctctttgtgtttctcatcacattcctcgcctctatatttgcaacgcaactcttccgcagtcagattccgcgagaggatgacgacggaggtacgattgagatcactttctctgacctatacaactcattccttggaatgtatataatactatccagcgagaactggacagaaaccctttacaacgtcacctcatacacatacagcttcaatacggcctggatctcagcaacatttgtgattttgtggtttattgtggccaactttatcgttctgaatatgttcattgcagtcatccaggaaagtctcgacgtattaaaggattaaataacgtctttcccccggttcccatcgtttcttggatgcaaactttttttctgcgtgtccttctaatgtaactttgtctcttttctaaaattttatatctttgtacaatgtttcgtactcactttaaattttcactttctttatttttctcttaacatctattatcttttcctgacagtatccccccttttatatcttattatgtcttatttcttcccatctcatttactctcaaatctattctcgtttcactcatttactacacttcttcattttcttttctttttcactctcttcttatctctctcttatcttttctttctttaattttatacctctttattttttttttttacccattgttcttttcttctcatcatttttccctttcttctcttatttctcttctttttctctattctttcttctcttcatatcttttttattattctattctatcatttttttccatcatttttttttttctttcta

SEQ ID NO: 9555 - DNA, 1100 bp, Emericella nidulans
gttgggtttttgggtttggatgggagtacaaagcgactgatgcaatgcaaatatggctcacaaagactctcagcgttgataataatacaagccagaggggcttttgaaagatttatctagagttacaaaccagctcggttttatgtacggttatcgctattttccaaagcgaagcaaaatcaacctcttgagatgcgaagaaccttcccatacattcacatccgaaagaatacatccaaatattattgcctgagccacaacggttcaccgcctggaaacgcgaataaagttccaagatgtatgagcacacatcttatattgcttatgcaactcatcaagctgaagaaacgaagaaatgaccaggaaacccagtctagttgcccgggacgaggcccttgagacctccaccgatatcgccctcacgagcggcaatctcgaagtagccatagataatactgcgcgattttgttagactttgaagaagagagaagaacgacatgcttacgtgactgcaaggagaatgccagtaccactaccgagagcaccgagaaggtcagaagcgacggacagagcgccaatgcaagcaccgccgaaagcggcagcagtggggatgatacgcttgagctccctgtacatgctctgttcacggtgaccagccatgacgagaccctggtccttgagctgcttagcgacatcacgaggagcagagccagagacctcaatccaggtcttggagaacagggcacaggcaacgagcatgaaagtgatgtagacagctgtgtggatagggtcaagaagagcctcgcggaagttcagaggaggagacatgtagtaggcgacaccagatgaagcgtggagctgggcagaaccctcacggggctcccagacaccaaggagcttaacaaggatgttgtcggagaaacgggagtacagcatctggctgataaggaaaatgttggagcacagggcagactggagcataatgggcatgttggaggtgtagaacaggcgaacagggtaggaaccacgcattccacgctggcgggaagacttgacggggatttcgacacggaaaccctggaaggagattaacgggggga

SEQ ID NO: 9556 - DNA, 1766 bp, Emericella nidulans
  unsure (1)..(1766): unsure at all n locations
gggattgcggagaagctggaacggagggatagtgataggattgcgcgggacgaagaccgtctgcagttgaaggtcgagggtagataggatgggctctcagagggtcgaggcggggaggattagggattctgcgacgactggagagctcatggccgcccatcggaccctgaggagggcatcgaagagctccatttcccgtgaccattgccacgaccggtgtatagacagtgcgcgttggacatttgttgacaaataaggatccggaaggagcgggatgagaatcgctgagaatcgctgagaattaagaaaagccgctgtggtatgtgttgtcgcggtgttgttttaacgagtgtaaaatggggccagcttagctaccgggcaaagggagatgaacgagagtcggaaccggcgcgagattcagttcaatccatgaacaaacaaaatcacaatcctaccagagggtgaagaaaaggctccatcgtccaagccgggagatgaaaagaagagcgaggggagaagagtgagggtgacggggcgagagggttaaagtgggaaagctgaaaaggggaaaagaaaatcaacagcgtcaatccggcctagtgcgatctcaaattccgcgcctggatgagcccaacgatgtttcaaaataataataatattcatccaaagtgtccagtatggagttcctgctactcgtttgacagcgtccctctgcagcgtgtccttgcgtcggactttctccattacggggatcccaatttctcccaattatcagctggaggcgccctgtctcgccctgtctatgctgtcctaccaatcattcggtcactctgcgctgcactcaaatcgggtctgcgaggcgctgtgatgggtcatctgagtctctagaggcagctactcgcatagactacgccggcgcttgccctgcatgtcgtcccatctgactgatcgtataaggagcacggagtactccgcatctcctcccgtactttgagtgctcttgccttttgaaccgatccatggacaaacaggataacgaccgttgttcaggcgtgggtccgagccggcccgtcctgtcttcgagttcagtcatccagtccaggagtgccaaggtgtatcgatacgaactggaatgaatagctgcagctcatacttctttctctgtacggaggagctccgcgaccgttagctcaacaaataccgacaggggtctgagctccccaactctttcgggctgaattctccgtgtgcaacagagaattgggttcaatccaaacttatgacaacgcgatgatgtcagtaaaaccagntctctggtgcttatcccaagatcaatgaatccttcgtctgaaagcggtcgcagccgcttccgagtggatgcagtttcggtctatttccggngcggcccaccatgaggcattaggacaggttcaaggaccggcaatcggttaattgcattggtacggcatgttagaatccgggcatttcatttcaacggtcagccaggtggtggtgcacaaaagtgggcccgttttactttggccaccctatggggcttcttccaaaccctggaaatgcgagtcgatagcccttttcttatattttggagagctttttgaaaaacttttgtttttttttttaccccccccggttantacttaaccaaaaatcttctatttcacaacaatctctcccttccccctatttttgtatataaggggtatccctttaaaagcatccctccataaaataattttcctacatta

SEQ ID NO: 9557 - DNA, 1736 bp, Emericella nidulans
acggatcggatgggggcgactttgaggctgagctgaagttgaaaaacattgactttggcgtgttccattcctatccggattggtggagcaagaccgtggaatggacgaacaagtggatcgttgaccacgcaagggctgcgcggcgtgttgggaagccggtcgtgcatgaggaatacggtgcgtctacctgccgtttctattttatatcaatttatattttttcccccggctgtcgagatatactgacggtgcaagtaaaggttggctcaccccacagggccgactggataatctcggcacggtgtcgaatataactcgtctagaggctgtgggcggttggcagagtattagtctgcgggagaagatgtccgatatgttctggcagtttggatactcggggtactcgtatggtcggaatcatgatgacgggtttaccatctacctggatgagtgagtcgaattccccgctgaagtatgaccttgctaacccttatagtgccgaggcgcaggagcttgtctacaagcatgcgaaggaggtgaacaagttgaaccggagacggtagatagagaatggtccaggatgtacttttacattgtcagattaaagcgactgctactcttcagctcggtctcttgtccagcttgctcttgtccatgacctctcccgtaaaaaatgcacctgctgcccacgctcccgtaagcttctggacagaagaaacaaaagaatgtatgagaggcgagacatcacttcttccctgtaatatctgaccactgcctctccacaaatcgagcggactgcaaataagtccttcctctctctgtgtcctttcagtttgactcccttgtcatcgagtcttgagggccttggccgcaatagcgaggtgacagcctgcggtcccttcgagcgcctggtgtttaaagtgtcctgtccatttcagcgtctcagcaaacatcatagaatcccaccccggcttcagccgcggcattttgatcgacgcaataatctccattgcgcgcgccctccactcatcaatcagtccagtctgggctttttaccccatatgcgcataactgggtcccggtatttccgcccgaacacgcagagtccttggtttctgctcggcttctgggcctgtggactcacttctaggatagacagaataggtccacgaactcccgcctatagtttatcgagcgaaatgcatgactaactacatcaatggggctgtggtccagggcacagtctaacaacgcggctccatcttttgctccaggacaagctgccgatctctcagccgcattggagacacctcgctgccagagtccggtcggctgggaagcaatgtcggtgtagacggggagatacgcgcaataacgtctcagccgtaatctaggaggatgctacattactccaacatatggggtggtgatcgggcgtgggggatgtttacgtcgagaccctcgaactcgacgtcgggacagaacccgaacccgagatagacggggcaaggctgtgtgccgatcagatgatggcagtgctgccactgctgccatgctcgttgtagactcaaatccgaggcaagacggccgagaccgagacccgacagggttatccatctatggacacgaccggtcccggctctccgtggtgagatgggaagttgggaagaatccaataaaacgctcggcttcttggaagcgtttcgagttgactgcaggttgcaggtatatggagg

SEQ ID NO: 9558 - DNA, 729 bp, Emericella nidulans
gcagcaccagcgaatgcgggaaggcgaatctggaaattaagaagagttaaggacagtggcagcgggttgaaagatcagagaattgaaaaagatcagaggatagacctttgacggtcaccaatgataacaatagggaaaaaaaagggattctggaatcgactaagaatagatagtaggtcgagatcggaatagttcagctgtctatttgaagaaatggaatggcaatagttcactccactcagggtcctgtcaaggagagattggcaccatagcggcaggagcaccgcatcacagttgtcttcctgctcagaaattatcagtctacggccaaagaagaggctacctgctgtcagttctcctatccatgtctcatacaatagcagtttgttcccgaactcgaatttagaacccatgcaggcacacgtaacccacccttggcactggcattagcagcagaccaatcccgtccaggcctagacattgcgccgtagctctggagtagtcagcattttgcatttattaggggcagactgggcatttgttcggataccacgacggcgaggcaagttacattgcactgtttccttgtctgtggctgctggtcagctataggacctaggtagtctatatccaacatcgtggtctatctacgtgaacctgaatctatcttcaattgcacgtccaatcacccgcaaattcaatgcacccgacatccccacttcctagcat

SEQ ID NO: 9559 - DNA, 857 bp, Emericella nidulans
gtggtggtgattttctgctgatgatcgaggtgaactattgaagacaccacactatggagtattattcccgactagtgtttgctagattagccaggcttttacttcaaagactggaaacagcctgacgtataaccagggttttttttttctgtcggaacactaactgcagtatcgagaacctcgaacctattccctctaggcctgcagtcgagacattgatttgacagctatacgacgggttgtgtccgtaagcgctccaatttcttacatcagacgtctttttcccctggcggcctctggtatctgctagtctgccaagccatctatcccacgcgatgatcgctctgtctttgtcgatcattgggcatgtagacttgctcgtgagcttgtctttgctcgcaagggaatttgttggctctctccttcaggggaggcttcgcttttggaattacggggttagtagcatgaggacgcgtagcgtattgatgtctacccatattaaacacctcgaacactgttgcccacaaacctctgcgggtgtgctgcaccgtctggataagggtcgtgggattcgtatcatgccccattatgcgctgacgctggcgcatcgtcactattagaaatggggttgcgtaagagaatgttcccagaatgttcccatggaaaaccccaattccggacttctctttgcttttctttccttttccttaagcaacttcttttatatgaggaccctgggtgcccatcgcttttcagcccgaggaggcaaatcggcagcatatgaacttatcgcaacaactcgttagtcaagcagaatcaaacgagactttctcaacaaagatcataagcatgccgtt

SEQ ID NO: 9560 - DNA, 791 bp, Emericella nidulans
gggggtgatttttttgcagaccatggcgggcccccccatgtggaagtatgtccgtcgaaggaggtcgtttggtggagacagggacaattgggaaggtcgcaacgccgaagaagtgtccgccagcatcaccaacagcggagtaagacataagcggtgggtttggcttgcaccgtacgagcgatctgtcatgtggagcagcaagcagccaactactggacccgcgctactcggcaagagtggcaggaagtgtgagtatcaggtccaccgtcagttgactctaagatactaattcaagcagtgattatccaatccgtcctcgacgtcaaagacgataaccctttgccaaagggcttcagcggctcggttcaatttaatcgctccatcctcattcttacaccccaacgagctcttaagtttacagccaccagcatcgaacgccactatgtctggctaacagccttgtcattcctgagccattcagcgataggcctgcaagacctcgcttcactcccaccagtgccgcgggaagattacactcgcccagcgccaacggcaaccctccgccgcaatcctattcgcgactccatccgaatcgccaagggccgtccgcgacccttcccaagaggcaagggcaaacggcccttcaataatcaaccggaaccggtccctgaactcccctatgacctggacgacgaagttcgagcctcggaggacgcagcggccccaccgacggtgccccggttttcgaaccatgcccgcaagcgcagcaatacggcgccgagaatgccgat

SEQ ID NO: 9561 - DNA, 1027 bp, Emericella nidulans
tccaggaagaggataaagaacgagcagcgaaagagacaggcggacggagggtgataaaggagggtaatgggctggttgagaacgaggctgactggaaagtcaggcgaactaggtggtcgggaaccctcaaggtcgcggtgctgggcggagaccctaaggagcctcattgattgggccatcccccctctggcctgcaaacacggtcagtccagatgaccgagcttcaaggatactattgaggcagctctccttttacgtgggtttatatatatattcctgcgaatgggatttggtgtgacaagccaaccgtctgacgcacggtccacatacatgatttctgcacaggtccccaactcttgactgccgtacagaataataactatgtacaaatctaagccgctctctctaggtagacatttccaaatgcccaagtaccctccgactgtattcgtggggggtttcaagtcatataaacttgtggcctgaaaaaacccctgccgaacaaaccaagtaggagacatgcataaacagtgtcgatcgagatgcgtcactgccctctcgcataggcgtgagccctggcagggtacgacggactagcgggatatgaccgaagagccttgggtggatagccaacagatccaggggctactgcgcagtcttccaatgttccggcgttcgtgaaaattgttgcaagcgtgcatagcgctattctagcaaacggctcacacggcgttttcagtagtgggcgataggttcggacccccatttccttgggcgccagactgattaaggttcgctgttccttgcgcagtacgcgggaagagctcattcagcttcgtatagaggtcattgacggccggcaggtgtgggaggcggtgtcataatggcgggtgctggagggacaacacctccagactttttgcccttgtctgccaccgttgctagatatgccaggtttgcttgcagacggcgcatgcaattaacgtattcgggggatcgttgaatgtttttgtcgggagccgattca

SEQ ID NO: 9562 - DNA, 149 bp, Emericella nidulans
gtttagtgccgaacgactccgctgggtggtctccggcagcgtacacgacgtaggttcacccggagaccttgacgtagatagttgtagatcgcaggctgtcgaaagagaacacacgatggtgccgaagtcaccgcttcatagtagggcgg

SEQ ID NO: 9563 - DNA, 168 bp, Emericella nidulans
tgtatgtgacactttctccagatccattagccatactgtctcgacaggaactcataccttggattcgggtggttacacaatgtaaggtatcgcagaggataggcattgcctgagtcactattgctagcacctggcgacgagctccatcttcaatgttagtcaatctgg

SEQ ID NO: 9564 - DNA, 110 bp, Emericella nidulans
ctttgcttctgctaatatttcggccttaggatagccaacgttcgatcagccgtcgtagccagtgtactctagatccttgtaacccgtggaattgcaccataaaccgagtt

SEQ ID NO: 9565 - DNA, 1072 bp, Emericella nidulans
tgcgtaatggcatgttctaatgaagcgttttagcatagcgatgggagtatattatagaatatgtgtacatgcttgaatatatcagcgaggttaacatttggtaattgtgatttgtgttcttcataggtctggggatcagctatagattgcccgaactatattccaggattcgatacgttattacaacaacacgtcggctgctatatccttcgccgcagaggtatccctgtttgactgcactagctagctacccgctcccgtaccctgagtagtaggacgatctaaagtcaaatcaatcgtgcaatcgtcagctataccccaagaatctctcagatattctaccctcctcatctctaccgtgacgatgtatgattggctggcatagatgctcacgtgatgcggagagtaccaaaaaaatcgcaggcaaaaaatcgcgaaaatccccaagccgaaatcccaaaagaaaataataaaataaaataaaaaacaacggcgcccatcgccagcgtcggcagtccatcatccatctcggccgaccccagctatccagatcccagcggccccgtgggactttcttgctcgtcgctttcccagcgacttgaccttccccagctgctgctcccattgccagccggtcggggtgagctgaggttttctcgctcagagtcactctccgctgcgccacctggcctcttccgattgccgtagccagggtgccttattgcctgaggctacagacgcggtcacgggaccttactcctcacggtgctctctgattcgccattgaggcgtgtgtcagttgagcttcgtctttggcagctatcgtccagaacgcgtttcttatgcgcgtctccgcgacgtcgcatccatctaaaactcttgaataccaatctgatcttatcactgctgctgctggtggagctggggggagtgtcggttagctggattcatccccgctaatcgtggtttgttcctccgctttgcttcgcatcgcatgcctggtctagctgtgggccgattctgactccatcaccatgatggattatggcggccaccaataccaccagcaaca

SEQ ID NO: 9566 - DNA, 473 bp, Emericella nidulans
caactgtcacctctacctcaatgatactgctagagcgaaaccggcggggctgggacgctaaagtgcctaagggagcactactgcctataccacgctcgcaagatggctcaagcacataggccatggtcagcagaagacacgcgcgcatggtccgaacagacggtgattcgacaaaagttcatgtgtcgccgaaggcgtctgtgcccgagaaaccactagatcacgccctgccaggcgatgtgaacagtcaacacacgaagggctagtgactcacccctgactataaagtgaagcgcgcgacccgccagttgaccctcgcagagtattcactatctaacagacgacgcagcgtcagaatgcctgattgcgtgagctgctggaaaatcagccggcggatagcgaccactatttttcgtggacaccgatattagccgtcgacaccctccacaaggtgctagctagacagtcaacgt

SEQ ID NO: 9567 - DNA, 1325 bp, Emericella nidulans
ccaccaataaccagcttgtctcgtgttgctcaaataacctagaaccagacaaaatcctcaccaaattttcggcaataattaatatattgtctgtgagtcaccagctgtatgtttggataggtgtgatccacggagcccgcgggatccgaaatatccaagaacgccacgccgtatcctcggatcccgcgggcgaaatacgaacagattaacttgaaactaaaccgcgtttagggagcattctgagacccagacctggcaataagctaggcgccaatgcggaggctcggaccctcagtttaccggcgttcggacgtgtctactttaaaaaaaaagaagctctcgttgtcaccatcgtcatgctcgaccgcggctgtaccgtctacctgaagagagataggcagtatgaagtccacggctgagagtaaagagactccgtctcaggacgagtcgaccaccagtgtaccatgcacggaggcgcctctggtcgaggaaggggaggaagcaagctttggcgcatacaaggtgcgttacccgactagccaacagatctgacggtacacagtcaagctgatatgctcgcgcaaaagaggatctttacattcgccggcaggacagaacttatccttcaggccgttgctatccttgctgcatgcgcctctggagcaggaattgcgcttcaaaacctcatctttggccagtttgtcaccgtcattaccgatttcaccaacggaatctcaacgccggcagactttcgtgacaatgccgtctagttggcgtatgtatcctctctgagtgctggttacagagctgacgaggttcagcctctactttgtatacctgggcatcgcgcggctcgtcctctcctacacctacaacaccctcctaacctacgcggcctaccgcatcgtccgcaatatccgacacgcctatctcaaagcggcgctgagccaagaagtggcatactacgatttcggtagcgggggctccatcgccgcgcaggcaacttcgaacggcaaactgatccaggccggcgcctcggataagatcggtcttctcttccagggcctcgcagcattcgtgacggctttcattatcgcgtttgtggtgcagtggaaactcactctgatctgcatctgcatccccgtagccacgatcggcacgacgggggtggtagctgcggtcgaggctgggcacgagacgaggatcttgcagatacatgcgcaggcgaattcgtttgccgagggtattctggcgggtgtgaaggctgttcatgcttttgggatgcgggatagtctggtcaggaagtttgatgaatatctggtgga

SEQ ID NO: 9568 - DNA, 374 bp, Emericella nidulans
agtacgccccacttgcgcaagatgaagcctttgccgttagcagacacgcgactcaacagcgatcaatccggtcctacctaattgaatttccgggaaaacggtccctgcgacctcatcgcggcggtcgggaagatcggttgctgagagtgcgttaacgaacttctcgagaatcttctcgataatttgatctcctgcgtacaccgcccatggcgctaagccagctaaaagcgctgtcgcaggatgggcggcattcaatgggatggcgagtggctcagagaaaggccgatgtcgtagatcgagtgttgcaaccctggatctttcggctagagcagatgcattaaggaatcgaggaagcggtgcaaaagctggttcgg

SEQ ID NO: 9569 - DNA, 979 bp, Emericella nidulans
tgatgctgggtaagcaagccacaggacacggactacagatcatagattacagccgcttagtattgcaaatctgcctctcggcaggggtaatatccaggaaccatgtcaatggaactgcaacaattgatgatcgctgctggcgattcccaaataagtaaaaactaagcttgtcttgcaacattacaggatgtagtgtctctgtccagccccggacagcacgtggatatccggctgaacagaccaccttccagcctgggagaccgctgcgacagtcaggcagggcataggggcacagatgcggaataaatccgcacgttagtgatgacaataatgctcatcatccgccactgggcaactaggcagaggccggggtgtggagatggcccagaattcaaggtttgccggggccgtaaagaggccttgacaggatctggacccctgccagttccaaccaacgtagagatttcagagccataatggcggaatgacggatctcatcacctggaggaacgggcatagactcccgcagccatcttctatatatcatcatcaagtcgatatcgatatctactgccccggtacgaaaaataatcactcccggggctcgctgttggcgtaccagtggggttttcttatcttctgcaccttctcagcccggacttgatcctgcatgatggtctgggttaccgtggtatttctggtcctagacttgccatggagacgatgaaacgggaagtgaatggacgaaggttcccgagtcaatgggctcgtcggtgacctcagtgacccacgccaccggggcgggagagcccggtggatgcggtggataggggcctgtgccaaaaggggcagatggggcagacgagatgagaaggccggttcatcgagttcttgcgctaatcgatcggcatcgagattgctgcatgagactagtccgtgcatggcggcccaccttgtgccgatagtaaaggtggctctg

SEQ ID NO: 9570 - DNA, 452 bp, Emericella nidulans
aggggcatttttacgggcctgttgcgcccggctcccgcgaaacaaccatggggagatagcttctggcgctactcaacagctggattcatatggctcgggacgagcgactggttccggcagaaatgaagggggaacgtagaattaccgcgaacagattgcatgggcaccccaatgcggatcatgtgacatacgaatcggacaaactggtttgcataaccgatctgccagccgagggctggtgccaacaaaagctaccgtaactgaccaggcacgtgtggataagactcgatagtcaagacccggaacgcacagcgcgcctataggaacggcgggggtccgcgggccaaatatacgaggcgcggagcaatgcccgaaagccccgctcacgagtcccgaggaaaacagagggaggcctatcacctatgagaggctgacatgggcttaatgggtta

SEQ ID NO: 9571 - DNA, 113 bp, Emericella nidulans
aggaataggcgccgaatatcccattgaatcagcagagaatacaagtgaaggtggtaatcgctctaacggcaacgcttttgatcgaagacctctaagtgctgatttcaacgttc

SEQ ID NO: 9572 - DNA, 1530 bp, Emericella nidulans
caagatggtacgccaaatgcttcacgacggccacgtccgctaccaaacaacagaaccatacccgccttctctcttcgatcttccctccgtacccgaatcatccgaccgcatcagactccgtggcttctatttccacccgtttatgcagatctgccgggccattacgacactgtcgccggacgagatggagcgcgcatctgcggaagtcgaggcgcagacctgtggctacgcaggcgctgttaattcaacaggcgactgtcgggctggacccggctatgtcgtggtactttgcacagaagaacccctttgcacattctgtgatacgtacgagggaggagtggatttcgcatagcgaactgccgtgggaagagctgcgtggtgtgtggcgcagcggtggttgaagtggcattattcttggagggtctcacatctttcggagtcgttggaagataagtccggttaacgtgttagggattgacttgatatcttataatccggtaagactggccataagactatataccctgaatgctcttggcccaacagaagagcaggaccgagaagtgtggaatattagactggagtcttcgactcttatagtcagagtccccagtaagggtttgctgttgggcgtaggtgccagatgctagcgactatggtaaagatacttagactatcgatataggagaaacatcggcataagtaataaggtattcaagaagtctattggtcgcattgtttgtatacatatgaactcgaatgccgactgctatgccatcaaaccaacaatgcaacaaggacgctcagatcaaacgttctgtcttgtcttctcatcctcaaagacctgctcaacagagtgtctctcgggtgttatgacctggcttgtggtcactgacaaatttgcactttgttctttcgcgtcgagagccctcctctcctcctccagctccgcaggatccttcggtctctctaatccttgatccttgatacacaaacaagccaaaaagcaaaccccaattagcgggacctgcaaaataaacactgccctgctcgcagccgtatacgcatccacaatgccgccccatacagcctccgggactgacgactgcgcgggtagagagtacgtcgagtcggacagatattcatacccgactggcaaatgcgagcggagcgtatcttgcaatacggcgccggagatcgcaaggccgcacgccgcccatgcagcggaagaagttcctgtctgagatgacgacggcacgttggcgctttgtgcagtgggcctggaaggaacaagggttggctgaaaggtgcatccgactccgacgccggttatggcgactattacggcgatggcagctggatgggtcgttgtcttgaagaggagggtgaggccggcgccgctgtttggaagacgtgtcagtgtatgcatagggtgcgtcctgacgtggaacgcttacagtgtccacatgccgaagccaaaccagatgacctcgccgtaccgtttgcaccgtgagatatactggcctgaga

SEQ ID NO: 9573 - DNA, 946 bp, Emericella nidulans
tacgcgagctatggtattgagagctacagagcggataccttgacccggaagggccgatgcctaacagctccttagcggcattcctcataacggcagcaagagtcaagtctgcgtatacgagcatgatcgaggacatgtgtacatgtgaccgtcaagtatgattcttcaaaaacgacattcgccctccaaaatacactaagcgctggagatcaagccaagatgctccccaatatccttcccatcgttaccccaaaagtgcaccgtatcaacatcacaatgctgggttgaactgcggaacccaaacatcgcctgcgtgcgcggcgacaactctgtagcaatttgcatcggaatccacaacggaaacgcctgcacagggcgtagttctcggcggatcgtggaaaacgccagcgcgcggcgctggtccgaaagcgtcgcattgtggccggctccgtgaatcaccttgccactcatcatatagcaatcaccaggttgcattatggcaggcacagaatcgatcttgccgtactgcggacaatcggtcgcgttgatcagcgtgactccggccaacggttgctgcccgggacgagacgggtggcgccgttctctacggtgaaaggagttacggcgcagaagaagttgacgaggcactcgggagcatctgggcccatggagttccaccacgggtagagctcctggtcgcggtggaggcgctgcgcgggggcgcccggttgcacttcgatgaccattgtgtcgttgaagtggtagcccatgccctcgccgggcttgctaaagacgcgctggaggagttcgtgcatgaggtcattctcaaggatctcgtggcgaaatgtcgggcttgtggtgacgagcttactgaaccgcttcacgcggtcgttgctgttgccgtcgtttgtaacctggacttggatcttctccatagcgggctgga

SEQ ID NO: 9574 - DNA, 102 bp, Emericella nidulans
aaaagaacagttaccacacttgaacaaagccataaggcaaagagatccgtaaaagtataggataaaagactaaatcgcttcgtcagtatgatgctttcatac

SEQ ID NO: 9575 - DNA, 555 bp, Emericella nidulans
tttcttcaaactgctatatatagggtattatcgatcgcaaatacaactacactccgcaaccggacaaacattatgcttgtcaaaccactcccgcgcatggtgcgcatggaagccatgattacaattgatacaaaaaacaataaaccgccgcatgaactccgcttcagatagcttgcgctgatccgttgccgtcgcagtctccgccgccacacaagccttggacatcgggtccggagaacctaaccaaagcgtgcatacgccgcaccgcgaatatggcgcccgcagcgtgggcaaatcgtaccagacatggcggccgaacccagcggatttcctggagtcgcatgtacgacttccccgctagttgaaggggaaagttgggaggaggcgtcgtgctgagttaggggtcgcgtacagtagttgcatgtcaggctgacttgttgacgcggcggctcgacgaggcggcgaccatcccaagtggcggcgaatttgcgagagccgacgtcgaagcgggcgcgttcgagctgaagtttccaggagttgatttgccacggtagg

SEQ ID NO: 9576 - DNA, 727 bp, Emericella nidulans
aggtctgtggatatatcggtagcggtttgggaagctggccgtttgcgttgagggtaatatccatctccagtataccgtcgtttactgttcgctcgggctattttctcattcgcaaggtcatgccgccgcatttcctccacatgtcgctgttcgtcatctttcctcttgcgcccagagaagaatccctttatagctgcaagtgcgcctgctccgaacagggcgttgcgagctgtatgagatgggcgctcttcatcgcgagaaaagtatgaataatcgtaataagaggagtttatgctctgttctctgctaggaggcctgttcggagggcgattgataggagctgggtaacttggccgaggtgggggacgatcatcgaggcggctcagactctcttctgtcatgctgtcggttcgacggtgggcaggctggtatctccctgattcagtgtcgctttctctttctcgcctcctgtcaaagagccttttggccagtatagcaccaccgccgagggcacctagcttgagaagcttccttccccatccaccatggcgtgaagcttcgtccgagtacttttcgtccatatacgaggtttgggagctctcagaaccacggtctcggctgcgccgccgaaatagtgtcgccaatccggctcccgcagctcctgctgcggccattcgtccaagactgctgcgtctgtggtcgtcgtccggccgacgggatatataac

SEQ ID NO: 9577 - DNA, 1597 bp, Emericella nidulans
atgtgagaaatttcccattgtttcacgacgaccacccaaactcatcttgatggctaggctcggatccgctaagatcaggtgtcttaaaaggggattgcccgggaattcagtgaagagagccaagaatctctctccaccggctaaccgtgcctccagatcatttagatcctcagatgaccctcgcccgtaaaagacacatccggggccccatttctcaaggattttcaatgtatcaatgtaggggaatccgaagcagacgcttttcatagaacccctcgcttcgaggagcaacctgtgggaattgaagatcgaactcatgccgcttgggaaaaggaaaacatccgattctgaaagccctgctactcttccttcctgtgaggctttctccaaagcctcattcaattccacgtctgccgtcagcacacctgctattcgcctgcgtacggcaatctttgccttgctggctagtgaggtactcaagttccttccaaaccgttcttcaataaactgaactgactcacgtccttcgtgcggtttgttggctgaaactgcgttatgtgatgaaactttacctatcccgtttattgaaccctttccctgatatctccgagggcccttgtggatgatttggcgcgttgcatctcctgtaacatttttcctttccgtaagaagaccatccttcagagcaccaagacagaattcaccccgcctgcttgaaacgccgtcacccgtatgttgccacgcttgtttcgcgatttttgcgtgctccttaggatatataacgcacgatagaagtgactgaatggtgctcagctcggtttccagctccttggtaggaacaaagtcaaggacgcgaattttatgtgcttcttcgcgtgaaattcttgataggatgaatgtgtgacacactcgcgcagtgttcggagaagggaaaagggtcgttgcctcatattctggattcccaaatcgagcaacaatttcttgggcgagctcctggatgatgggatggacaaagaatcggggataaccgcattgcatcttatttacaagccatagctccccctcttcgtacgccacgttcgcttcccatgtgggaagtgacacgctcacagcctgggtagtatcagctgagcactggaatcaattgatgtcgaggctcctggtgaacaggtaattgcatgtataacaaatgcacgcggggtacgcggggtaaatacatacatgatctgtgtttgggggtaccgggcctccgggttcctgaagcattatttttggggataagaccctggtttctaagtcaaattgaccagctgcgcctgcaatatgagataaggtatatgaggatggagaaaattggccttgcaaaccggagttctggcttgagttgtgacggcaaattaagaagtgagcagcgatctcggcgatgagcatgaaggcagcgggccaatcatattggaacttaattaatgcttcatcagagcggtgagtcataggtttgaaggagctcaagttaggcttgtagtcaaatcgtgattcattctaggtcgagcgcagctagtgcttggtggtagagcactgtactttatggtaggaaagg

SEQ ID NO: 9578 - DNA, 1121 bp, Emericella nidulans
gcatctctgccgtaattccggaatgcaaagtcaacgccgtatctacactctagtccaagccgtacgcaagcttggcagataggcttagcctcatcacactgtcagaattggtcaactgggccgttgctgggcatggaatgtacctagggcgaccgacctttttccctcttttccggcacgagcggcatccggagcggtcacgccggatcttcagagttttgacgcatcgcctaacctgctgcgactgctcagtggacatgcctagttatatccgttgcacatttgaagactttatgatgttggatagacgatggccgtggtcaggcaaccccacgtgcgagatcggcgggccatccagtctaacctaatgtggatgaattttacgccgtttgttcggatggggaccttgggggtggtatttgtggtattttgtggtatcgataagtacagtttatcagcgcattgtaactcaaacggatataagaaacccacgttcgtccgttgccactgggaagtgttaagtcgttgaaactctttcctaaggaataacatctggcccatcattgcactttgttcacaaaatggtacgcgcggcgtggaaaaagcttctgaacgacgcgtccgtccagaggtcatcccagactctgtccatcgttggggcagatgccttcatctatggcggagagctgcgacctcgagagcccgtagactctgcagtttaccgcatatcagtaggcagtggtaagagacacatgctctctggaatcatggagggtcgaatactgactcgatacagatggtggcgctgaagccctcctgtctacaatcgctggggtcccgaccagcccgccaccccgtgttggcagcgcgtctacaaccgttgctggtaagatctatatattctccggtcgtggtggaacagccatggcgcctatcgaagaggatggagcattttgggtcttcgaccctcttcctggtaacggcgtatggtcgccgatccaacccgttgatccccagccccgtacccctttgacgcagctccacgctcttacgagcatgggtaagagactactttctgcatgcggctggcctaaaagggcgccttcgcaattgaggccttc

SEQ ID NO: 9579 - DNA, 556 bp, Emericella nidulans
attttgagttactgatagcttccggcgtctcctctcctccctcgcgggacagggacctgggagatgtcgattcttttgacttggatgggaagctaaaggggaagaaagtgcaccttgtgtttggtgaccatagggaagagatggcgaagatcgctcacagcgttaagcaggcgggactttacgcagcaaatgatactcagaagaaaatgctagatgcttacgcactgtcctttggagctggttccattgaggccatcaaagagagtcagcgcctctgggtcaaggatcagaagccggtcctggagacaaatctcgggtttgtcgagacatatagggatcctcatggagtcaggggtgaatgggaggggtttgttgctttggtttgtttcaataagacctctaaacctacatcatcagactaaccctgaggtaggtcaatctcgagcgcactcgagcttttggaaaacttgtagacagtgcggagagcatgattcctaagttaccttggggcaatgaatttgagaaagacaagtttctcagccctgatttcacttcg

SEQ ID NO: 9580 - DNA, 1513 bp, Emericella nidulans
atcggccctcaagcaatacttccgcaaactacccatgcctctcatcacgtacgacgtttacgaaaaaattatcgaaacaggggagatcacttcgcactctggtcgtgtcgaagcgttgcaaaagagcctcggagagttaccgcgtgttcatcaggatgtgcttgagttcctcgtgtttcacttgaagcgtgtcgtggaacgggagaaagaaaatctgatgacaagccaaaacattgccgttgtctttgcgccgacaatcatgcggccacagagtctcgcacgagagatgacggatgttcaaaagaagaatgaggtggtcaagttcctggtggataattgccaggaagttttcatgggcatgcaaaataacaactaatcgccgactaccttagtcgtccagttacatcgattcggcgtcaatcattcgtcacttgcattatttctctacgttcttgttctttgcgaacaccccagcttccgaatggacagcctgtatatatccttggcggccatctgcctccgtttgtgcttattttccttctttcccctgcatcacaatgttattcaccaaccccgagacctccaaaactgatgatcagggccccctcgatacccttcatgtatctttccatgcttgcatgctatttctattttctctctcttcgatcccgcaggtccgtagctagttcccacccatactaactcaccagtggtgttgtacttgtgttcttttaaactaaattctactttagaagacttctcatctagcaccattggacgattactcttacgtctgtttcttgtggatatgtgcggatgtctgagcactccacgaaggacaagtcactacaggtacagttgcagttgtccgttttcgcttcttgatctgcatggtaatcacctagataaaattagtagcacctagtcaggacactgtttgagtaataggtctgtagcggatggctttagtgttttctggtgtggcattagagcacgcgtctgtttaattttccccatatatggtttgcgaattgcttattacgagcatacctgtaagtcagggtactgtcgcggtttataaaataaactagacatgatcagggttcttatgccgtatttctatacaagatatctattggacacgcagtgtcactgaaatatgtacaagaatgacagattagaaagtatcatcctccagcctctccacccgccgaataacgcttgggctctgatcatcctgtaggtcctccgtggtatcattcgcaccggctgtgaaaagcaactgttctactattcgccttgaggcttctctggctgaatcacatgtaagttagctctagcaccgctctaagattgcaagagaataaacaaggcactcacttggcgtttcataagtcggctttgcggaatatggaactgcattgtcttcgcggactgaggccaactcgtatcgtcgtcgcataagtaactgctcataatggtttccaatcctacgttttcgaaccccctttgc

SEQ ID NO: 9581 - DNA, 653 bp, Emericella nidulans
agtcgcccgctcagtctgagtcttgccgcctataaagcctgtgcagttgggttcgccgcagtaacacggctgggggtctgcaccgtaccgatccacattatagttaaagacgagttcctcacccgcttgaatgtgtcgttcagcaaagatacccatgcggagcttctctccgaccacccatttatcgacataacaattggggttgcacgagtgattgcagaaacgcccgagattgcccttcttggttgcgtcgacgaattcacccttgctgagggacatgaaatagaaatgcttgatcccttctgcatcatactgcctcatgcggcggtggaacgggccttcgttgatgacctccccgacgtactcgaaaatgaattgatgcggtcgcaagtcctcttccgcgcggagaccataacccttcttctcagttttaatgacagccacattcgcgtactccctgcgctgaaaccgttggttctggcaatctggcccacagccgcagtcgcccatacactcaatcttggtcgcgcggttgatgcagtccgagtcctctccacatgctcgattcgttgaactggccggatctagccgagttagataaagaaataacatgatatgaaatagtcatgagtagatgctggcaagaatcgggg

SEQ ID NO: 9582 - DNA, 1452 bp, Emericella nidulans
agaaatctgaccccgcgacccttggccaaacatagatatgctgcttttctacttccgatgttcccatacgcggcctgagatgattatcccttggcgtcttcccaaggacaaagtgcaccttcctgactcagcctacgtagttgcacaaccttgtgggggaaaaccgatacaaagcgttcagtttaacgcaaaaaacaagcctctggtcatagtgacagcaataaacggacagttacactgaagcacagtagtggctcatagcagcggttgggagaacccgtggccacctctgtagcgatccatgcacatcgcagcttggtgacatcggtgggatgaaacgaccaagaatgcagcatggagaatccacgagagatgacataggccgccagcaacagaacccagcagcatttcttggaccctgactcagaaatctcataagagccaatcatagagaaaaccggccaacgcaccgctccagctcctcaccacagcgtccgtcgtacggagtcctgccgagtttaggagcaattaccctagtcgatcccatatggcaccgtggtcagagagctacccaagtccctggcggaagccgagaccgatggatttcccgcagcattccttgcacgcattagaacgatggtgcctttgtcgctgtaaaatggcacaattgacaaaaattgagattcgaggccctactgcattcgcggagtggagtccgctccgtgatcttggaactgcttggctaaccaatcctgtccgcacttgaaggaggctgtgcaatactcattacttactaaaagttcattgatatcctgagattcgctagcttgctggtcgttgtctccaatggaagctttgctttgtctggactgctccaactagacgagatggcgtcgccagggtctgttccggcgataactttcgatcgcgtttctgtacgctgctcgtccgtgttgctcccagccgctaatgatgtgtaggaaacacccacagctgaaaatgatataccgagtcagagtcccgatggtacgcgcgagcgctctcacagcaatttgaccgcgatcggtagcgacttcactggacgggatagagcgatgagcggaagcaccatggccaccagcagtgccggcctcgaagtcccaaaaggaaaagagaaactatcttcaagtacagcgccaagcgtgttttcatcggacgagcaagaacgctttgcgccctgatccaggaaccgagacggactttcacgtcgacaacaacccgtttgcatactcaccaggacagctcaacaaactactcaacccaaagtcgcttcctgcatttgttgctttgggtggattgccgggtctggcaaatgggcttcgaaccgacttgagcgccgggctcagcactgaggcagctggcggcgaaaaacatacacaatccaggaatgagctatttgcagaccggatccgt

SEQ ID NO: 9583 - DNA, 2627 bp, Emericella nidulans
gcacacgcgtcccctcatcccgggaaagcctatcacaacagtccagcagatcccctccggagtctccctctctaccgtcctctcacagtccctcaagacaaatgacaccgacatgttggaagcctgctttcacacgggcgactcgggcaccatccgcaccaccatcaacgtctcgattctcccctggctgcaacccttttgcaaagacttgccgagcgcctctccgcccgccctggtcgatatggccacttgcttgtctgggtacaatggacttgtatcgcgcacggaggagccttggcaggaaacaaggatctcctcaagcagatgtccactctattcaaagtaatggaccagcgctcctcaaccctctcctctcttctcttgctcaagggcaaactagacatgttagacgcccagcttggcctccgccagtcgctccgcgaaaacgcagaccacatggacagcgaagacgaggagaatgtaatctacgttgaaggctatgatgaggacgaggttgaagatagcgacgctgaggcaacaaagaacattgacacgccccggacaaaggcaattcgcgaccagaccgatatctccatgatcgacgaagacgaagatgcaggaagcgaggacgacgaagaagacgaggaagaagaagacgaagaaggccctagcgccattttcgacgtcgaagctgaagagtccgccggctcttcagatgccgaggaatcccctaatgacgacgaggacgatgatgaagatgaggatgcggacagcgccgggtccattgcggatttcatcgcggatacggaggacgacgactcagaggtagataatctctcgcggcctccaccgtcaaagaaggccaggttaagccaaggaggtagaaaagggaagaaacaggctgggtcaggaaggaaatagactactttcaatccctagatttataccctgttctatttttctcttgcggagagcactttggatcgttgttggcttcctccgccgttcctgtttttcattatccgatgtgcgcacaaaaaagtatagggagaaggcatctacatttttttttctattttctctctgtctccatccagttgttctatattcaaattctctaaatctggaacgggtgggaaagatcctgatttctgggcatagatcctacgactgttctgagcttctgcgtttgacccacatgcttgcatatattgtaccagcttcgtactgtacaccacaactgaatacctgttctatcgcaaagagtgtgaaataattcaatttcttgattcgacaacgcctggggtggtctcgcccttggaattaggccacaaatgaagggcaggcatgagtcttcctaagaatagactgacccgctgacgtctccttaacaacgatttcaataaaaatagtcctaatactcccctgatactcccaagctgaccctaacgaataatctctcgccccggattctcaagcccttccagcccttcgagaatttcactacctccatacgggccggacgttgaggatttatgactggccgagctactccatacctcatggaatttgacgctttggtcactggatgctacaataatgcacccttcttccactgtgcgtgacaccacaggccgccttctttggccctgggacgcaccactcccctccccgtcagacgccgagttacccttgctctgtcttctcgcgcttggttaccctgggcttgcgaagtggaacttgaggcttcttcgggtatatctaagtcgtcgacaatatatgtgggaggccttccagggtagctaacagcacaaagtgcgcgtccgcaatcgacaacagtatcgttggagggtctatcccagctagtaccatgaggcccccagggtattgctgcaatctgttcacagctcggccatgcaaagatagctattcgaaacggatgttccggttgcgcgaacccaaacgttgcaaccagctctcttcgcgttttactccagataagactagtgacctgagcgtacacgttgatggtagccaaacatgcacctgagggagtatgaaagaaatgaatagcccggtcgttggagcccctccagtggctaataaagatggctgccacggagcaaacgcaatagccttaacggctgcggcatgggtcaatctatgcttttggcgatttgctgggacaaagacagttcggtcacctccggaaacgactgatccggtatgggtcaagactgaaggaagagaagatgacaacgatcttgtgcgagaagaagtccatgttggaagcaaattgctcagcaaattacgctgattaaatagccgtcggctagcatttgcagcaaaacaagtaaacgaattggggcaattgatgccttcaggatggcaattctgatgtggcaagcacgttctagaagaaacaccaagctcccgcgcagggatgatgttcgagagttcgaataataagcaggcgttgtcattgccgccagtagccagataggccccgtctggtgaccatgcgatgccgcatatctgctgcgtatgacctgatatcttggcgagcagggtgactctaccatgccagccaaaccggtctcttgcttcctcatctggccattctccga

SEQ ID NO: 9584 - DNA, 620 bp, Emericella nidulans
tgaaggttggtggcacggtacaattcacttaagaagtccgtttgtactcattagaccattgcaaggtggctatctcatctgagagaagctactactttattttatgtaagccatatcatgtcccgttagcaggttgttcatgaacaaccccgtccacgttcgttgtcagcgtcccattcgcattaaatacattggccatcacatctattgacaactagaacccgcccagccctgtcttctttgtcgcggtagccaccccagaaccctcgagatccgagtaccagtcgagatggcttatccagggattggttgagtccggtgtgaaagtcactgattcgagcccgttgattatatgctctccgtcatcagagtaattgtcgtactttactgaaacggtatggatgaaattggatgtggagtctgctagaaaggtggcattggctaagccgcttgctttaccgcgaagggtgtaggtacccgctaagccgggcaaaagaccgcggtggtctggaaagcctgagccagggggaaacggtgttgcgcaaaggaggaagcccgggacgtcaaaaactgctgctggggctgtgagcttgcggtcgaaaagtcgagcaagcatcacg

SEQ ID NO: 9585 - DNA, 1572 bp, Emericella nidulans
aaacatttgataaaaggcgcgtgggagagggaaaagaaaaaaagttatcttaatttcaaggaagcccaccgaagtgaggccccgccgtgtttttttgagacacaagagtacaaaggggtattttataataggaggtgaaacccgagggcaccaagaagcttaaaaaaacttctcaggttacgaatcacaaccttcatccagaggttccatgcataggttttcggatctcagtttcatctgatcataagttaacagtatgtaatggtacctatattgtaatattcgctccaacattatataatagggttagacacgtagatcaaataaagaactgtctaagaatagcttgtctcagattcccactgcagtttgtctgtcaaacaatgaagcgtgcagagaaaagcgcggtcctgagatacaagaattctgcaggcggatgagggacattttgtgcagtgggcttatactattcccagttttgattggcctgaatttgcattgacgttgctgacaaacctatcagttcacaaccccctccgctacctggacctccttcaaaactgacattcgcactcttgaggtttcaacaaacctatcaacaccatactcggcacacggataatagcgtgaaggggattgcggctacaagaatgcgattctcgccctggacactaatcgaggtaggccgacatttaaagtgcctcagtgcattgctccgaaactatggctgacacatctctcatataggtctggctgacaacccaggtatgcgcgttctaggcgtcacattcgattacaatactgatctacccccaagctactgagaagcccaagctttcatcgaatggtgggtagagtacatgggaaggttcaacggttgagacatggcacgcctgcagaagggatggacggcaacaacatagaaaatatgggtaagaccgctctgaagctcgaattgctgattgggagtgctgattaggggtgttcaggtccaggccccgtaaagcagtttttccagtacttcaaggaagaaattaaagagcaacttaaagggaagaaaccggggagaaatgaatgacttggtcacaccacactacctagtaccacagagtacgccgcgcccttctaatccatgagacgcgtcctgcatatattgtccagaaccgcacacgacatatcgctgccgcgtcctctcatttggcgactctggaataggagcttaggattcgtgcagacaagctcgtggcgttccgccatgctggttccttggatgtgcaagccggtatttgacacgagtgctgctcattcagcctcggagggcatacggggccgcgggtaggcccatgacctcgttcctggtgccactcaacaagcctggcaagctatgtggatcgtatcgttcaatggcttaaaccagtgtggattctctgaggcaggcccatctcgaggaaggatatcggcgtgtgcgtcgccgcatggaaggagaaggaatgatgagtttggcctgtgtctttatttcctaccggttatacggtacgcatgccttaatactcttgactagtatcccacaag

SEQ ID NO: 9586 - DNA, 207 bp, Emericella nidulans
tcggatagattggctctacggatggatcttccgggacgtggaacagattacgtcccagaagccgatcatgagacctgttatagttcagcatatgagaatttgtataagatgcgagtacctatatcaatagaatggtgatgtgaatctcgggatagaactgggagctcacaaaactcttgaacacactcacgaggatcacccgatgct

SEQ ID NO: 9587 - DNA, 458 bp, Emericella nidulans
ctacgacaattaactagagcaatttgggctttgaagatatcgagaatggcgagtctgatacgagcatcttatctcaaagacaagctttcgtcctcataggaggcttatttcagcgtatttcagtgcttttatgccgctttatgatcaaactctttgctgcttcgttctgaccggcttttacgcagcgctccccaattaatgcaagcgaacttattgctgctgggatacgccagaccactttcagttggctagaatgcccctttgcacggcaaacagactagaattataggcttcttgcacatcggcgagggaaggcgttagaaacgagctccccacttgctcttctctgtcgacctcgtccgatactacatgaactcggaagactgtcgcttgggccttctttgaaccgtccgtggaagatatacccgagctcaatcatattggcaggtgaaattgcc

SEQ ID NO: 9588 - DNA, 235 bp, Emericella nidulans
tttgtcaacaagcaactagtaccaattatgccgtggtactgagattatgtacgcctcaaggtgactctcgcatggatctgaagtagtctaggaatctagtgtcctaggagaccataacagtgcgacgcttccttcagaggtctagacgttctggtaggtatggactaagccactctgcgatactctcgattcgcgtctcatacagcctatgagacgattgccgatatggatatct

SEQ ID NO: 9589 - DNA, 766 bp, Emericella nidulans
  unsure (1)..(766): unsure at all n locations
caggtatcccctgtccacccagtataccgctctcaattggcagagaagacagtgagctccgcccggatcgagcccgccgtccgtgtcagctcggactacggccgcaactaatccgttctccgtgatgatcgacgcggtgtgtaaaacatcacagagcggagctcgggaccaacaggcgcagctcgtctttgtcaggtgttcttgtggcacgctggcagctacccatctgcccggaggctaggataggtcttcggctggaatgcgaagtcagacacgtgtaggatgcagcgagcggaacagccggcatataagcccctcgccggtcgccaaccgcgctcgcggccagataagatcaactgctcctttctactgggtccttgaatcttagggttccattgtcggtcacctatactcgttttaactgtggtctttagctctggtgtataccgggatacagatccgaaaggcaagccaccatgaccgcccacccaacctgggactttatcattgttggaagtatgtccattcactgcaaagctgccatataagtctttttttctgaatgctgactcttaaggcggccctgcgggctccacgctcgcctngagctcgcctagcgccggcaacggcattctcttctgagccggcagcgaagacgacgaccctggcgtntcggacagatgacacttcagaagcgcataactggtcagacacgcgagacctgaagggcggacaatcacctgagtctgagcgttgcatattgatt

SEQ ID NO: 9590 - DNA, 201 bp, Emericella nidulans
  unsure (1)..(201): unsure at all n locations
ggtgacgnggnggtatcttgacaaccagcctgtgcagtaccccttggtaaagtacttctagacatcgcgttacaactcatcngggtcataattacagcgttgcgatgcagacgtgcggcgctggngagncatggacgaggagaatgcgcattgatgacatnnacagncgaagacatgacagnttctangcagtaatgtaag

SEQ ID NO: 9591 - DNA, 126 bp, Emericella nidulans
acgaaaggaggcgcgggagagcaccctgggggcacagggagaggtataggtagaggccgggagatatgaggattatagcgggcggggcgaacgagatccacccctaaaagacaagcacatggagtt

SEQ ID NO: 9592 - DNA, 1044 bp, Emericella nidulans
tataagatgatgcagaggccagaggaaagagcggcgcaagctgtggcaaaagacacagaaactcatatagaagttgaagaagagcgaaaaagctcaaaacgacgtcaagctgaacgtcctgttgaacatgacgagacgcgagcgggatcgagcgtgcgatgggaatcaagaacagaaacgtcaaccactatttttgcctagggcaagaagcgagatgagaaggatgcggagagagagggggattatgagacgagagagttggagaggacaaacgcccaggtgaaatagtccagaccttgatgtctcggatttgtgcctccacctatacctacatttgtactatatgataaatagagagaccttacataaaataattgtatatatgtgcaactaaacgcagcatcagataattgcaggacttctaacctaccagctaacagcatgaaggagaagataaaccacaatatgcagcctagaagaacactggaatttgaagtatggaaagagtaaccttccatcgcaccagctctaaactagaagtctaatagtaccattttaaaaggcccgatgacctgaaaaagaaaagggtaaccagccctttgcaccagccttttatgtttgacgacgatggaagggaggagcatccagtaaccaggtactgtgacagatggtaggaacaaaaactgttcgtgttcattctaaaatgaccggcctactttgagggcacagcgtcgttgtcgtgaggttcgttgtagttaagcttggtagcgtcattgcagtggctctgatttagccctaacttgtaccagtttctgttccatctaccctggtttggcacacaaatagatcaccagtttcttgcaatatttttctttttctttttgggcaaactaggtatcaaggtatacggcagtttaatgcggtagtgagtattagatctttgatctccgtatagaaacaccattgattctctcacgaaggatacgccgtcctgtaaattccgcgacgtcaacgcgtacagcacagttcacggcaattgttacc

SEQ ID NO: 9593 - DNA, 1778 bp, Emericella nidulans
ctagcgggccggagtggatcgctgcgggccttgtggagcgtggggtcctagctcctgttgaacttgtcaaattcgatcaaagattcaaggccaacattcaaggttgaaggctcctgccaacgctaaaccgcccttgtcctttagtgtcaccctatgaaggaacgatgctttctgcgcctgctgtgataggctgaggctctcttccaatccttggtcagactttcttgcgaataaaaaaataaaatcgctccggcgctgctgattcgcgcaagggcactcctgacggctactctcgtgacaaagtacgttgagtgcagatcagagatcaggcttgaacgctgactggattacggagcataacgcgcttatcaggttgaaagggctaggccgaactgagtgcttgggcgaagggaagactcctgagcaagctctttccgctcctctccgtctttactcgttgtggtactccgcagagaggggaaaaagggccccaagctgggtggatatcactgcgtcccaacgcaagaaatacggcaggcccgagcctcgatttgtcgatagttcgccgaataggctgtatgcttttgccgctgcgtcgaacgatgataaagatcttcaccggcccgtttcgtcaagagactcatgaccgttcttgctagatgggagcgcttccctaatgacctcatcagtctccagcgactttcacgtggccgtagcactccacttgagtacaggagctcaagatggggcgctctccgtacagggaaccagcctcaggacgaggccaccgttagaagccaaggggtcgccagtgttgcatttaggctgctagaggctgctagaagctgctgaaagctgctgaataaaaccttcatccttccggtatgtcatgcgggtgtttaagttcaccgattccttgcggagtcgcgatccgtccgtcaagaactcaagatgggcttgggctcctgtctcggtccttcacggggaatgaaatccattgggctcagcgagtcaccgcccaaggtttctcgaccgaaggcgaactacaatttcagtttctgatctttacgccatatgggtggggttgctctgtgcaccttgagccctggacttcagtgtcatacaggcagcaaaggcctgatgtagtatggccgccgccagaagcgggaaatgcgcgacaaggctggcgcaagaagaagttggagtccaaagaataagaaggggaaaatgatgagaattgcattattataatgggtgagtgcttttttctgccgtagccggctcaacctatagctctactccaagggctcgctctctttgtccattcagcccttgtcctgtcggctccactgagatctgtcgagactcgagactgggccatactctttagtctctgccgtatcgttcgcaaccctcgagtcattttcacgtcggtgtaacactagcagcaggacctgaactgccagccggctccaacagcgttaagctcagggacaggcagtgcacctgtatgcccgtacggtacctaacggggtcctgtacagaccatgacgagggctggggtcacgtcctgtatcgcaatccctgtccgtccatctgcgagggggccactcacagccagcctcccccaccatttctgctgctgaggattcttgttcgtccaatcagcgtccagcccagctacttgtcgattctgaccccgtaatttttatctctcgaagccgtgatagactaatctgttataaactgatagaggataggtagttcgatcccgggca

SEQ ID NO: 9594 - DNA, 990 bp, Emericella nidulans
taaagtcagttataacaattaccattatacagcgaatgtactcctggtagagttgtggtatgctttcgttgggtatgtaacttgtggtatcaccagttatgacagaactatctacaaacgggcgccaacgagttgttgtggaaggataggacctgaaggcgctcttaccattggtctgttagcagcttattctcttcgactgctattcaacctatagtcgttgtgcttcagagtccacatttgacgaacatgtctagattaaacgcggggaacagatgcgcgcgtttcaaacacattgacccagggtgttgtattgtatggtccttcccatctcaacgctgttgaccagacttcggttacagtacgagactagtcattatattagcagtcctgcagctcacgtgaaaaaattgaaatcgaataagaaggctcaccatcggcctcataggccaggattccctgctttgatagcttgaagctattcgcttctactacctctcaccaatcgagtccaatcaaatggagcagaattgacagctggttacgtgtagaacgcgccctcgccagcggaagatcacaactccaaccccaagcgcttagccaccttcatggcgctcctgagtcagcctcgccttcctacgtcttccgctccatttagcccgagttattatggcagagccactatatgaggctgagctcgataccctcattgcccctcagtcactgctcatcaaccgcgcctcgaaccaacccatccttcgaaatatatcagaaaatttttatccttcaactcctaccatgcccgacccacaggattatacggttggctggatctgtgccatagagacagaacatgtcgctgctcaaagatttcttgaccacgagttcggtcgacctgacgttctggcgcctaatgacaataatgattacacattaggcaagatcggaggccaccacgttgtcatagctgtcctgcctggtggagaatat

SEQ ID NO: 9595 - DNA, 145 bp, Emericella nidulans
  unsure (1)..(145): unsure at all n locations
cgatggacaagagantaaactaccttaganaagcgagacggctcactcaggtggatgtgtntgctgacttatatcaagctgcgacaggaaaggtaggaatggatgcntgcgttgtgtanaagatatgggntccttgaatgggtag

SEQ ID NO: 9596 - DNA, 1131 bp, Emericella nidulans
tctatgactgctttgatccgatatacaacgtcttggtctgacattcaacctcgagctgccgctacgctatggcatttagcagttcgggcttgtcggggcatagcatacatatgtctttaggaattaccaacatgtacttttatgcctgggttctcaggcgaacatgagacggaaagggaaaatataatgaggcccaatgctttgtgagccttcgctatatatgagtagaaccgactcattagctatgtagtcggcaaagacctagatatccacggcttaagtccatgtgtctccacttgcaaggtaagattcgatcgcgtattgctctctttattaaagtatttggaggtctttttaagaaatagaacttagcaaggtatcctatctagggaacagcagacttgcaatttcgcaaaagactaggtaaactacactgccttctacgatttctttatattgatggccattctttggactcaggttgtatatcatcattgtctgcgaagaatctagttatcttttaatgcatttctcattccgttaagctgcccatcttaactatatactcacccactagtatgtataccggaacccaacctgtagacagacaatgtaagtatcgttgccaaaatagctgggaggaacaaaggaaaagaaaagggggggtggggattccaatccaccataccgtgttctggagcgccctcccggtctgccttgtactttgtatatagaaccctacggcaaatatccccacaataacaatcataaggatgtgagacctacacccatgttagctggaccagcctcacagtcaagcaccccaccataacgaatctatccaatcaaaaagatagtgaacgaagaaggtatgtccgcaacctacccaattgaaacccaaaccgctgtctgatactccggtgcttcagattgccgcacgatataactccctgcaatggagccgagcccattacaagctgccaccgctgcagcagttgtcgcgcgcttccactggcctacgatattgttcgccataaatgcgttgagggccgcccagttggagacatacgcgccggttgcgaggaacgtgccaacatagcgtactgttacttgggtagaagaggggaggcc

SEQ ID NO: 9597 - DNA, 1479 bp, Emericella nidulans
gggcggcacatagatacataaaaagtcctggattaatggagccgatagagcttcattgttcagcttcgttggtcgtgcttcgcccacaacaggaatgtcaaactggaccttggcttcttttggcgataaaatttggagtcgtcacgcaaagagctactggcaactgttatgctctcttttacttgccaaggctcaaacaccacttcagctcaagtccttaggcaggttgaacctgcgctatccgtgttggaaaaggcaattcggaactgggagttgtcatccaccttgcagtggaagtattcatcagtgctctgcaaggggtttgtttgcagctggaggtggacgcaatgctgctccttgcaccgacagcgccagcagtttcctctaatgattgccataaacagcccctctgcatgcttgagggcttttcgatagcgcttcagaaggtagctccagggccgtcggctcttcctggtatcttcccgatgagcagattggtcgataagcgtctggaggattgtattggtttcaccgatcttgtaaaggaggtcattgtaaaccgctctgctgacgagtttcagcgatttccgtatgttcaaagtctgagtaggttgtatctgttgatgagtatcgcgcgttagagtccaaccagccagtatatggagttcccaccttcatatctgttaaccaatccccagcttatgcgacaggtgtccgatcatccctgagagacaggtcatattgcccataaaaacctcataattccgatcagttaacagcgcagccgcttctccaagactgggcctttccatctatcaccccgtgggttatggataagctctgagacctgatccacgtcatccaccacaccctccaaggcttgcttcaatgtgttcagcagaatggtctgctgagtgctgaggccgactgaacagcctttcagctcccgtcggtagcttctgaaggccgtgtttttctctataccgcggacgtagccattgatctggtcaattagcagcggcaaaatcgagagggttagcccggcaacctcgataccggacgccatggctggacctcgttgtttgattcaagcctttggagaagccttgaattatctcagctggacgaggctactgccccgcaccaaagccgcatgaacgaatgcccaagttctgcatccttgcaagtgaccgcacctcaatacttcctgacgccagagggtttgaagtgtcaatcagtctcgcacgatggcagcaatcgcaggcttgctggagcgctgattttcccaaattactgtaataatcaactcagacgcacctttggatcacgaaaaggaggtcccaccgcaagaatggagggatgaaccgggccgactgcgtgtaggggcggtaaatatcggtgctcatcgaacccaacagtcctcattagattaccgtttgagggatgctttgcatatcaggattcagatcgtgcggctcc

SEQ ID NO: 9598 - DNA, 1752 bp, Emericella nidulans
actggttgttggatattttgactatcaagagtttgacttactagcctggacaaaagacagccgctcaatttttgggagtatttgttacttcctggtcctagactttgtgtatgggtggggaactggtccatattcggctcataggccttgcttaggtacgcgaatagtagcgtgtatgagtgaatgcactatacagacggttgactttgtgcgtatcatgagattgcgcagaggatcagtgcgagggttgtggtcctggctaaaacagggatcaagaagcctaggcacactttcccgtacataagaacttcccgatatagtcgacctgggagctctctcatccgtcttccgcccacatccatagcgtcagcttgacagactgaaaatctaaaagatttctgcatatttatcaccgacgacactatgtacaccactgcaaaggccaacctcaccacctctgcaaccaattcccttattctccctcgcccactcctctccctcaaccgactgccaaacagaattaaaaactggcctccaactgcacatcaccctcagacgcccaacagcggtcaatctgctcctgtatctgttttacggccttcacaccggtcaaagggtacgtctgaatcgtccaagacgaagccggcgctttgaatatattgttattcaacgttgttgatatgctcgttgcagccactgcatttgcactataaaagggatgggatctttaacttcgcgaagcgccggtccccaacctggtgggcgcggatgtgcgtaaagatagtcttggccagatcttcgttgatggcggagttgatcatcgtgtcgctgacgtgccagataggcacgtcgaggccggtagaaggcgggggttgagctgtctcgaattcggttaagtcgcgcgctgggcctgaagagaggcgttcgggttcgtttgggtctacaagcggcgggcagttcaggtagagctcgagagttcgttagggctggaacagggcgagtgcggtgtaggcgggtgtttcgaggccgcggttgcgttgaatggcgatgcacagggtctggagagaggggcattgggctgcaagggaatggattttctcgacagcgcataagggacctgttatcctcttgccttttgcgcggagttggcggagggtctgatggctccagtcttgggggccgacgttgagctttaattcgagtagtattgggccgtcttacggagggcagcagtgaggaaggttggtttgtagctacctaggaggcagacatatgtgagtggaggaatggagtcgaccattgcctctgcagctgtgtagaaggatagctcgtcgtcttgcggggggaagagagcaagggtgagtctattcagctgctggaagagacgaagattggcaatagcctgcagtacttgggtctcttcgatgcagcccaacggtccacgattttgagcagctgtaatcttgtagctaatcccacttgaggaactgcccagccggcattagggtcttcagctgcgacgccagctgttcaaactttgcacgcagtggttccctcccacttttttcctcaacaccaccgtctcgttgaagtcttcgttcggaccggcttggccacccgcgatgatctgcaatgcaagcctctcgacttgcggtgcacgaacaattacatattcaagaacacaatctgggtgctccctgaagttcctgcgctctggacacccgatagagcaaccaaaaccgtctgccgtat

SEQ ID NO: 9599 - DNA, 161 bp, Emericella nidulans
  unsure (1)..(161): unsure at all n locations
tgatnttggcggatgtcgaaactagtgnacttcacggaggcggagggcgttggaagcgcgggttagggtgtgagaggagggaggccgcattcgagaccttggtganaatggtaatgaatatggtgactcgangatatagatcgtggacgggacgggtgttt

SEQ ID NO: 9600 - DNA, 1388 bp, Emericella nidulans
gacacgctccaacgctacaaaaatttgactatgatgttggacgttttacgaagagccatgagatggaaggcgtttcagtgggatttaaaggctgattatatcgtttcttagtgatagagtccaaaagttctcacgacgaatctagaattgcttgcaagttttacgtatcttctatcccttccgaacgtgagtttcgtttgtacgagtagtcagactctcagcccggcttttgtagatctcaccagccaccgccgccacggttagaaaacgcggcgaagatcgcaatgataactcatggcttacactgcattgaagcccagaggtccaagttcctggaaatgtattacaggccaaccgttcactaaggtgattggcaccacctagaaatatctgatcgaggtaaacagccgcagcaccccacgacgtcagcgaactcctttagtacccatttccgagatcaaccttagagcttcggaataatttgtgctggtattcgagccatcatatttcacccttaccaaccgaccatggagcaccgaacattttgggcgtcaatgagcactatttcaaacctaaccccaaatctgggaccggcgtatcggcgagaaaggaccacggtccatccgtcaatgataacagagacaggtgtcatcggtactacctcgtatgctggcataactgattgtgctactttggggagagaggtagcacagggcagagcagttcccagtcaccttgacccgcccaatccctcgcgaggtactcagctgactctgtaacatggtataagacagttgtcagacatatcaatggcaacctgttttctgccccgaatgctgtcgtaaggacgagtgacaaactaagctaccttgttataatcagtaaagtagtaagaaggatgaggtgaatgaagcttgctttgagtactctgggtacacatcataccagggtgcggctggactgatggatgtgattaagtaccgacatactaggctgcaatatatataaggttgatacagggtatcacggatatcactgccaacacctacatcacgctcagtggtagagtttagtcttgctagtaccataaatcacgtgtcgcgatatcgaaagcatttagcggtagttgaatggctgaagtcttggggcagggacgctcgtcatggtattggacttatacccgctttagaaatcttccaatagttggtcctagttagcttaatacttgaactcggtattttgccaagtacagaactgtaacgcacgacctgattgtgggggagcttaaaaacagcaagaacggttctttgagtcatgaatggtaatttggcggcttgagcatgattatgttcaccgtatcaggaatgcccgagccaatggtaacgccg

SEQ ID NO: 9601 - DNA, 588 bp, Emericella nidulans
aggagtaaaaaccaaaacgtggtatggcttgccatcagaagaaggaattctggaagatggtccaagctctggcggacttggcagcggcccatttgtcattcccagtccactgtgacgtcgttccccttgttatgacgttcctgatagggcgacttgaccgggctcctccagttcttggagacgctttgtcaagtctgcttctaaccccacgagcgcactgcgactcgcgactcacgaccgaaagaacccgaaactcgaaggtttgagactgaaatgtgcgagatatttcgtcgtctaacagattattcacgttgggggcccggtggccgtcgattgggacccccgcatggtgtcatacggggtatgacgaaagaccaacggtagggttcaccatccagccaaccgtttccctcatcgctagactgagcggtccctggagggggctagacctttgcaatgatgttgtaccagtataaggtgacagggtctggaggggctagcgaggcgaaagatgtttccaggaggctggtgcacttgcagcgagtgcagcgaatgcagcgagcagcgcgaccgggatctcttaaaatc

SEQ ID NO: 9602 - DNA, 1409 bp, Emericella nidulans
ccaacacccaagtgagaacagtgacaatactattctccacattgaacattacgctaattcgagggattttgtaagtctctggggcgcgctgaactttagcaacatacccaatcgctttatgggctatgtgttcgtccggcagggctccggtcacctgttcaaccagcactacctgggcaccatgtttccacttggtcctgataatcaggttctggattcaaattcatttatggatacagagacggacttcctagggtctactgtcaatggttccaagggtacaggtcgacgtgtaaaggtccgagagctcagtcgattgtggttataccgaaacggtggctcaccagagtaatgaggggtcgtcgttcacttcctaattgtttacaaagtcccttctcattctacgcagggtttctcgcgccgcaatatatcattatctgttcatgctgccctggcattctgatggttcaattactagtccatacagcttgagaagagcatccatgtataaaaacacctcattcggctccttgcggaattatcttcttacctttctccaatatccgccgccctgtctccggccagcacttaagctgcactagataaatatgatccattcccacgttcctctcttcttggcctcgaggaagcccactgcctcttcgccataacagagccatacttcccaagcacaacaactaccgcctctccaaagtaaacgggatagacgagggttttatggtagcaatgtaagtcttgtatatagagttcattatgccgaatttgggatgcaccccgcacagatgttgaggtgaggtcccgtggtgagaaatagcaacatatggctcggataaacaagtcctccaaattaaaacaagtagattaccggataccattagatagcagaactcaattaatctgtacttagcgtgcagctttcttcgtcccgacagaccgtacttcctgctctagaaccgccagcgcagatgtgtacttggacttgagctccttcgcgttgtccaacttcatggggaccctctcaatctttccggctctggtgatcttgccattggaccccttagagatctcatttgtgaaccatctaccctctctatgggcaacaagggtccaggctgacccttcgttgcctgctctagctgtacggccgacacgatgcacgtacgttgtgatgctggctgggacgtcgtagtttatgacgtgtgttaatgactgaaggtctaagccacgtgatgcacgatccgtggcaataataatggagattttgccctggcggtaagcgctgagtgttttacgggaagcggacgatttgttggacttaacaattgtcccgatgaggccagatattgatggattgagaagggctaggagacgggagagacgcgatgcag

SEQ ID NO: 9603 - DNA, 585 bp, Emericella nidulans
attttcgcaagcgcttataccctaatattgagtctgacaactacagtgagctcgccgactcctggaatcgcctgcgtcgagaagctgtcgatctggctctggggaagctagagcgcgtgatcaaccgcagcgtcaaggagaacatccgccaagaatgtgagaaccacgttgccaaagagtgtcgggaagcgttctctcagcgcttggaccaagctccgtataagccaaagggtatgattctgggtacggtccctcgcgtcttggcattgtctacaggtactggtattatcggccgggcaccaattcactgggcttacgttgaggaggatgggcgggtccttgaaaacgggaagttcaccgacttgtctcttggggacaaagatcgcggtatcgccgacggcaaagacttggaagccttggttgagcttgttaaccggcgtcgtcctgatgtcattggggtgtccggcatgtcccctgaaactcggcgactttacaagctattgactgaaatcgttgatgcgaaagacctgcggggcgctctctacactgatgaccgtgatgaggaggtcagtgaccggctggaag

SEQ ID NO: 9604 - DNA, 2376 bp, Emericella nidulans
tagacggcaaagcgggaggtctatgccaacaggaaggcgcaaccggactcttatcattctcctggatttggccctcaaagggcatatcagaatccatctggtgatgaccaaacagacgactctgcgaggttctgatgatacagattagacccaaaggctggctgctcctatcctgcctattaaagtgcagcagcctaacgggtcctacgagactactagttgatagggcttctctatgatactaggagaagaaaatttctcgaaaaataagtacaccgtatgaccacagaatattatccttgtccattcagcttctatttcaacgtaaaacgcccgtggaccgtccgtgtacgcagacaaaaagaaatgcttggccgtgcttgaatcacagcttgactgtctccatcgccgctagaggattgcgatagtactcaagatgggagtcaggattcatttccgccattgttgtggtccacttcatctgctctgtactcaaacaattagcagggcttctactgtacgtaagcttacagtactaagttggacggtgagctctgcagcaccgtatccaaactacgacgaacagacctggactgcagacgtcagttcgtcgcacttggaaacggagcagcagggttgaccgtagcgatatggcccaactctatactgaacgtgtacgtagggcgaccctacagcgcatattccacgacgagagactaacataagctgttcgtcacttaatacggcgcagtggagcccccatacgcagttttatatttccgtaaaaaagaactatctagattgttgactgtctgttagtacgagtgaaataatacttgaagaagtcggcaataaagagagacgcggcagggccaggagagtttaggaacccatccgggagcagaagttgatttcaaagcattgattagagcaaaatccagttccatttatctaggcattttgatcctgccaaccgggtcatggactgtcaaccacgccgatgtcagaagcaccgagtctccgcaccaaacggtttcactatccgctcgacgtatattgcacgagaacgtacccagccgaccgcagtaccctcgtctctaaatcgggcctgcaactctgcgtagtctgattaatgcgatttcgattacgtttttggtgaatctgtacgtgcgtgaagtagtatttcaccttgtcttaagcgttaacggtacctcaaagccacttagggcacgactccaagggctttacctagtatgattaagtcagaagaaactacggtattgctaatgattcctcttagcatgataactgtttaaaaagaaaagagaaatataaagccaaatccagaaaatagcgccatcatcagacatcccacccagcccaatcgtaatgcgcccagagccagccaattatcaggcctatatagaagaggttccaatcacgccgagaaccgcacgacgagaacgatagcccgatcgaaaattctatccggaagatccaggtagcgggggttgtggctgctaaggagagaagatggtcaatttaagacaaaccagctaaaagggtggaggataaaagtgactcaagagacgtacactcggtgtccctcaccctccgctcagaccggcgctcatcgggttctgaagaaggcaggatctgctcaagcactagggcagcactgtcagctctggtctaggtctaggtgggtgcaggaggtaagctgactatcttttacgtctgctatcccctggaggatggactcgcttagatcttcgatgcgttgaagctccgatcctgcagcgatttcggctacagaccgtactccttccgatggagttagggccgatctcattcgttcttgatgatgtgatgagactaggaaaggagaggaggtatagtcggagtcatggtaggatctagcagcagctcgagacaggagcttaggtctgcgtaggttcatattgggaagagtagagtggactgcagatgaggaggtgagtaagtagtgaacgttccaggacatggacgagggaggacggaagtatagcccgagctaacattcaattcgtcattaatattacgaccttatatacaaagtttcaagtcaaagcataacagtatccagcccttaattcccacccaacaatattgagcccatacccaggatccaaggagcaatgcggtccaatcacacaagagaacagaaagcagcggacggccttgacgggcatccacgctagaagtcccataggtaagattgctcagccggagtgattactgaaattgatgtccacaaacgggacactgcacccgagcctcgtttataaccaagacggcagtggctgctgatccagggcttcaggtagtccatcagac

SEQ ID NO: 9605 - DNA, 214 bp, Emericella nidulans
  unsure (1)..(214): unsure at all n locations
gcattcgcgcaactcggagngaggtaagggaagcgcggcgtatatggatgtgccgcctgggcagnggaggggagaggtancacaaggcgtagatgacggataggtcgcatatatgtatcatgcgcttactacactggttctcgcntgagtaggtcantggatatgaaangtctgctggttgtatccgctacgtcgactacnagggtantaaaga

SEQ ID NO: 9606 - DNA, 972 bp, Emericella nidulans
gcgttcaaccacctcagtttctttatgtaggtttgaccatcctcgatggcaactttccagagtactaacatgagccacagtccctgcaatctactatgcacaccttatctccaaccgtgcacgtcatcacgatgatgctcctgcaagctctggcccccagagcggacccgaggtcaagctaacgaaccccaagccgaagagaagaaagcggatcctcgccttctgccgattcatggcacttcgaaccgtctgccctttggcatgtggtacatttagagagatgctatatagctgtaggggcgccaggggttgtaatcaggaaagcaatttcgggctttgtacacttcttccatctttgttgcctaatacctggcattagcctggatattgaattttatgtcattctttattgcatgacagcattctcagggacaaaatcttctggatttcatgcaagatccactgagctgcaatatttgaagcggactagtgatggagaggttgcttaaatcatgtaactagagaagacctcaaattctcagacggttccatgttatttgattgcagcacctgaagttgcatcgtagcttgtagcatgcttacgtagcgtaagcctcacacttgtcattctccagggctgcggcgactgtcagtcccaatcctcaaggtgtttgggttatagagtgttgcctcagtagtcataggtctcttgcgaaacaaggtccagcaacagaatggcaagtccaattgagggaaacctggaagcccccaactcgaacaagaattacactgatgcaaactttacgccgtaccggcacgagaaatacgtagtagtcttgaaacgcagcactggagtaggggcgccgcggtggagccgtagactgaaccaaaggatgtgcacgcccgactatgtagttacttggttcagtctatgaagaacgacgcttgtccgttattttggttaacaaaaca

SEQ ID NO: 9607 - DNA, 108 bp, Emericella nidulans
  unsure (1)..(108): unsure at all n locations
atagataatgattctcgaacacgtggcatcacgacaaatatgntccataatgngncacaacacactccacgaggaatgcaacgatgtgccttnaagacgtagtgactg

SEQ ID NO: 9608 - DNA, 2209 bp, Emericella nidulans
atatattaaaaagataataagaaaacttattaaaaatataaaataattatcgaaacccaaactaaaacaaataaaaaatatagcttttaagaaatataaggacaaaggaaagtcaaaataaaaaccattaagataagattagccacccatatagattgagaaaagaaaacaagtatcactagagccgctcagaaaaagaaccacttcaaggccaccgaaggggtatattcataccacttataatcaaaacccaattctctatgtagagacatcaataagggttaagctacctcaacaaaaggagactcgctcatccattgtacaagcctaagttccggcgcatttttgccagaggaaagccaggattcatgaaatggtggctggccattccggtcttgtgggaaccagtagttcttggcgaagagcttccgtgccctgatatgatgctgcaaaaaaccgaaggctgcggtgagaaaaaaattggtgaacctgtgcggcgctaaatggcaggaagggccggtatgctgtgaggaagaacaagtgagttatagtacaagtgagaatcggtattcaggagctaatcagttgtctctgcgataccagattgatgcgctttcgaaaaaccttaagctcgctgaagggatattctcctcgtgtcctgcctgcaaagataacttcttcaacatattctgcacctttacttgttcgccagaccagtcgctcttcatcaacgttaccaagactgagaagggaaattctgggaaagagctagttacggaattggataatatatggtcggaggaatatcagagcggtttttatgacagctgcaagaacgtcaagaacggcgcttcgggtggcaaggctattgattttatcggagggggcgcaaaggattaccagcagttcttgaagtttctgggcgacaagaagtttttgggaagcccgttccagatcaattaccacacagaacctccggaagactctcagggtatgcaggcactaccgattcaccccaaggcttgcaatgatgcagatccagcataccgttgctcttgtgttgattgccccgatgtgtgccccgagcttcctgcaatcaagaccgaagaacattgccacgtagggcttctcccgtgcctgtcgttctccgtcattctcatatattcggttttcttacttggcgtggctggattttcaagctatttcacctatagagaacgcaggtaccgcaagcctgaacgggtgcgacttctacaggacccgaatccgagcgacgacgaagatgagggcgacattgttcacgctggtggccatttggaataccctcatggatattacaaactcaactctatgctcgatacagtgtttagtcgtattgggtccgtttgtgctcgtttccccgcgttgacgataatatcaagcgttgttgcggttgtattattgagcttggggtggctgcggtttgcggtggagacggatccggtccgtctctgggtgagccctacttcagcagcagctaaagaaaaggcattcttcgatgagaattttggaccgttctaccgcgcagagcaagcattcctcgtcaatgacgacgagactggtgatggtagggttcttgattacgacaccctgacctggtggtttggcgttgagtcgcgcattcgccgcgtaatctctttggaccgtggattgtcattggatgatatatgctataaacctaccggcgatgcatgtgtgattcagtctgttactggttactttggtggctcgctgtcgaacctggacccagatacctggcaggatcgtttgacgcattgcgccagttcacccggcgatgccagctgcctcccggacttctcgcaacctttgagaccggagatgattttaggcggctatgaggattcagggaacgttctagacgccaaggcttttgatagtgacctgggttgtgaacaatcatgctccgggctcagaagaagaggccgaagcgattgattgggaagacacttttagaggaatattccaggttgtccaggaagaagcaaaaaaccgtggtctccgtgtctcttttaccacagaagcgagtgtcgagcaagaactgaataagtcaagcaatactgatgcgaaaattggtcgtatcagctatatcatcatgttcatttacgcatccctagctctgggctctgtgacgatgacatggagaatcgtg

SEQ ID NO: 9609 - DNA, 837 bp, Emericella nidulans
ctagtaacggccggctctgtagcagacccggcttaccaatcatggcattgctttctatacaagtggccagttgctcctggaagagtattatgttctcgcaatggtcgggaaggccgggctgaatactttgcatatgtgtgcaacccttaacctgagtccatcttatagatctcaagacgctaagcctatgaacagggacggaaatactcggctatgtactgcaacggccgctgccagtatgcgtgagtcgtttggcagcgacggccagccggggtcctatgcagacatcgattataccgactgcctgttcctggtcgggcacaacatggccgccacacagacggtgctatggacacgggttttggacaggctggaagggcccaatccacctaagctcattgtcgtcgatcctcgaacgtcagatacagcgaagaaggcgactgttcatgtcaggcctagactcgggacgaacgtggcgctcttgaacgggctgcagcacctgatcatcaagaacggctgggtcaacgaccagtatgtggcttcacacgtctgcgggctagaagagctcaagaaggttgtcgagaagtatactcctgaatatgtggaaaagattaccggagtgccggtagcccagcttcacgagactgcagaagcgctggcactatccggcagtctgctctccacggccctgcagggcgtctaccagtctaaccaagccaccgcggcggcttgccaaatcaacaacatcaacctcttgcttgggcacatcggcaagcccggcagcggaatcctgcaaatgaatgggcagcccacagcgcagaacaaccgtgagaccgg

SEQ ID NO: 9610 - DNA, 718 bp, Emericella nidulans
tatagtagggtcaccatgccctaccatcaggaacgcgttagtttgatttcttaaacggtgctgcctgttactaactccgcgccaaggcctaaaaataacaaagcatgccgcgtttgatcatctagagcagaagtggatagttacaaatctgccaaacaaacggcctcaactcaatatagattaatcagtttccatgcggttcccttgcgtcgagtccttgacataatcccgaacgccttgaataaacgctttcattgcatcaccacccccaagcggaacaccgcctcgacgcatgaagcccccattctcgactggaatctttagggcttcgctgatgctcggtaaccctccgtcccttatagccacggtcaagcttgcgagactttgcgtaaattgcggtgagcgtaggatctttctaagaatgttcctcttctgcgaaaggttgagggcgtctagaacttcttgtgcagtttcggggcgttgttgggaagccaactggtcctccatctgcagcgctaggatgagaagctcttggggcaagaatttcaagaggttatcaacgccctcgacatttaaagtgtccaagaaaggcagcgtggtcgaaggtgacagaagatcttgtagtgtagtgaaaggttgctcggcctgctgagattggttcctccgaatgaccttaaaaagttctgtaccacagccgaggcgtcggagtcaacggcag

SEQ ID NO: 9611 - DNA, 1614 bp, Emericella nidulans
gctagacggactggggctgactcgggttgccagagaggagcttgaccagggtctggaggagttgcagggtctggatggaaagctatcgagtgtcgacggggatctgccgccagtgagaaaacggcgcctggtgttggaaatcacttgaaccaacacagagacgtcactcttagtggccgcccgtcgttgctggaagaacaagcaccggatgatcgccgtctggcaaaatcagccgtatccttcttgatcccccaggctgacaatattgatggctgaagaattctgtcagaagtcggaagaatattagattactccgtagtcgaagccaaatgcttggatgtacctgtaaagctggagactgcgcacaactcacaggcagaagtgactgggtctccgcctgacagctctctagtcaagctcttgatctggctaggcaagattcgggcacagccgggggactgccgatcttactatccatccggcgtcgctccgtctcgcctttagacaccgggcatgtcagacactcgtcgctatcaccaagtgacaaatccaggcagcggccaactgcctgctattcagcctacagacgtgccattcgtcgggtcggggggctacccctcctaccctccggcaatatcaccctcgatattagtgatttggaattgatttgaaattgattgatttgattgacttggtttcgcagtttgacttggcttgacttgatttgacttggtctgacttggtttggctcgcccgacttggtttgacttgacttgatttgatttgtcctgatttggtctgacttgagttggtttgaaatgacttgatttgattcgtgatttgatttggaattggttcaagatttccaattgggtttcaaattcatcgttgtgatagcgtgagccgcgtcctgatccatccccgctccctgcatacccgccagagcttgtgtaattgcctagacgcgccaaaataccgagtacccctcaatcataggcgtaggtctctggtctagaattgttagattgaaatcgtccagtactcgtcaactacacctcaccacctcggcttatctcttgatgttgcaatcgaccgtcggtggcgcttggcgactcccagaatccccagtcacgctccaatgccggtacaagccggacaacctataggaaagctcaatctcgacttgcgtagagaggtggccaggacccattaggagcattttgcatagcaaggtccggtccgcagggagcgagcgcatactcgaattggcaaggattctccagaacgctccaaagtacggactaatagtacggactaatgcgagtgacgggagactgagcacaaggcacgggatgatccgttttgccgagaatcagtgcttccacaaagctagacctgcgcctggatgcaaggtctccaggcaggcgccgcgcctatctcagaagggttgcaacgctccagtcgtctctcttgctccttatggtaaaaggtgacggaactgacacaaatgagataagtctaccaatgaaggtagccgccttcccttaggaaaatatcgacgggctttatcacgccaatgaacggtgcattcgagacagttgaccccatgcttgt

SEQ ID NO: 9612 - DNA, 1571 bp, Emericella nidulans
cttccagggcaaaactctattcccgcgactatcccgcaagagaggatacgaggatgaagacgtactcgagtccggtcttaagcctgggtctgccatggacttcatgtcgaaaggtcttaattttgcctctaacgtcctttccagcgtcggcgtgacgtccaagagcagcgatcccaacgccgacattaatatcttctccgtcgcaagcggtcacctttatgaacggatgctcaacatcatgatggtctccgtaatgaagaacacaaagcataccgtcaaattttggttcatcgagcaattcctctccccctctttcaagtccttcctcccaaacctcgcttccgagtacggcttctcctacgagatggtcacctacaaatggcctcactggctgcgcgctcaaaaagaaaagcagcgcgaaatctgggggtacaagatcctcttcttagacgtcctcttccctctttctctcgacaaggtcatcttcgtcgacgccgaccaaattgtccgcacagatatgttcgaccttgtcagctaccctctcgatggagcaccctacggcttcacccctatgtgcgactctcgcgaggaaatggagggcttccgcttctggaaacaaggctactggaagaacttcctccgcggcgcgccctaccacatctccgccctttacgtcgtcgacttgaaccgcttccgcgctcttgctgccggtgaccgcctccgcggacagtaccagatgctctcggccgacaagaacagcctaagtaacctcgaccaagacctgccgaaccatatgcaacaccatattcctatcaaatccctcccgcaggaatggctgtggtgcgagacgtggtgttctgatgagagtctgagtcgagcgaggacgatcgatttgtgcaataacccgcaaacgaaagagccgaagttggatagggcccgaagacaggttccggagtggacggagtatgatgacgaaattgcagcgttggcgaggagggttgcggcgagtgaggttgaggtggaggttgagcagcagattcttgcagatgagattgaggaggagaaggaggctgcggcttcggagtggaagaaggatgagctttagtcttaggtctgtagactcactttatattatgctactttgggtttatgtatcactttagacagccttgatcgacacatatatattagggtcggctaaagcgggtactatatagagtacgaaagatgaattatacctaaacaagtgctgagaagccaagtgcggcttaattcacatttgatttctatactaggcagagtcaagacgagttagatgcgaggctgttaaaccctaatttagtacttgccagaggacccgggatttcctgcattatgcgtacacagcgggcatatgtttcacgtgcgaactgttactgttcacgaattggactccccacagtgctgagtattatacagttcctggcaccaagcacttccgacatttaccggcctttctcttcagggacgcaaatttccagcctctcagggttacccaacttcgaaggccccacgtccggcgcttgccgtat

SEQ ID NO: 9613 - DNA, 2302 bp, Emericella nidulans
ttatggccaacccggttgtcgagcagcttgctaggttgcctagagcttctgagcatggagttaatgatcatgcagattattttgcacagcggtgcaaggagttggaaagccagtatcgaagcgtttttagggatgctgtcgaggttgccgtagtcaggccttgtctcccattgcaggaaggactgattgcgcgctctatgaacagtaacagcggcgatggcaagctctatgtcaatcatgtcattctgcagctgaacaaggatgttgacaccagaaagctaaaaagctcttgggaggatgtggcgaaggagaacgagatattgaggacggcgtttgcgccactagagaaggagattgcgcaggttgtcctgtccaatgcttcttatcaaatgcaatggacagaggggaagtatgaagatttggatgaagccattcaagcacgaaatgaaaaacaaggacagatctcgagactcattattgcggatttatcaactgttcctccggcacggttccatcttgccagctcggcgagtgggaagccgctggctttgtttatttcgatacatcacgggctctatgatggcgaatcctttgcgatgatgctggacgaggttgcggcacggtatgaagggaggaaggtcggggagagaggctcaccgtctgtctttttgaggcatgtttgttcccaggacacagaggaggcgaagaggcactggatgcagcaactttctggatgcacccctacaatattccgagccaacggaaatgcaatcaaaaacaccatttccattcgtcgaactggcaacgcaaactctcggacttagaaacccgctcgtcaacactccagacgacagtccgaacctgctgcaggcagtctttgctctcttgttagcggaccacaccggtattttcgatgtaacctatggccttgtcctgtcaggacgcactatatccgccccaggggcggactcggtacttttaccggctatcaccactatccctgggcgtctcaacatgagcgacttgaaaaccgttaatgacgtggtgaaggatgagcagggagctaccgcaagatctttagacttccaggatacacccttacgcaagatccagcagtggctgaagtcctaagccccattgttcgattgtctgttctcgtatatccgcgccactgctccacctggccataacctctgggcagaattggacagccacatgccgtctgagtacccacttgcccttgaagtgcaagccgataatgcggctaatacactcaaattggagtgcatcttctcctcagactttggaccacggcaagttggtgaggaattccttgagaagatggacgctgttatttctgaagttgtctctggttcaagtttgcctttggagaacttcaacaccgtgcgatcagctacctctgcgtctcatggtgcatccgtacaatgggacgagtcaagctggacttcgtcagaaagcaggatacgagaaataacggcaacgttctgtggactgaatgtcgaggctgtatcaaaaggcgcttcattctttagtcttggcatagactcagtcactgctcttcagtttgccagaaggctgcgtgatgagggattcaaggtttcatcatcggaaattatgcgtttttcctgtgttgggtcgttgacaggacatattgaatcttcttccgcgctgcaaactaatggtattgggaaaacggagacggctatctcaatcgaaacctatgcaaagcatattcctctgcttggaaagaatgactccatacgtcgttgtttgaatgtacaccactgcaatcaggaatgatcacgcaaacgatcagctctggagggaaggtgtatattaatcctcatccaatccgtctcagggacaacgtgaaagtggagaagctcaaggaggccctgcgtcacgttgttcaggctaacgaaattctgcgcacgtcttttcacctcatcccggatctaggagagagctggattggtgccgtgcatgaagagcctaagtttgagtggagtgagatcaatatgccatcaggcgccaatgctctgtctgaggttatgaacctctatacgttctgtgaagaggcatcttttgagaggccaccgattcgttctggtcttgtcaaccagccaggctataggatcctcatagctgtcctacatcattccctttacgacggtgcctacctaccgttcgtcttcgaggaccttgcaacaatctatgcagggaggacccttgctcaacgaccacagttcttagaatggtcccctacatgctctcagggcag

SEQ ID NO: 9614 - DNA, 1336 bp, Emericella nidulans
  unsure (1)..(1336): unsure at all n locations
gataacaaagagaacggtactgatatttcgggcttgaaggatggaccaagtactgtgaatactgcctcactggcagcccctgcgcatcctaatactggggaaggaaacacatccatccctattaacaacatggggcaggctcaatcccaggcggatgcgccgtccgctgctaaaaagaggaagttgtcgcccgccgagcggaagctaagcagcaggagaaggaagcaaaagagcgtcagaagttagaggaaaaggcgaggaaggatgaagagagagctaagaaagaggaggagaagcgtaacgaaggaggcggagaaggaagaggagcgaaagaagagagaggagaagaggaaggccagggacgaggagagagctgctagggaggaagaaaagcgaaggaaagacgaagaaaaactaaagaaggaaagggtaggttctatcgtccattgatcattgacgaaagtcagggggacttgctgacacctagcaggcgcaaatgaagctgaattcgttcttcgtcaaaccaaaggtttctagtgagcagtcttcttcaggaactgtcgaaggctcaccaaaaaagccttcaggtgacggcgtacctgctcgtttgtctgatagaactcgtgaactctctgactacgagcgggagtttccagatttctttctgcatccaaatacgactcttgcgcctccgcacagattcgagagagatgccacagcactggctcatctacgagagaaacttgactcactcttaaggagcgggtccgttgaacaactgactttccgaccgtctgaggtgttcaagctaatgccgtataaaaggagacgcggctatcaaataatgtcagtcagggatatcttgcttcaaatgcagaacttgaatgatctaccagaaacctcggaagccgctcgtaggctccaggaatcattaaaacaagtgcggatgaaatcattaaaatttggggaagatgtaagaccaccataccagggaacttacacgaagcggctttccaaggaggcggctaccaagttgatgcgaaacccatttagccgcgcgctacctgaggtcaattatgactacgactctgaagcagaatgggaggatgcagaagaaggagaagagttagactcggaggaagaagaggagggtagtgaagatggcgatgaagatatggatgggtttctcgacgatgaggatgatcacctggcaaacagtaaacgacgtctgcttgtgggtgatcttgaccagtttgcacgggcataaatggcagacgaggngtctgatcagagttagaggcctacaactcgagatcatctaccctttgtacatttc

SEQ ID NO: 9615 - DNA, 793 bp, Emericella nidulans
taagccatttgcttactgacatccagtgccagtcagtgctccgacgagacttattgatactggcttgaagcaaggagactcagcccagtcactgccaggagatgctattcagtaatcggcgctaaaatggatgagtgtctaaaggataataaatagtctcgtctcacagtttattaaagaaatatagaagcatataacatcacgtaggcgaagaagttgccatcaaggtccagcctttatataagtacatgtcttttttgattaataaaacaatcaacgcagtggtatcaatcaagttatccaaaatgccgctatcatcatgcatataagaaaacaaaccaattccagctcgcaaatcaagccatcaactcgtcaatatccacgacatccccctcctggttctgggagaagtcagggagtagcatcgctggctgtccaatgagctgccctccagttccttcagtccaagcgccacgttcctcctcagtagcaccgaggatcccgttggcgcgcttaagcgtctcgacatccaggtcggtgatataagcttcgcggtttgtgccgtctccagcaccaccggggagctttagccggacctcgaactcattgtcgagcatcatttcgtccttccaaaggcggcgctggccgtcgaagacgcagaggacacgcttcttcatcttgatattgcggctggggcagccccaggactgtgggtagtggtcgcggaagttgcgtcgtttggacgcggtgagacggttttactattgttgtttagcaacacttgctaatggcg

SEQ ID NO: 9616 - DNA, 312 bp, Emericella nidulans
  unsure (1)..(312): unsure at all n locations
tagtattgnccntcgaggatgactatgagcatgagtcacgtgatntagccgtcanantcgantggttactcttgtcttttctgctccgnttgattgttntttgcacgaacaatggcgttntgcagctcaacgattgctcgggatgcctactaatgctactgtactctcgtcacctcgagacgacgtccaccatgagcgttcnggggttacgattttgccttcacaacagacttatgacgttacgcctgcacgcatgtacataacaatgttgatttcataagactttattngttcattttctatcttgacaaa

SEQ ID NO: 9617 - DNA, 1029 bp, Emericella nidulans
ttatcaggcacagccgtaataagaggcctagattcttcgggcgctcgtggtgaccagctagacactggtagagcaacatcctgagatagcggcttttctgattcggtagaagcctggggcgaggtgttgttctcgaccacagcttcgggcaccgcattggcagacgcggcgacgttacgggggcccgaagtcacttcgtcctcggccacggtcttatgtgttgagtctgctggagtggcggaattgcgaacatcacactcagcattggtctcaggcactgcctcgacgcagccggttttccgcctcaaattgctttcaaccatggtctcagaagctgtatccgcggcagcagcggctttggaggcagaattctcagatacggtttcgcgcgctgtacccagttcaatggccggcacctccaaaacttcacacttgtcaactgaacccgacggatatggggaaggcgaaggcgggctggctctggtttctggtttcacggcggccacggctttgatattaccagcttgctgggaaagcgggtcttggggtaattggggtaaaggactgccaacctcttcaacaatggtttccattgggcgagctgactgtcgacgccattcattctcaacagtacgcttctcagcatgcatgacccaggaggcaaattccgcctcaacagcctctaggtcatcaatccagttctcaggtaaggaatcctcacggccatccagcaaatcgagaatacggtccatgcgccggcccgccgataacgcaatcgactcgagagcggcccgcttagcatggtaattagtgatgcagtataagtaatccttctcggtcggaggagttgaagatttcaacagatcgaaagctgcgttggcttcagatttagcgagccgcaagtctcgtaccaacccaggtatttgcctgcaaactactagtcgcgcatgccatgtaaacaatagggaagtcaagcgggataggagcggcagcgttcgaagaataggtgcagtaagtcagcagtacagt

SEQ ID NO: 9618 - DNA, 1216 bp, Emericella nidulans
gttttgttttacttaccttctctttggctaaaaacgtcacgcaaaataacagcaatacacattttctgcttctggggcgactcgggagatgttcgatgaatgtcatagctcccgaaagatgtttcaaatggtccatcaggactcgtcttatcacatttagtggcaaccagcacgaaaggaacagaggcggcgatgaatgtttctgaataggagagatatggtaagcttctagtcaaggagacccggaaggaacccggacaagacagacctagcatctttgacgtttccggaacagaagaagggcgattcgcatcgtacaagagcagcgcgccgtcgatgctgggggttgaatcgtttcccagcagtggccatctcaatcttccattgccatcggaagagatctcgtccacgtgaacttcaactaagcgaacaacgtatacggtcccatctaaagacatcttcttcgttgtagatcgcgaggtaagaggatgtttcatttccaaggcgctctggataaaggtcgttttgccgactttgtccccgccaacaacagcgatgctcacatgcggaaagctcgacttgagattagcctggttagcctagatatagttcaactgttagaggattttctagcacccaattgcacgaacagttggaggcatacctcgtatccgacctggggtgatgagaccccggaacatccgccaaatgttgagctttcatcttcctcaacgagtgtccgtccaacactactgccaccttccatcgcagttctggttgaatcaagtttgtataatcccccgggcggacgggaacttgttcgactttgtagacccggtcgttgagggacgaggcctgcctgggcccgatcgctggaggcccgttcccttctcgagggttgggaggccatattggagatctcaatcacgcgtatcggtggacgggcctacgttgcgattaaaggtcgatcaagcaaacaggatacgacagcgcaaggaccaacggctaggtagatagacgaggcggacacggcagcttatccattgtcactttgaatcaactcgaaaagacttccccgtctgccaggcgtacactgttttttctcgcttgtaaatctgttgaaattgtcactcgtggatattgttcaatgcagttcgaaggccgtgcaataatctctccttttcttcctccttttccccggtgaatcggcggatga

SEQ ID NO: 9619 - DNA, 505 bp, Emericella nidulans
  unsure (1)..(505): unsure at all n locations
ctataaaatatatattagtagatataaattagattagcaactttattaaatattataaaaacttataaatatattttatataagattagctataagtaggcagaatataagaatctaaaaagtattataatatatttttactagttacagcaggtttaaaaataatatttatagttttaataaaactaccattattataggtattataggtattataaaaattatattatattaataaaaaggtaagtaaattatattttatatcgccaggtaactaggaataagtaataataatcaaaatattaatttaagtagttaggtattttttgtaatattttatctttaaaaaaagctntatctaaaagattagtgctaggataataatctattagtaaactaaagaataaaaaactagccctaataactagataatagattaaataggcctttaatggctntaaaaccatttatcttaataatataggcctataaaggtagctgctat

SEQ ID NO: 9620 - DNA, 1760 bp, Emericella nidulans
ctatatgtcgcaactccgatgatatccgtagggcccttgtttgtcgccgtgtagaatgcaagtgccgtctcgccgggaagtacgcggacctcgcgctgctgcggtgtaaatttccaaggtagtacatctgacacggagccattgaacgtgatccgcaggcggcgcgagtcagtcaccggggtgacgcgcgatgatgtgtcgccgtctcctgcgcggtgtgtgagaacaggttgcccgttccagccggtttgttggcagatctgagagtgaaaggctctggctcagcattcgcttaaaggatgcggaaagttgaggggaacaattggtgtcgggactgaccattttatacaatgggacggagccgtaggcgagggagactgtgccgaggattatactgatcgtataatacctattttgcattagactattcttcgactgagctgcggctggcatacatcgtggaagcatttcgcttctgtgactggggcgtattgaacggtgccgacggcgactgatttagccaggaattgcgcgaaaaatatctccgccctggagccaatcccttagcttgtgagagcacagaccgggcagcgccggctcctggggataaggaccatccccatggaggtgtcagtcgagaaaacatggctgtttttgttgtagcggatataaacggaggagaaacatcgcacgatcagcggacaagggatttatatacacgtgaccaggtttatcgataaactctactccgcactttactaagtacttcagccctagatcggggctaccatttcctaccatcagagtattacgaccgaaccaagtggacctgtatgggtaaggttgattgtatattatagaagagtacggagcatctagaatgatgctggccggccagcacctcccaagcaaaagaatactaatacatccgcgtgaagagatcaattcacgacacttcgtccaatcttgccaaagactcctcgaaccatgtcggggctttctttgagacaggtaagaaggacagccgcactgatggcgaacatagtacgctcccgatataaatactagataaaagttccaattagttagagttggaccctcgaagtgaagaacgttgcagcaaagggtggttgtgacatgcgcaatgtcacagtgggagcagtgtaaccatccccagccaagcagagcaggtttgtatgcggagcggttcaaccataccttctgatcataaaacctgggtaggacagttgctgcagccctgggtgccacaaacaatgcgatctcctgccgcttctttgcatgttcgacaagaatgctccaaccacacataacacatccggcaccgacgcaaagtccagaatcccacatctgcggtgtcaccgtttctctactgaaaagtctgggccccagccttgttcggctaagacagacagagtagtagaataaactgacaaatgaggcaagaaacgcggaggaccgtagagcatcagacagagcccgtcgaactgactccgctgacttcatcgagcgtatacggaaagcggtttgcaaagggatgtaggttgcacatgcaaacttaaacgttctaagaaaccgagagacagcgtgcttctcgcagctagggccgcaccccatgtgcaccatttcacagggaatgggaatggttcgagcagggtcgccccaagcggtaggccagccaaagtccttgcacatggattccaatagcggagctgtccagtatcttttccgtagacaaagat

SEQ ID NO: 9621 - DNA, 211 bp, Emericella nidulans
  unsure (1)..(211): unsure at all n locations
aggaaaggaccgttctatgctatgtgattcgtctgaggtttatgcgtacgtcgcgtttcacagacggactgagtttgatatccgnttaggatagcagttanggtttaggtgggctcaaatatcgntttnacgatctccaggtcatgtcggttctgnaggttagatctttgtgcaagctcgcatcggtggatctanttngtataggtagaat

SEQ ID NO: 9622 - DNA, 176 bp, Emericella nidulans
  unsure (1)..(176): unsure at all n locations
tgtataatgtcgacgttaacaggangatgangtgctagtgccgtggctgcaagtgttgctgtgaaacatgagcttcagattcttacnggtatgaattggttctgatggctgctgaatactaacnactacgttactggtctcangaataggaatctgaggccggagttcantgagat

SEQ ID NO: 9623 - DNA, 111 bp, Emericella nidulans
acaccaccaactccgcgtattgccacaatatcatccagcaccatcagcccatgagacaaagttacctcctgttgtaacgctcccgagccccaaccccgttgataccacaac

SEQ ID NO: 9624 - DNA, 399 bp, Emericella nidulans
taaccgttttgagagcgatcttaggaaggacagctatcgactccaggctcgagctggaaggatgtaaaatgatctttgatcgcggcagacagtatacgcgctaccactggcaccggaatagcgagcccgtggacgctaactggctaactgcgtcagaagatccatgaggctgttgcacggccactggcgagtacttcgtagcaacacgcacaaacagcatacctgaggcagctcgcgatagtacctactcacgcgctgtcagcggacgcacatcgccatacagacctcgagacaagactgattgcccctaggctgcaagcaaacgcagcgtcgccatacatccagcctacgaaagcagagccatgcccggctctagccacgcgacaacacttgatgctg

SEQ ID NO: 9625 - DNA, 947 bp, Emericella nidulans
tccacgtgtcgccgcatcgagtgcaattcctgaccctgtagcgcctccgccaatcacgagaaggtcatacacatccgcatcgtcacctgaagaactgcgtttgagatcctcgatttgctcaaggcgcgatttgattttaggaaagctgggaggcacaagtttgccttcatgataaccgggtggtggaacagccggcgcttcgagaccaggaatgttacggggacggatcgagaaatagagggcacctgcacccacggttgtgactgcggcagtaccgtagaggagaggtcgcagtatcctgcgagtattacgagatgccattctgcaagatgtgtgagatcaaggtcgacaattcaaacgtatttgctagcagctgacgttggactgtcgccgaggcgatgagaacggttgcgcaatcagtatctcgaagaatgttttatgcgcgcaagtaatatctagagaatctggataataacgaaagaagtcagacttgataacgttcgctgtaagaattgaggcaagacaagcaattggaagggagaatgcgacgaaggatttagttggggttgcccatacctatcacgaacgaggctgttcaagatagacgaaagagaaggggaaatgagagggggaaatgagagggataagagtgagtagggtataatgatgagaaagagaagtagagagaggtgatgtctaaaaaggaatccaaggaggatatgaggacgtggacaaaggccgtcatggtggaaatgaccgggtaaccttccattctcttatactgcgtcatgacgtttcctcagcagtgcgccgcgtgaatggtatccggttgacccccttcagactgccaagttctagcaggtccagcacatgcgaccattggagcacaattgcaagtggagcgatgacggcttcgcggcgtaaatccaggttgtcccaccaataag

SEQ ID NO: 9626 - DNA, 1520 bp, Emericella nidulans
cctgtagcacgagccaagatgtgtcacatgacttgttaatatatatattttgcagtcgtgcgtttgtccatcaaagatataaagaattgagcaacattcgtgtctttatcttcaatattccttttgtccgagtgcttttgttggctcacgcgtcgtccttggagaccgactcgccacggatcagcctttcttataggcattgacaatctatcaaggagcctgaaagcaagaggtcactgacattcctgaataattatgaatagatatttatgctactttgagcagataccctgtaatgagcagcgtggaatcagcacataggatttgtccattttttatcttcgcgaagctctagaggagtgatgctggctcggctagcaggttgctgtatcgtatacgttggagagcaaggatctatagactttcccaaagtctgacgttgggatggagatgactatcaaaaagccattgtcgggattagccccaagtctggccaatgcggcattgggttagttatggtatgtagccagagctcgagatataactaagcttatttataatggtgtacccaatacaggcttaatatgtatcattggcttatcttctcctatagctgacaatggcttatataggcattattgggatcttcagccttgacatcgttgccctccaagattttcttgttccctactgattgtatagtgctctgattacttcaaagtaatatttgagataatatttttattactctttttttatcacttgcaggcattcttcatctaataggatttatttgctaatcttaactagtcttactactgactttgctccagaatcgactaagagtgtttgtttcagtccaagtccctcctaaagtacctatatagtccagacaagttgtcgattaactaacgacagatagagtcaaacataggatacccagcaaagaaagtggcgagaaacacagcatgggtaaagctacctcacccaagcctctaactcccccgaacgaggaaagagctgggctggctttctgtgacagcctacttcacctaagcccaggcccctctaagtaggtacctagaaggaagacccccggcgctttgtcaagctaatagcaaagcccttcagcttcaaggaggcgtcctcgccaggagcgagctgtattccgagagtgtctaacacagcgcgcgcttcgtcatcggtaagcgctgcatcatcggctgcctctacggcagccctcacttgaaaatagctgttcgcgacggtgacggcatcgcggagactcggatggaggggtgagccattggtttccaagccactgactgcgggggaagttaagtcgttcggttcatttgctccagagaaggacttggagtcggaagtggaattgtcgtttgaagacatgtctgtgggtgtcggtatggttgtctcaccaggcttgagatttgtaagtgaatggtgatggctaccaagtgaatgaaggaccttgacgagatgagacgaggtggaataagttt

SEQ ID NO: 9627 - DNA, 939 bp, Emericella nidulans
cgtcgccgacatcaagccaatggagttgccgtttgccttcgcgatggatctggtgtggagctcatcgcggtttgatttctccactattccgagatatctcaaggcattcgtcttgcgggactcggatgcaaggacaacgaagcagaggagattgcgtctatcctcctccagcacagtgagcttgttgggcgccgcaagtacgaaggggttacatccgcgacctattccttctacaactatcatgaggtcgaacgagtcctgcaagaatgggaagaccttggagacagagtgacaaaggccctcgccttcatgttctcagccagccaagctgcattcacacaccttgtccagtatcccgtccaggccggcctgatttaccaccgcatcgtccttggacagacgattaaccagcaattcgcgattcaacgccgaacacagcaaatacagttgcagagcaaatcctcgcagcggctgaagcagactcagatctcagagaagagtttcatgccatgcttggcggcaaatgggatgggattatggaccaaccaaagctggagcaatggcaatgggagacgtggctgtacccttctcgggacattattcagaacctgtcatttgtgcagccgtgacaggacttcgtttataacctgggtaacctgggaatatacgctgagggatcgcgaagtgccgctatgcagtcgtatgtatgcgagtcgtgcgatcagactgcacccactgttggctcacgagcgcctatattgccgacgatggacccatacggcccggccttttacacggtagaccttttccaccggggcaatcaccggaaacccatctcattcaatttgagcataccctacgagtggatcaatatcagccttgtctcgggcaagtctcgcaagaaaacccagaggaacgcctgacagtgtcaatcgactg

SEQ ID NO: 9628 - DNA, 621 bp, Emericella nidulans
acgagactctatcgaacgaaggttcagaggatgcgagtgtgatggaattcagtgacggcagctcagagtggtgtatgtaggtgtaggctggccttggatggtgtgacaacagatgttgtggcttggcttgccgctgccttcccgtcccgtttggaactcgaaacgcactcacgactattggcttttcctctttgttcgcttcagtggattccttaaatccccaagagtccggattgatgacacgcctgatgatcgccatcgaaccccccacgccagggcatccgctttcctgcatccggtaccgtacgggcggacagcaattgacgggccgtggtctagaatcccaacgcttgcttccaagtttcggggtcgatcatgagatattagcatcatcccaagtccattcctgtgggaagtgatccgaccaatagccacttggagcgcagatataccgatacattgccgcagggttaaggtcagatttgcctgtagtcagggcatcgtcgccaaacgccaaaaagtaataaatcatacatagtagatatctaaatgaatactagataagtaagcagatatatgagtaagtaaccaaaaaattatattgtgtaaataaaagtgatg

SEQ ID NO: 9629 - DNA, 299 bp, Emericella nidulans
  unsure (1)..(299): unsure at all n locations
tggcaatggagttcttgctggcataangagcacggtagggaaanccgtgatatagagcctacgancgcaatttgatgtgtgcgaagctttcatctgtgtatcgtagacagcgtgcgtaccggataacacgagtactngacatagtattcgggcaaaccattttggaggtgacacgtcggtgccgtgtcagaagaagtgatcatcgtaacgttgacctgctaactatgatcccgctcacgtatggcaatttgcangacacgaggagacgacactcacgtcaatgatgtagtcgcatggta

SEQ ID NO: 9630 - DNA, 1092 bp, Emericella nidulans
tgtcagcgttataccaaaatttacgaccattagccctaatctttcctcaggtacacgttaggtcgtagatgctaatttgctttgttgcatgcctgatttttgaggctgaatcccgctgaggtccgctgaactcttggcactagccctagccctaagtagccctcgctacgcaaaggcggtggacccacccgcggaacccagaaacactggaggaactttgcgtgcctcgataacttcagccaacaacctcctcatcgccaaccagtcgtctcaccgattaccaccgtcgcgatggctcaagaacgttccggtattgcggttggtctcaacaagggccacgtatgtatactgatttcctttatctgatatcctccaaatggtgaatggattttcgatggatgaatggacggatgggatggagcttccgatgtcgagtcgaatcgaattgagcgagacgagcagaaagcgatcggttttacgtacggttcggttcggattatgtggaagtacactcggattgagttgaaatgaaattagaggttgcgggcaacgaagaacacgagacgaaattttacgcccgtgtacggccgtcaagaagggactagcagggagattatagcgtcaagaatgttatcggaagtcaccgtatttgcgtcagcctatgcctacgttgtctattcagttcggctatctgctcggcttatttgattcgacacggaaactccggaccatacaactatcatccatccagcaatccatccatcctattcttccaatctgcggtattccgaggcccctgaactaacgggtcgtatctgctttagaaaaccacccccctcaacacccccaagacccgcatcagccgctccaagggcaaggcctcccgccgcaccgctttcgttcgcgacatcgcccgtgaggtcgtcggtctcgctccttatgagcgccgtgtcattgaacttctgaggaacgctcaggacaagcgcgccaggaagctcgctaagaagagggtatgtctgcgccttttgctggttatccatggcaacgaatgggttttgctcagcagagcttgatcactcaacttggtttatt

SEQ ID NO: 9631 - DNA, 640 bp, Emericella nidulans
atctacataatgcaatatgacaaaggaacaaaagaagaagctgaatcgcattgaaatataccaaatcaaatcaatcaatcaccctgtcctggtggtatccgcgcatgcttctctattatttggagcttcagagcacgtgtggttttcttgcacagtgcaggacattctcgttgcttgcttaactgataaagcaaagacaaccgatcgcaatataaaagacaaacagcggatataccgcgataccgacccggttccgcacgacaccagagccccctagaatactcactcctgcggccagagaccaagcaatcaagaccaggtagaccggtatccggacgatcgtgggcaggccgaatgcgctgagaagcgacgggtaacaagagggaagagcgtgtaaccgatgatacagatagactgaaagaacgaactgtgctagcacgttagcactaagacacccagaaactggtggcaaagaagattggaagtcatacatattcccacccaacaacttaatttgcaatgttacaacagcctccccgacccagacgagggaaaacaccccagagaagaccaaatccgactgatcccccttcgccatagagaggaacatactcagcagcaggcagaaaataagcgggcc

SEQ ID NO: 9632 - DNA, 757 bp, Emericella nidulans
cagtgatgtcggagcctgagaagcctgtccatcaacgcctggttagtcttttctttctgttttataggagacgacaaaactgatacataccttctgtaacatgaacgagaacctcaatatcctcgtcactaaggtcatgtacttgatggctcagtaatctgcgcagttgctgttcccgaacatgatgctccggaagaggtatgtactggcggcggacaaagcggcggcgcgcggcttcgtcaatatcccacggcatgttcgtggctgctagaacgagaacacggctggcgtcacccgactttactggttgctcgcgcccagctgcggcacgctggaggtcagaccattgaatgagaaattcggtttttgatcggcgcgacgcctcattctccgtccctgacgaacgcgatgaaaggagcgagtcaatttcgtcaacgaagattatggagggtgctaatgactttgccaggccgaacaaagctcgcacaagcttttcactctcgccatgccattttgatgtgagcgtcgatgctgatacagagaaaaatgttgacttggactccgtcgcaactgcccgtgcaagcatcgtctttccagttcctggaggtccgaagagtaacatacctcgagctggttcacggagcccggagaagaggtctggtcggaggaatgggtataccacggattctttcaatgccttttttgcgccctctaacccggcaatatcgtcccaatggacttcgtctccacgaacacg

SEQ ID NO: 9633 - DNA, 1115 bp, Emericella nidulans
ctcgtctttatcgttactttctaggatgcaagactcccagatcaagcttcatggacatagaattgatttgtttgcgatcgagcataatattagtacacttcctttagtcaagcacggcatggcatttttgtgcgaatcggtacccgcataagggaggttgatggccgtggtatccctaaacggagaactatcttcaaataccgtgccattcaagcttcttccaccgtcagaaagaacatatgccgttacggagcttcggcagcagctctcgaagcgtattcctacctacatgattcctgcagtatggctatgtgtcgaagccttgccactgctgccctccgggaaactaaataggagagaaatcataagctgggctacgaacaaaacggatgacttccagggcggagcttctgagtccagtggtgtcgagactccgaaagccgcccactcggaggtcacagtagaggatcgattaaagtcaatatggagtcgcgttcttgccattccccgtgaccgaatcagtcttgacgaaagctttttggctttgggcggcgattcgatagctgcaataacctgcatgggctattgtaagaaacagggaatgggtgttacggtgcaggacgtgctccaaagcaagtcaatccgagatctggttacccgcgttcaagagatcaagcatcttgtgaaataccaagaggaaaccgaagagccttttggcctctctcctatccagaaacttcatttcatgatccgaaaggagggccagggttactttaaccagagcgttcgtacccggctgagccgacggcttagcgcagatgatttaaggcatgcgatacaggtgatcattgagcgacactccatgctccgagtacggcttattaaggatactcttgtgggaaaccttcgacagcgcatcactagagatattgactcgtcataccggttgcgagttcacaacatcaatcaccaggctcaaatggagagtgccatctcggtcagtcaatcgtgcatcaacgcatttcagggcccaatcatggctgtcgatattttttacacagaggatgattgcttcctatcaatggttgctcatcatctagccattgatattgtcg

SEQ ID NO: 9634 - DNA, 654 bp, Emericella nidulans
gcttgtcccatggttctgttaatagccacttcccacgtgactacgctaacacttcatcggtctgccggatcctcatctctctgtcgctcatttcaacacaccagtccattcaggacttcggcagctcgtcaactctctgtaatctcctttgctcaaacactgtccataacgctccgcttgaaacggcgagacagtcgaaaataaaaaaaaaaacaattaggcagcttggttttaaaacaagaagggttcgcacaaaaaatcgcccgttcgccgtcgagctctaacgaagccaaagtgaccacattcctttccggtctgcttttccttccatctggtcagcttttttaggataaggaatatctcctgcctacaaaacactatgtcaggtctcgacgttgaggctctacttgagtctactgccgcccccgctactcaacgacccgacgaccgctcaaaggccgaaaatggcgaccgacgtgatgagcgcgaccgctcttgggaccgggaccgcagacgacgggatcgtagccgagacagacgtcgctcgaaggatgtcgacggagatgatgatatgagaagcccgaggagcgaacacggcagtcttaacggaagccatagaagtaggaagaggagcaggagcgcgatacgaccgtc

SEQ ID NO: 9635 - DNA, 1878 bp, Emericella nidulans
  unsure (1)..(1878): unsure at all n locations
atgcggtgagttggttctctacagaataaactcacgacccatgacgtatcttaagacaagaaccgacccctcggggctattgacgaaaaaggtagtctgaacggcataaactggggcaagcgacgtcgtatctctcggaggagatcccnccaaggggcagacgttgctcacatcatggcctagcgacttcttagccagagggcgacgtcgagcatccccctcgatccacagtattcgaagcaggcagcggagacgggagatgaatatttaagatgaatattaatctatttttccatcatcgccggcgggtccagcgggcgggaggatcagaagccagtctttaactgctgcgacgtcgactgcttgccaggcgaacagaatctcgatattgatgttataactgtattgcactgagggggagggaattctttctggacctgggatactatgtctgcctcctctgtgcggcggtcatgaaagtgctagttcgtgtcatgcgctacgaacagcacctctggcataatggaggtctgatgagaatagattctggatgtttagtgtggatattgtcctcacgaaaaactagactttactcaaagtactccagagttattatgaatgtcaaaagccagacaccaacttgctctaggcccaaattcatccaccaacagtttgaccagttaaatctgctgaatcagtgattttggaaaaatatacctttcttacgatattagccttcaatttgtaaatctcctaatccatattaatgttaactcatgctatcatcagtttatttttaaactaatatataacgccaaagttgacttaatcgacatatattctagaaaaagctttaaatcgataatcgaaaattggactacactgcttataaaataatatatcgattatactaaccacttctgcatcatctcctgctaccaggctaataagaattaatgaataaatatatctcatcgcaccataaagaagcttctttttatctcaaattattgttaaggtgtgcttattcgaggtagaagcagagcatgtccggatgacctgatccggtatatagctaatgtgttcacacattcaaacgcacctccacgatgaatcgtgtactggggagagcgcagaagccgccgtcgtctaggatggtgccgacctgatcctaattcccaaaaccaacatcaacacctgctgtcggtcccgaatgcttggatgacaacgaagccagttttcttcttttctttttctttttttttttaccctcttcaaaagccgctcaagataggactgtttgactaataccatgtcctgtgcgtatttatgctcagctggtcaaagcggctctaggtgtacacatataaactggactacaatgtgctttattaagtactggtatatctcgccacttatcgacgttcatgttaatgatcttgaattttatcacgtcgagctctgaaccttggagccgttcactgcattgcatcagggctttgggtattgtttgataaaggtactaacctaccctaaatgccaacttatatgctccatctcgcatcataggcgctttaccttggtaatgggggccaatcagtccggcttcgcacatagctcgaccttgggtacatatggaagtaatacccattttagaatgcctagcatatatgtaagaagtacagtcacgttgaaacagtctgctattttgagaatatgatgcttgctgggtgggaattgaccgcagttgagctttgatcaggttgccatggtgcgcgtagatagctgtcatttacaaatatttcttccctgacggttcggcgggatatccgccgagaaaagttcgaatatttgagcgtgtttcgtttgtatattgat

SEQ ID NO: 9636 - DNA, 1456 bp, Emericella nidulans
gatactctttgtactctttccaggatcggacttcgctgtcaggcatgcagcgaaagacattccggaaaatctttgtattcttttcggccacagcaagccaagtgtccaggtagaatacgtccacgacaggatccctcatgcaatctttgtcgacaaaaatgtgtttcaactcctgcccaccagggatcgcgagcgtgggagcgtctattttgtctctagtgatagctgagagtaagctgccgtcttgtgaaagagctagggatgggttatgggctatcggcattccttccacaagctgggaggcttctccatcttcagaggttagagcagaagatgtggtcttgggctcttgactgtccaagctagtatttggctgtgagttcttccttgaggctgctttcggctgcaagactgtgcccttgccctcgctagcaacaggggaaacgagcacttcgcatctgttatcaagaatttccgaatcacgagaattacctaacccatgctgctcggcaacttggaaattgtcggcaccgaacccgtccacatcctttttatgttcctggttggaggttactcttgcatcagcagtgagttttctattggatttgaggtttggattgttgccctgttcccaatcgacgtcgtgattgaaactgtgtaggtcttcggaccgtgataagaactcatcctgtatgcgatgacgacgttcaatcatttccctttcatcttgtttctctagcattaaggactcagagtcgacatgagcggttcgagacggcttggcttcctcttcgtcgatctgaatctttcgcagttcttcctctgtagctaaagagtgctccattaattcgtcgacatcaattccaaggtgctccctcatcaggcgcatgcgaagcgtgtgtgggaatcttccgacgaggtaaggccggccattcatggtagaccagatcatatccgtatcgcgcactactgatgcgacctctgagtctcgcgaccctagcatagatctctcattgatattggctgatccaattattgctgcccggtcatccacgatcatacattttgcgtgaatgtagagttgctcagtaacaagctgtttctgaggaccgatcttaccccaggaccgaagactgaagaattgaatgtaatcctcgggatcaatacccagggcccgcaaccgcccaaatattgacgtctcaccgcggcaaatactgcggtattggcacatcatgattaggcgaacactcgttccaccttcgctatcgacggtgttctgaaaccccggtattagcggaataataatgacagcacgccatgcctccttgttctttgctgctctggttatccgctccactaatgcgtcgccaatcaagttctcaatttttcgaccatcgatctcgcaagtgctgacaaaaaactggttctcaatgtaaacaaagtgttcagactcttc

SEQ ID NO: 9637 - DNA, 586 bp, Emericella nidulans
attcttctcaccatgattcgtcggcaacagcggaccgaaatatcaagcagcaactactgcgaaaagttgcaaccgagaccctcattcaaagatacgtctacggcgaggctgcagtgatccagtcggacctccgctggtatgcgactggcctgccgcacagtactattttcgctgtgatgagatatgtcggcttttccgagaattggattcatttcttccgcaagtacctcgaatcgcccttgaatatggacatgtcctttgagggacgcatgccgacgggcccgcgaactcgcaggcgcggagtccccatggcgcactcgtctgagaagctactaggggagctggttctgttcttcatggacctaacagtaaaccgaacaactggcttgcttctgtatcggctccatgacgacttgtggctgtgcggagagcctagcaagtgtgcgcagtcatgggaggcaatacgccgattcgcaaatgtaacgggcctggaattcaacaagaacaaaactggttcagtatacctttcaaactctgttgatccagcggttcagagccgactaccagggggacccgtcacattcgg

SEQ ID NO: 9638 - DNA, 2193 bp, Emericella nidulans
aatgtgacttgtcagtcgatgatggatagggatgtcttgtttgcttgatatgttgatagtatggattggtgtttgatcctcaataaatagcctgtctgtctatggatcttgaggcgaggtgagccaagcttacggattttactttgtaagaggcgtttggcaaagcttggtttaacgtctagtgcaagcctccgagtcccgagaccatacctgctgggtgagaaccgaagtatccccgagggcccgaggtggaccgtcgtcacgattactgggacgctcggatagctcggagacgacgggccaaactcaccgctgaagtaaagctacgaatcgtaccgcgatagttgaatggagttaagcttcgggataattaaacagtggaactgctgctgttagcgaaacccacatgtacggccttgattgcctaccattcatgatggaatcgaggtaggttacgggcgagaaatccatctcgctgggaaagttgtaatggtcagtgtttgatcctaactacgtggactctaaggcaaaactcacccgtatcctggtccgggatacatatcattatatgatgagaaatcaccaagcatcatctccggaggcatgccagcagctgaagggccactaaagtcgcctgcaggtctctgaatatggccttgatccaggctccctactgagctgcgttgcttcagagtctgtcgcagcgtgatcagcgcccgaatgtgtcgcgctgataaccattgactatattccgaggtcccagtatctcgtccgttggcgccagagaaaacgctgatgactcatcgctgcaggtccctacattcaggatcgtctctcgtttcctgccatgtgcaaaggagcaaggtggagctgaggaccgtatgcaccattgaccaggtgcgtaatggaactatgctgagagcctgaaagtcgagaaaggcttttgatgcaatgataaggctttctctagcgcgagttctgagtgttgcgtagcgagagtcttcactggactgcggagaagtcttaatggccggtcggcagagcgtggaaacgcagaacgagacgtgcatgcgcaacgcaaggtgctcgaggtgttgttgcaaatttcggcaactttctcgtcgcaggagatgcggctgtgctcgagcatatgtgctatctagctcggctagcaaggtgaggttgtggtttggttcagctgccgcggactcttgcattccgatgaagtctaatgctgtccagcaaaggcagtgcattaagttggagtatgacagttcagacaatgaatgagatcccggtgtccagcctctcgtcgaagcaatgggcgggcggtcatagcaaaggcttagcaggctatcctgccacaccgtcattgtcctgtggatattagacgtagaaaagaaaatgaataagtgagaaaataccataatgatttggccttttgctttgcgtgatcaggccaatgcgaaatacccctttctgtatgtagtcccaatgtttgagccaatctgaccgtcgttcccagcaaagcccacgcagcatcagattggccattattctggaacgtgttgccgaggatgaggagagactggactatatcaagtgacgggcgaaagagaaaattagccagacggagggcttgaaaagagcgtcgggcttccagagtcagtatctcgcgcaagtggtagagtaaggcatagactcaccaaagtcctggcacagctctgagcgctgcggattctccaggtcagaaaagtgagcaccagcagccagtgtcgctagaagaaggctaatatggccgacagcctttcctgatgaccactgctcagataccttgctccggtcgctcaagtcacccgacgcatacgcaccgagataaatgcatatgtccgactcaaacttgtctatgtcgacgagaatggggttgaaagggtaagcacagatacggtagaaatggaagaacctgtctagttagccaaggccatcgccctagagggacggcatactttagaacctcatctcggtgaggaaggatatctacaagagccacccatcgatcctgcggagtcttggactcgatgaatggatagctcaaatacgtgttatgcggtctaaggacggaagttgcctcgcgagccatagccccgtcggggtcctgctggcggacgtagaaacaagcgagttgtctcagag

SEQ ID NO: 9639 - DNA, 1016 bp, Emericella nidulans
gttagcatagtacacctgcgcagtaagtgactaggtaggcatacataaaggattgaacgcagaggtttactctctccgggtccttagcaagactagcgatgcgtttggcgatgtggatcgtcacttcggggatttcacttagaaatctaatgaagactttattatcgcgagagtccaggtacggtaagaacccgtccagtagccgcaggacccaatgatcgtaatgcagcggcaccgaaatctcctcatcttcgtcggttcgattagaagaagcaaccttcatctgaaggcggtcgttataccactcctcgttcagccacataatgccaatgttgactcggccccggaagtcttcaagtatatagcgatagagagattctcgtattgtatctgatatcgtgggcttcttcctgcccaaactgtctgtttcctgcttcggtccctctaacccagccggagctcgagttgcaagccgggtgagtaaagttacccatgcgtcacgatcgaatgtgctacctgccaatctggagaaacccagtcgttgcccctgaccttttacgggattcggggtcaacgtagttgaccctaacatgccgaagactcttgccacggcacttcggccggcttccgctgcttgctcctcagtcagaggagggggacgtggcaaaacaaatggtcccaaagacacgagatcagtctgctcctcttgcacagcagctaataccgccccagtttcgtccgccgctgacgctggaatgtccataggctggtattcaggctcgtagtcatcatcgtcttcctcagcggccagctgcggttgggacatttgttgcttctgaactgtttggtatcgcatccggatagcctgtgatcatctcaacgaggtcccaatcatgctgaatctaaatcatacatcaacagcctggcccaatagtgactggtccacttccgcttattaaagcaccgccatcttgactaccaggtccgggggtaacttggttacattgaacgaaaag

SEQ ID NO: 9640 - DNA, 915 bp, Emericella nidulans
agtaatcgatttgtgggcaggttggattctcttggacttgaagccctggattcacagaccccgcaataaggatttgcggatgtccttacgtatatcccgattcaggaccttcctacttcggagttatgggccgacttcctgttatctgagagcacgagcatttataccaaatacgaaaagtcaaaaaattgactgcacactgttattatttccttagtcgataaagatttcgtagtgttgctcatgtgctctgtttacttggtgagaatactcttcttctccactcctggggaaaacggtgaaccactcgatcctggctggagatcatcccgagtgcggagaaagaacatggggattgattagtgaccatttatcgcaattcatacattacgcggctgctccttccattttctcgcccattttccagatcggtgaccggtgactatggtgtctcagtttatgttgcagagagtacgtacccaagtaccacttcgaggtagcagtaacatccagtacctgatgtacccaacccgcggtggcttttcatggttgctgtcgcggtgttcaagactcgaacgatgagacaagaatgtttgctgtgtcactgcaccaacgactgcatctacagtacattctatatggtgactttcctcgtcaagaggaagaatggatattttgccacatttccattaactggactgatcgagatcgattcaagaccgccaacttgcggatttacatttaacaaatcgggacgtagatctctttcaatcctgttgcggagaaattgtcccactgtacggagcaatgtcgtgcgggtgggcttagctagatccggccggattgggggtccctggacggatattgcctattattgcgtgctttcctaactcaaatgtttgcatatggcgtaga

SEQ ID NO: 9641 - DNA, 626 bp, Emericella nidulans
cgggcgaattggtagctcaccgcgccgggggcggccctaaaacaaggggaccccccgggcggcaggacaccgtataaaagcccaacggaccccgcgaccccaaagggggggccattgaaagaggaatgtggcgttaacccccccaacacaaggacaggcgggcctggggtcacgagaacgcagccaaccccggagggaccaaggggccgcgccaagcaccgggagggatcagcacacccccacgcccgagccggccgaaaccaacgaggtgaagagacgcaaaccgcccaaccaccgatccatcaaagggacaagaaaggccccaccacaagaaccaagcccaaaaccgacgaacagcccgagactcaggaaaatacaacccaggcaccgaaccggaacaagcgacaagggccccgggccaaaaggggaacgggcccgaaacccagaacgaagacgacccggagaaaaaaagccccacccgcaacggaacaaaagggcccccaaaaataagggaaggaaagcaggaccatacatgacccccacgcgcccggaggccccgaaaccgaaaaaaaacccagtaaacgggaaagggaacaggccaagggcaaaaaacagaaaagcccccc

SEQ ID NO: 9642 - DNA, 905 bp, Emericella nidulans
caaaacagaccaaagcgaagcaattagagcaaaggcggaacggccgttcctcgtcatcgttgacgctatgagacgcaggcttacttgcgtacatatgtacatctagtactagcagagtcaatctggttataggatcaagtggttcaatatcctcaggaattccaatatatgctggccagtgctaataataatcgaaacatctcagtccatgatgtacatcatctgcctcgcttctgctccaggctagctagtcgcagctcactagtcggcactaacggtactaacagtactaacggtaccagcagtaccaacagtaccaacagtattaacggtgcttgtttctttccagactgggtctagaatggctccctgcctgttattttcaaacccctccagcttggcttacgggtaccgtaataccgtcccacgcctaacgccaaatctgctcactgccatcctccacattctcgccagtcactacaacgaaaaaatggcacgcttgaaaccgagcctgctgggtgggaaaagagcaggcctcaccgctgtttcgcactgatggctcttatctggagctgtatgaattgtcagttgccccaaactggccagaggtgataggtccggaatcttctactgcatcctaccccttgcgttttgtcgccctagtgcgtctgtgcaggctgggcgcggtgggcttgtgggcaaaagtgggctatccacgactaccccacttccgtgtcagttgatggtgatcatggcagtcggagtctggaagaccagagaccccaagagtcggtaagccagagactcttcattcgatggcgagacagtcgaaggatcagactgtttgcttctcgcatttgcttttttttcctcgtcattatagtggtccgctctggtcgtctcgt

SEQ ID NO: 9643 - DNA, 753 bp, Emericella nidulans
acctgatataagctatgaccagggatcgggtcgtccatgtaatgttgattgcttcgattttccgcacaccctcctggaccgaatccacggaggtcactgcactaccatcgtcgtcgctcacatatccgtccgtcaggaggcgctctccctcgtcttcagtatctggtctcatgtcgccgaatgtgccatacgcggttgcgctaggttcaagcaggggcatcgcgagacggttaggagtgacggacggttttcgaaatagttgaacccgcttcgagtaaggtccatttaatgatacgattcggatatgggcggctcgataggaaagtatgggcgggaagacgtggtcgacaaggtcgagcaaacgagatcagctgccgaaagccagatgtgacaaggcaaccataagaccgaagcggcagtgcagggtattaatctgatctgagccagccagatccacctgaagcggaaaaagaaaaagaaatatactagccaacagaaaagggtatcttagtggaggaggagtgaggagaaaaagcaacgtccacgtcgaacggagaacacgcaacgaggcactcaagctgactgcgaatcgtcaggcgagagcgcatggatgcgcgaggccgctagtagtagaaatgtagcgcggcaagacgagtagagtagcaaggaatccagcggaggcacacagacacgcggaagcagaaagacctccttgagtgtccctgtccttagccgaagagaccagatccgagt

SEQ ID NO: 9644 - DNA, 282 bp, Emericella nidulans
  unsure (1)..(282): unsure at all n locations
gagtggagaaatatgatattcgtgagntagtgagtatggtagcggtcggagactgttaggggaaagacatggggatggtgaangaccaaccaatgcatcagagtatgtcgtagggatcacttgggctctcggagatgaggttaatggttgtctgaattgtaatatcgtggcgagatgattgngcgcagtgnatacgactttaggcggaggangttaaggagatntatgattgacgacgtcgagtgtttgcggaccaatttgtagcgggtctgtgatagagta

SEQ ID NO: 9645 - DNA, 1201 bp, Emericella nidulans
tggcttgcactttgcatactaatttgctgactggtcagtcctctggctctgtggtttcccgacacgctgctcgcccgcacagccagtagagagatgaaccgatatatggacatgcagattgacaaaaccctttcatcgccccggcaggagctgctagagcgggcgagcacgctaactctgatggagactcttgcacttaaaactcgatatggaaaggtatacgcgtcgctgtaatggtgtggtccaaagctcacgcaatatgcgcagtatataaaaaaccagtgatagcggtcttgcttgccggaaaggttcttactggctcactcgttttgggtccccaaaatctcagctaaccaaagcaatgcaggacccagtggccataacgatcacttcggcccttttcgagctggtgcgacacccagaaatcgcgcaaaggttgagggaagaagtcgtccgtgtgtacgcaactccgtacaaggacttttaccatcgttcttgcgtactgaagctcaataggtgcggtacaaggagtcctccttcggccaaagcactaaaagacttggtatttctaaaatatgtaatccgcgaaacgctccggttatatcattcccgtacgtaataaacgcagcgggcccctgcaggccgtgtacatctttggctcacggggattctgtagttggcttcaatatccgcgaagccagcgcgacaccactatccccattggcggagggcctaatggggatttgctcatcacgattttaaaaggacagcatgtcgcctactccgtaatcggtctccagcgaagaccagacatcgtgggccccgacgcagataactggagaccagatgggtacttttcactgggcaccgcagacgtgggagtttattccgtttaatcatggcccacgaatttgccttggtcgtgtgtttgggtatttccagatggagtatacgctatgccgcatcttccagcattttgagcgtgtcgagctccacgaaccacgcgtgcaaaggatcaaggtggaattgaatacaaaaatggcctatcccgtaaactgtagcttccacagggctgtatattagctgcttctggacctacctaggtagaaacaacgaagaagcgtgttggctaatcattggctgctccctgcatgtgcctatatattgatccaccagaatcctcggcttccaacaaatggaa

SEQ ID NO: 9646 - DNA, 541 bp, Emericella nidulans
gtcttatggtgagcgtcggaaaagccttgcgcccgttgtctaagtgtccccatgtttaaggctgttgcatactgtatgaagtttctttctattattttctcttctctatctattatttcctcttcttcttttaattattttttcttctttctccccttctttctctctttctcttactctctcctcttattttttttccttctcattctttcatctcttattttaattttctataatattacttctttcttctctttcattcttatttctttcttaccttcttatcacctccttcctttatattacttcttttatatctatttttttctattcctatatttactttattctattttcatatttaatatctttttcttcacactattttaatcttttctatatctcctcttatctatctttttattatcttttatctccctattttatttccattttctttttttcctctttttctcttccttctttcttaattttcttttctatctctattattttcatatttctattttccttccgtctc

SEQ ID NO: 9647 - DNA, 148 bp, Emericella nidulans
catgccaaatcatgcagaaggatcagtaaccccagccacctgatggcgattgcctgcaaccaatagtgcctgcgactgcaggcacgaaagcctgtccaggcactcagagacagccaatgtcacgcaactgacatgtcaggtcaaacta

SEQ ID NO: 9648 - DNA, 558 bp, Emericella nidulans
atggttttgagattataatgacacgcccgccaactccccacgcaaaaacaaccacaaccactaaacctcatcttcacccacactatctatcccactttccttactctcctcacaccaaacccacacatcctctccatccacccctccttccacatctccctcccctattcaccctcctctccacacaccaccccaaaatccactaccacattcaccacaccctctctcaaccccaacacaatcccactcaccaacatcctcaacacacaccctcccatactccactttccccccacattcacaccccaactctcctcaccctccccacattccctcctctccctccacctccccccccccccccacccttactccctcaaaactcctccacaacttactcacctacccccctccttcttctcctccccatcctcctattccatccactacccttcacccacctcctccctcccaaacccctccctccacctcttcacaatcaacatccactcactctctacacaacaacaccctctttcaaccctcccattctctcac

SEQ ID NO: 9649 - DNA, 1168 bp, Emericella nidulans
aaagctgcgcgctgcgggcctagcgacaaaaccgggctttttccgtttcaacgatgggtacatcggttgagcatttctgagaaaagctcgagaagaaggctgcagatggtacaaagtttgcgacatggtacggggagctttacttcgagctccaccgtggcacgtatacgacgcaagcgaataacaagcgcaacaaccgccgagctgaatttctgctccgcgaacttgagttcctagctacgattgcatctataacgcgatccgactacgagtatcccaaaaaagacattgatgaaatgtgggaaggggtccttctctgtcagtttcatgactgcttgccgggtagctccattgaaatgtgttatgacgactcagacgagctatacgcccagatattcgagacgggattgcgagcaagggaggcggctttggaggcgctaggatttagcatggcggggagagttccagtggcaattaacaccctgccttggaatagatccgaggtggtcagactccctgcagacatggccacaaatggctccatgcatgctctactgaacgggggtcctggagtcattccccactcgcaagccatagcgagggtccccgaggtcagcgtgaccgagatcaagccaggcgtgttccgtcttaacaacggaaaactgcgcgttgatgtagaagacggtctcatcacgtctctatatgatattgaagcagaccgcgaggttattgctgctgacggcagagctggccagctggttatcttcgacgacaagcctctttactggcaagcctgggatgtcgaagtcttccacctcgattcccggaaagaattgcagtctggcaagaccaccatcgcggagaacgatccctaccgtgtcagtgtcgttactgagacaaaaatcagcgaaaagagctgggtcaagacgaccatcagcctcgccgccacagaaggaaaccgaccatcctacgtcgagctcgaaagcgaagtcgaatggcaggagactatgaagttccttaaagtcgagtttcccgtcgacatcacaaacaccgaagcgtcttacgaaacccaatacggcattatcaggcgcccaactcactataacacaaggtatatttctcccctttcccgctcgctcatatactaaagttctatagctgggatatg

SEQ ID NO: 9650 - DNA, 951 bp, Emericella nidulans
  unsure (1)..(951): unsure at all n locations
tttgcttactaagaggtgtaacatcggggtttttttttcttcttcttccactactaccactattactactattattctacccaatttcattatatcttatgcccttgtgtctttgctttcccatcgcgataaagagggaggtggtgtttggtaaaggtcttgcttgctttcttcatgcgggatgcgtcttgctttactctggtttgactgtttgtccttctttcatcttccagcttttttcgcccttgaacatcttgaagtggctctgcctctgtgcctgttgaccctaaggcttggggtaatgatgagtatggcgaaacgacggcagcctagggggctacactgcccatggttccagttaatgctttctggtctggttagatctgcgtatattacacattaacaccacttttaacattaacatctatcttacttctcatcaaattctcaacggctacgcgtcggttacaactatcatgctgcgctttattgcgtgctttccgccagtcggtccctcgtcccttatcagctgtcccctatgcaggtagactggaccgtttaataggttctctgtatgctcagacccgtatttacatatcatacctggatgctcagcacattgatatcgttccagcccagtatctggtccacctggttaaatctgatcagtctagctcaagcagttaataaatcttcaacctcagcatacaaagcaagcgtccaagcccgaatcctagaccgctgaattcacacgtgggtcgactcacagctgatatgggagtagcattgcctactatcctggttttgggcgatgttgattggaaacatacaagactaataatacttgtagacgaagacgacgtcagacaaagctgtgtactatactacaccagaaaaggaaaaccaggtagcaagatatcaagacaaagnggggcgaagtaaaggggcgag

SEQ ID NO: 9651 - DNA, 1132 bp, Emericella nidulans
aactcgacgcaccccatgcccttatacatatccacagcgaccttgttccctgcccgcacatacaaatccacaaaccaggcattgttgatatcggaaccccgctccagacgctcggtgagtcgacgcgcgtgcccaagtctccgccatgccggcgcaacagttaggacagtgatgtgtccatgccagggagtgtaatgctctgaggctttgagggaggggtgttgctcttcgagtttgcccattactggattgcggggattagcggggctcgattcggtaggggataatgaaacaggggtatcattaaagaatgggagaacaggaaaaagggcaaaatgaaagcatactgtatccggcaattccttccctgcggtccttcacgctgctaaagagcgacggccatcgcatgagatagttcaggtagaagcccagatcgtagttctcggtcagtgggtcgaggttggtgaggttgagggagaagaggtccgttggggacatccgccgaatggaagtcatcgtgctggtgttgcaattgggttcgtgaatcgttgcgatgtcggtatgcaaaaccctttgaaacctcaaaccggcaaaacctgaaaatgggggttttgccggtcaccggaaaattcgggcgggccgctgatcttccaacttcttgacccggaccagttacaactcataaaatgctattattgaccaggcttgcgctgctttgtgtgtgatacttgagtggataggtatgtgtgactagttcttgcttgtgtttgttatcttactcattgacacgtttgttctggctcaggtctcagaataaatactctactacgactgctccctccgcgttacccctgtcctccaaccgagttcacgacacgattgaggagcccctgagggcccgctaatcaagtacgactcgagcactgcatatatatgctcaagggaactgggacttttcttctaaaaagctagagtttgtattgttttgagctgaggagccctggctcttcccttgcaaacatgccctccagcccaccttcacccttgaggctgtctcaccgccacacccgcagacggtcatcaaacacagatatggatccgatgtcaccagccgattatacgcccaatggtt

SEQ ID NO: 9652 - DNA, 175 bp, Emericella nidulans
aaacagtcaggcgataagactttgtctaaccgtagatgcagtggtagccggtcagtcgtccgagatctcgggaagcatcgcgactcccacaggttgattgcagcctcgcgggatcttggagtcagcgcctctgtacttctatccatcaagagttctaatctcgaacatactctga

SEQ ID NO: 9653 - DNA, 2212 bp, Emericella nidulans
ccaaagagcctggctacggtgttggtggagctcttcgcagcgatgcaggatgccgacatcacgaggatcacactggagggaactaggggtggttgtttcctggtggcagcgctacagtggcttctggaaggagagctccaatgcttcttcggtgattcgctgctgtttggtgaagccggagcaagggtggtgatccgacttgttgaacgcaccgatcatgctggtcgtccatattggcatattggacggtggaaagaagagaatgagctgaagcctctgatcgaggtgcgagatagatcctctataaactagtatacttttaccagaaaataaaaccctactgtagacaatggctcctggataacacacgcataccctgaggggaatggcatgtgctaggcccatcacctgctagttagagcctatggtaaacctagaagaaccgagccagcatatattgtagcagaagagcccgtaccctcaatccagcttagctaggaagtactagctgaaatggatgtacattgcagcgggaacgtctgggaataagaaacgataaatctaaatcacgaccggcaggcgcggtgaacatgcagagggcaggtgcacctgcacagctccaagccgtatactggaccaacggcggtatctaacaggaatggagtataaatgcagtagagctatgctggcggacactctgcgaagagctgctattgatatctgctctgaataaggccgctggttatttcaagaatagaacttgtcatcagggtcatttgcatctagatagcgtaggctggctgggcacttcaaaaataccgaagcgcgtacgtattaacatggggaccagatgagcagttccagatccatgttctgatacccctgggccacggcttcgaaggtcttgatttttttcggagagcgataaagagagtcccagtccggtgctctccggagtacaatctacctccaagagtggccaggcaagcacactgagtagatcgagggtatcatagctgttgcaggtgcgtagagagagtaaacatatatgtcttgcgaaagccaactttgggaatatcgaccagcaaccaattcggatacatattaacaggcgtataaacagggtatatacttcgtacccaactcagaaatcctctggctatcactcatttcatgaatacctcgactttgcctcatatccaccgttcccgcgtcgccagcaagctcgaatatttttgcagggattgcctcagtctcaacaggcggcttgtgcagcttgttgtccataaatgcgaccttcgaatctcctgccactgcggccgcagcgccaacaccagcaccagcatcgtcatgattactgagtgcaataccaccgccaccagcttccggctctcgctttagctcctgctcttcctccgcagatgccggagcagatggtttctttacccgacgtgcaaggtatagtatcgccccaatcagtcctactccaacaactgagcccacaactatgcccgcaatggcccctccgctgagtgacgattctgaggaggcacttgtatctggaaccggcgtactcgtagctgtacttgtgcttgtactcgtactcgtcggggtctgcattgttgaagtggaggtggaagagtcagcgccgctctcgtccgccaggggaaccttgagctgatcccaggatgtcttccccggccagccgtccgcgtctgcattggtgtatcccagcttctcctgccaacactggtaggactgccggtcagcgtcggaccactgagggcccggcccctctttgtacatcccacatccctccgccaccaatctctggcccatggctgtgatgatcggactgtttggttccgacttgaaccagtcctctccagggaatggagtgagttcaccacttgtgctcgtctccgcgccactcagagaaataacggcgaacccccgaatcggaccagtcgagttctgggcgagcttcttttcggaggactcatccgccttctctgagcaattttttattgcatacatgtatatccgcacggtttcgtcttccgggtcgaattcgaaataattgcctttcgcatggttgatttccttgcaggtctgcccgccggtgccctcttcgacggtggagatgtcgctggcatttctccagacgaaggtccaggcagagattagcgggaggcaataaagggcgtacagc

SEQ ID NO: 9654 - DNA, 998 bp, Emericella nidulans
aagatccggtctctaccacagatcctcctctactatatcgcctactttctcctcgcggatgggctaaacacaaccggtaccgacgttcttgaccttgaaaaccagaagagcgatagatctgagacttgatataggaacattggtatcaatcatccaaaatgacttcattgacttttcattcctacaactcacctacttgggcatatcgcaagctgtatgctccatcgcctccacattcggcttctggtatttccagagacatttcagagtccgcactaaacgtatgtttctcgtcaccaacttcttcaccgttctcataccattttggggcatgatcggtctttggacacatcgcatcggttatcataaccgggtaagctgctatttattatgactttcatgatacttatagaagtgcagtgggaattctacttttacaatgtcatatttggactctttcaagctccatactatgcagtacgtctcactactgcttcttccattccaatttgtgtcgggactaatgttctcacgcagtatgcccaaacaatgatcagtgagctaatgcctcctggctatgataacatgtttttcgcgctcttcggaatcacgaaccgtgcggtgagtcacctgaaattatcaagttgttctggagttgccaatgagcgctgaacatgctgatgctcataaaccagtcatctataattggacccaacgtcattcaagcaatcatcaacgatacgcataataactggatggggttcccattcctatttgctatttgtaccatggcaatgatagcgattgcgctcgttaatgttgagaagggccgtgagaatgcaagcaagtttgcagaggcacataggcagaggactactgtacggggtagaactgacgcatcggattctagggctggcgggaagggagcaacaattggggcttctgaaaggattgaagaggttgataatgctgacaagcgctatcgggatcgcaaaagg

SEQ ID NO: 9655 - DNA, 845 bp, Emericella nidulans
gacgttcacttcgtgcccgcattgtgagggatgatccttcagcgatagaaactaatacgagtaccaggtcaactcgtcaatcccgctctacccagctgctaccatctgtgacagtggtacgggctccatcagagtctcccgagggcagtcggaaatccatttatcttacagtcaggatgccgtctagcaagcttcgcgaacgacatagtggcagcttgcgaacggcggcggccaggcgctcgcataatgtttttactgataaccctattgtcactggcccgcgcacgagcaggtcaaagaagaggctcgtggagataaacaccagcgacgaagaagaagagcaagatttagatgaccaggaagaagacgaagttgatgatgaagatgcgcctggagaagatgatgaagatgaggatgcagacgcagatggcgatgtggatatggacgacgctccacctcaaccgccagcatcaagaagacacgccaaggctgctgtaacatctgcgcctagagggaagccggtaaagagtgttgaggaaaaagagatggagcttgatgaagaggacgatgaagaggatgaagaggagctatcagaacctgattcgaatgcggatggtgaagccgatgaccaggaagaaggagtgacgctcaacatggatgaaaccggtgagcaggatgaggacgaagaagacgaggagctcgacagtgacggtgaaatgccggatatgagcaaattgaccaaacgacaaaggggttctttgggcaatgacttcctgcaactcccaatgggttagtttaggctatcacatcgtgagacagcgatggctgacctggtacagaccaca

SEQ ID NO: 9656 - DNA, 509 bp, Emericella nidulans
gtcacatcagacctagtatgctatacccggagataccatacgctgctattccattactgcgctctattgctttcactttctttttgtatcggcatgtttataacagtcatgcttcatagcataacctagattgacccagtgcttgcaatggaaatcagttatttatgtccacagtagttgatatacttccaacgctaatcctaatgcagtaactatggcactgagcctgactaagtggggacactaaaaatactgccgcgggatttctcaccgctctgaagattttctgaatgcaaactcactcgacctaagagtgcaacctagaaacatattaatcctttccgtcaagaagcagaaaaatgaagcgaaagctagacgcaaacgacgtgccctcaaccgaggccaatgaggcggaagaagtgaagggtgccgacagagacgaagatttcgaaaccctcaatctcgatcctcgattgcgccaagccctcgttaaagagaagttcagcaaa

SEQ ID NO: 9657 - DNA, 602 bp, Emericella nidulans
gaggataccttctggttgcttgtctccatgattgaaaagatccttccaaagcactactacgaccatgggcttctggcgtcccgtgctgaccaggtagttctgcgccagtatatctcgcaggttctgccaaaactctccgctcacctggagagtctgggtgttgaacttgaggcgcttacttttcagtggttcctctccgtattcacggactgcctctccgctgaagcgctctaccgcgtttgggacgtcgtcctttgtctcgacgttgcaagcatcgtgaacaagccagccccctctacatccacgccaacttccagcacatctcaatccgctaatcgcgacggctcgagcacatcgacacccacacctgcagacatggatctaggaagcggcagggcaggggcagcacattccttttccaagtggcgctcgcctcctcaaactgaacgagcaccaacttctaacgacctgctccactcccgcagaactctacacgtacatcaaccattcgatgacgaaccatgccattagcattgatggattaattcaggcgagcgaggcactgagaaatgtggttaggccggagatgttgtagcaaggag

SEQ ID NO: 9658 - DNA, 1560 bp, Emericella nidulans
catccgcgtccaaccggacaagcacatatcgcgatgcataacccaccatccagaccgaagttggactcatacccaaccgacgttcacatccaatcagtgaagccttccaacgatggtaaacgctcaccgaagctgagacggaagaccaaaggagaccgcaaccctcgattcgtaatgatttggcccaaagatcctagaccgggaaacccgagccactggccgtggtggtggcgctggaaagatgtccttatgggcagagggccggacatctatgtcgagcgacttcggccgaaacgcaatcgcgtatatggcagctacaacactgagcacagccggtgcagtcgcgaccatggcgatgagtgcaagcaagcgcgctctgacttaagagacaggtcgcccagtagatcacccagtagatcacccagcagatcacccagcagactttccagcagaagtggaggcgggtggacggggatgtacccaaaaccagggtggacgttatggcacaaagaccatctgaaatggtgccggaagccacgttgcgatgagtgccagcggatccgggctcaggaggaaaaggacaatttcttccgaggagcgagacgacaccctgaagagcgttatgacttccggacgaggaggtacgcagttccggacgcggggacgtggtcggggaaggttcactgtgatgacccgctgcatgcggttcctaggctgtattgggatcggtacgggcgggcataccccgcagatttctatcacgacttgattgagggggctcatgaagataagcgcgataatcggaattagtgtcgggttggaaatgatcttggttaggatgcgctcagctcagatgcatgttgcgtggtaggcttcgaatgttggcggctggtcggtctgtggctcttttgttttcgggcgccggagtgttgggaggttggctgcttgatcttgcatcttaccgcaccttgtacatgtagtttggaagatatttgagtaggatgaaatcattccctgaagattatgagcttttgtcagagaggatccaatgtgtgacttacaaagagaaattttaggtcccatttcctcggacgggcgttaagacaggccagaactgcagtttcaactctcgatgagggttcgcctgatggcgacttgctggagacgttgaattccggtacaccctcttggcccgagctgacggcgttgaccttgaacgccaggccgaccttcggaagcaagacaccgaacgatgaatcactcttcgtcggtatcacgcgcattccaggtatgcctgcctgggcatagttatcgacgatcgccttccatcctccttccgctgactgcaactgggctcgttcctgctcctctttggcttttcgctgctgctctttcctatggttgtcgtgttgtgcaatatcttgaagtatttggttgtagtcacattgccacatgccgttggactgcaggagccggccagcattttcattgatcaaagtgtcaatgcgctcccagacggctttcatttcttcgctccgccacaaggctttgaagtcttca

SEQ ID NO: 9659 - DNA, 1055 bp, Emericella nidulans
tgggcaataccgacagaaagcgggcataggccatgcgatatgaccggtataagttatctttcttggggtcaaggaacaacgcttgggtagcattatcgctgtcgaaagcacctttgttcttcagcgtcacccgaactttcttcgtgggtttagcattttttggagtaagcctttcgctctccgtatcagagtgggtttgtaagctggatataactgctggcgtgagatgatcattgtttgcagacgcaggtctaggtgtagtaatggaaggggtccatgtgccggacgctacggctgtgcgaggactctcaacttgggcatgcttcctcctaagaaggtcgcctgctggaggtgaagctgaggatggcgcaaatgtgttgaaagacctggtgagagacgacgcgagagctgaaccaaaaccagagctacttcgtggctgtgcttgttgatcgggagaagctgctaatgacgcatgctgagtgactgccctgcgctcgatacctaacccgctcgtacgagaaagcaaaggaggggttgtacccgcggaataagggggcgttgtgcccacccgccacaattcaaaggatgatcgtcccgagctttgcgcaccaggtgtggcatggctatctttcggtgtggagttgagcggtgtcaccgcttgcgatttgttcgcatctaaggtggtgttgttatagacatctagaggaaagaaaaagtggtctgcttgttccggtggtagttctcccttggacggagaccgctcgaggtttggctcgtacagaacgcaggagagcatcgcagccatttgtatgtcaccaacctgctcgaaatgagcaaaaagagccggaatgagcaaattgccgccaaaaggatggtttccccattcaacgacatttgttgtattttgagacgtcttgtcgggatggagtgcgtcgaaacttaggtctatagcactatctttgcgctgaacgcccaaagacctgctcatactattcataacaggaggtgacctcaatgactttgtttgctgtaagatgagcctccccagaccccaa

SEQ ID NO: 9660 - DNA, 1668 bp, Emericella nidulans
ctacatctcgcgacggacattccgtatcactaacgcctaacgacggcacggacgaccatcttcaccatcctcttcccgagtccgtcgtggtcgataccgccgagaagaaccgtgactcgtctccgtcgctcaagagtgcacatgctgacatacaatcattgcaagagactgccgaaataagtggtcaggtcgtcctgctgagcaggggcggctgtggtttcctggagaaagtcaagtgggcccaacggcgcggggctcttgcgttgattgtgggagatgatactcgaggtggaagccttgttacgatgtatgcgcgaggcgatacctcaaacgtcacgattcccgcattgttcacgtcatacactacagcccacctgctgtcgtctcttgtccccccgcatgaccgggatgaatccgtttcgatcgacagcgcaaaaaccgttagcgactcccagattgagtctactccagcagtctctgctctaacaacgccttcatctatccagcaaactatgagtgacgagattgcaccgtctccaaggcctggatttttccatgagttgctatccatattcggcttgggcggcagtgaacaagtcgcaacgctagaagacaacaggcgaccacccagcagtggtaatatcaactgggttccagtgggactctgggacgaccaggcaatatccggaaacgaggctgaagctggcgacaagagccacaaaaattcacaatccggaacaagcagcgacggggatggttttgtcattggcgtacaagactggcgggatccggatcttgttgcaacaaaaagcagtgccttaccagctgctacggccacctctgtgtcggaaggatcaaagcgcgatgacaagggtgcgacttcgacgcttaaaggcggtagcataactcctggcagtggagaataccacgctgtggagaaatcaagtgcttctgaagacaagtctcggaaaactgagcgtcggtcttctgcgcttggtggcgccggtacaaagtcgaggggctggttttctcgacatttcctcggcgttagagccgagggttctgagccaagcatccgaagtgatgagaagaagcagcgagtctctcgtgatacccggagaaaggatgtgaaatcaaaggagcatgaaggtctgtgggtcacccttacgccgacgagcatgtctaccagcccattcttcgatacgctccttgttttggtcgtgagcccgcttctcacactgtctgttgtctatatccttttgctactccggtcacgcataaggcgacgacgctggcgagcacccaagtcgctagtcgagcgccttccggtgaggacataccagacaattcccacctcatcttcctcatctagctccgtgagatcctccagccctgggcctgtttcccaaacatctccccttctggggtcaaggagttctacagaccatactcgatcccggcctcgattccagaaagccgaacccgaccaattcgggtcgaggagggaaaagtctggcgcatctacgacatggcgtcgaaagtacactgggcgactaattgagtgtgttgtttgccttgaagaatatattgatgggcagagccgcgtgatgagcctaccatgtggccacgagtttcacgtggagtgcatgtaagtacctgcaggtcggt

SEQ ID NO: 9661 - DNA, 251 bp, Emericella nidulans
cgtattcgcacgagagtggatcgacgtcatcgaaccacgccacacggcccgtgatagcgagaggtggtaggcttgtcgtcgctgtaagaccgagtgtatcgagagctggcatccgaacgacgcctgtccagaaggtgccactcctactccaggagcagctaatgatgcgcccatcgacagcatagatgcctctccgggagcacctactggcatggcgccgtgtaatcgccgagagtgatatcgcggatccc

SEQ ID NO: 9662 - DNA, 1094 bp, Emericella nidulans
cgcagcgtctagagctttacaatgaactgcggtatgcgcatgcggtgacagtcatgatgatgtcaaggatcaacgatgagcgacggggagagatgctggatgaactccgtcggtacgttcccaacgcggagctgccgcacgagatgtttgaatatacttggccatcagatcctatgaagaaggcagcccacctcgtggcaactgcttcttgaggaacacgaagagggctgatcgggctgatcttcgaagcttgatagacattcatagaaaataaactcgtgccttacagatgacagcttaaaagaggatccagtcacgtgttgagattgttattaagcggagaatgcggagctgaaacaggaccgagtgcgagcataatgagaatgtggtaatagctaggtttagcatagttgcccacgcgcctatcaagcatgtggcagtttttgtttctcgtcattattctggtttccacaagcccagagcgggtacttctctgttctgcctttaagcaaggcaggccaccctgaaaatgcacgacaatgtgccacatactacggcccgcaagtttactgcctgcgatgtgtgctatcggcggaaggttagctcctgcatcgattggtgggcctttgctaataaagcagtagattaaatgtgacggcgttcgtccacgatgtaattggtgtcttcatcaacagttggattgtacctatcggcgtccatttccgagaaaaggagccaaaaggaccgcggccagcaggtgccgatacccatcgagactttgtagcaatttacctgctaacgttcttatagtactgtgaccaacagagctagcttaatcgagcgcatacggcggctcgatgagcgcaggacagatgccatgtctagcggttagtcttctctcctcttacaccacggaccaaccttaagccgttttaattgcctttaaagtggaagctctgaaggacgatggcacataagcacaacgctgtggccggcacgtgacaccggcctaaaatatacacttgggctggaaacttaattaacgatgcagctgacctcaactgtcctgggtctcgtgatcagcacccagcatg

SEQ ID NO: 9663 - DNA, 574 bp, Emericella nidulans
gcagagctgacaaatctacgatacctcatcacaaccacttagccagatcttaagccaggttcagcaggatggcgcgagtattgtggtcggtccgttgctgaaaaataacgttgaagagttgctgaagagcaacactccgctgaacgtactggcactgaaccagccggagaatatcgaaaatcgcgtcaatatttgttacttcgcgctttcaccggaagacgaagcgcgcgatgcaggtactatattcgtgaccagggtaaacaagcgccgctggtgctgatcccacgcagttcattgggcgatcgcgtaccacatgcgtttgcgcaagagtggcagaaactgggcggcggcaccgttctgcaacaaaaatttggttccaccagcgaattacgcgcgggtgttaacggcggttctggtattgctttaacgggtagcccgattactctcagagcgacaaccgactccggcatgacgaccaacaatccaacgctgcaaaccacgccaaccgatgaccagttcaccaataatggcggtcgtgtcgatgcggtgtacattgtggcaacgcggggtgaaa

SEQ ID NO: 9664 - DNA, 690 bp, Emericella nidulans
ctaatctattgcattcctaaccacaatgctcactgcatgtttatccgctactgccgacgttcatgggtagcagcagtcgtcggcaacattttctgactgattttacgtccgatttgcttgtgccgtatgcaggcgctcatggttggcggcttgagtacttcagttctcatcaccagacgacattggtattcatactccatacgaacagggaaagcattctcgattactacgggctgtgtcgtcgtaccgcgccttgcggtgttctacgctccttgcatctatcagattcctgtgggcagttatctcaagcctcgctttttgcgcttttgaccgagcaatgtcaaggtgcaggataggcaaaagttctgaacaaatcgcatggtagtcgaacccctgccagggtcgccactaatggatgagttgaaaccagcgttaccagaaattgcacccgggctaccagcgccctatgggatactggttgatcttaaacacatgttagggatgaaggaaccccaacgccagcaaggactgatatttacgtcgcagagtgatatccctggggcagtatatctgaggtacattattaagtggcattgcactacgcttatcccgcggactcctgcaaagcgtcagtaacgttgaattttccaacgaggcctggataaaccgattgcattgttccgaggcgaa

SEQ ID NO: 9665 - DNA, 325 bp, Emericella nidulans
cccattcatcttctaatcgttcttcctccatgtcacgtaagccctgtacaagttgagacaggcccttccccacgaattgctgtggtttgcggacgggtaatgggctcatgtccgttgggtcagggcccgttagaccagacgtggatcggcggaggaaagacggtgtttcaaggttcgcattggcgtgatcaatatttcgagtagcctgcggactctgtttcgtaacatcattattcccgataactcctcttgaagtcccatcgtcgacaatcgaagagtatttccaagctgtaggcgtcgcaaaaagagctgaaagcatatactt

SEQ ID NO: 9666 - DNA, 283 bp, Emericella nidulans
gtgcctggaaggacaggtctcccatcacgtacccggtcaactgggcatccatgagggtagcgccgccgaccagtttgccgccgccaatcttgataccaatattggcttccggagtgacgaggatatccagctgtgcgtcaaccgcgactccggcctcgaacctgggctcgatactgccgggcgcaggagccgccgtgtcgctctcgagcccgagcagtgtctcatactggtcctttgcgtcgtcgttctgcggccagtagacttcggccttgccgaaggtgag

SEQ ID NO: 9667 - DNA, 2002 bp, Emericella nidulans
aaaaaagagttttgagtgaagaagagcaaggccagagagaaagaggagagaaaaaagaaaacgactatatagctgaaaatgtaagagatagaaatttagaagatacgaacgcgcggagcgaacaaaaaaaaggattgtttatttagaataaaagagaagagggcggagagagaaagccgaaaggagaaaacaaagagatatgaggagtaacatgagaagtcaggcccctaaagaaggggcaagccccgcaaagcgggtttctaaaaagggcaaccccctccccctggggagtggcgttaaaaaagcccgcttaaccattcggttcctaaagtggttggcatagtgttcaatggctttccacgtattggcagtcacagaatttttgtagttatctttgttgtcaactgcacatgaaaagccgtgtcaacctggacgaggccggaaagcccgacttgtagcaaaggagttccctctgggccgaataatctatacttggtcagtatttaatgatcacatttggtaggtcggacaaaccgaacgcatttcctagccatggactctgcttgttcgtccagagtcctgagttcccagtctgcggactgctgaaagccatattgcagatcctcaccgcggaaatcgagcttgctgttgtctgacagcaccaaggggatgatatcgagctctaaccataggcgggagcagatcgtgggacatgtgtgcgccagttgtttcggaatagccaatcctatcatcttttcaagatgtgtatcgcaccacttatataagtgtctcatcatgtggtccccaatctttaaatccaagtcatcgctctcgctgaagggcagttcctcttgcgcaaagtccaccaggtaagttgcatcacggatggcgacagcgaaaatgactttatccttctcgaacaccgttgataaaccgccatacaagttctacacgagttaggactttcatcaacatgggataatgggcatatgcgtactcccgtcgttgctgcgccccaggaattgggagaatgctccgtcgacagacggcgcttctgttgaagcgaggctctacggggagatggagaaccgccgccgagcatgtcgaacaggttgtctatattctatcaggttttggaagatgattgagatgggaagagtgtgtgcaaagatatagcaaggtacacacctcggagccgcggaagcatggtctgacctcatcgattgccatgacatgacgtaggactgagtaagcagcagttgcattggctacttggttgcatacgaacggatacaagcacagggtacgcagtagaactgcgcattaggagtacattcacatctggagtaccccatggaatgaagatcaagataacactgctgcaaaataagcctagcacaggtctaagcacgggtccaatctgcacaagctggaaaagcacagaaggctaccgatgcatccaaaccatcatggattccaatggctgctactgtagcaaatggaagcacgttcacacaatcaatatatgcagctaacaaaaagtcttagttgtcaataagaacaatgaagaaattgggctgaaagctgaagcatgtgttgcatgcggagatgaaacagaccaactcttggcggctcgtgggcgcgctgagtcagcatcgccagccccttttacggagttggcctcgagacgctcgccaggacaaggagtgtggatctagctcaaccccgaatttattcagtgtctttcggcttcagttaacatctttgtcgcgaaatctactaatatttcttctgctgcgtcgtctggctttgcgattgcgctatctacttattctgtgtgctcttggagcagagtgagttatccactgttcatgccatgccccgcgccctgacctggcagaatgcaggcacgtcgtgattgactactaacagcctgttgatgattacgcctttttctactaatactgtgtttctgtgtgcgacaacacgggaaacattacct

SEQ ID NO: 9668 - DNA, 574 bp, Emericella nidulans
ctggatgcaaaacccacataccgtccctcccacacatatatatcttattccattcctaaattaaatctaattatcttaacatatatcataaccacaatcacatcatctatcaacacatctaactatacacctactaacaccacttataaatatacctacccaccttctccaataatcagtatcaacactattacatctcaaacaaactccatataacaaaacatacatcatcaacatcatcacacacactcttccaaattaccctctacacttaaaccaactcaaatacatacaacacatagtaactacactacctaaacactatcttaaataaccacattcaacttctcttctctacaatcatcacatccctactcccctattactcatactcaacatacatcatacacattactacattcatctatattcatccctcatcatatacattctatataaaccacactaaacatatcaataaataaacaactcatacatcaccataactctactacacttcactctaccacatatctaaccacaaacatcccctcaatcataattatccaactac

SEQ ID NO: 9669 - DNA, 567 bp, Emericella nidulans
gtcgaccatcatagtcgtcttgtggggcggccgcgcgtgtaggcggataccctccacgcggaggccgaggcgcaccggtggcggaccatgcgatcttggagttgcctggtcgggatagccgtatccgggattattatagcccccgtcgctggtacccggatactggctgtcgtacccataatcctggtaacctggatcatatgctggatccctcaagggtgcggctccccgcggaggaccataattcctcactggaggagctctctgctgtgggtaggccatgatctaagtaggaacgacgccgaggatgcggaacgtagtgaataagtaccgcgactaccggcgaaacaaccgctcacttgattttttctttttcttataagaggatcgtgagtagttaggagcagcgaacccgaacgcacgtttctctactttattgaccagagtgttagtgattacgctggaatgagggaggtgcggagagcgggcggctattcccgctggaatatacccaaagtggatggcagaacgggcaacgaggacaagggcagtactacgtgcgcgaga

SEQ ID NO: 9670 - DNA, 1340 bp, Emericella nidulans
  unsure (1)..(1340): unsure at all n locations
ggtcattcagatggcttctagcaagtcaccgacgcgggcgtcggcggacgagctcaccaaactgtcaccaactggatgctatcttgcccttgggatgcacaagctacatctagtttcactgcaaaaggtatccagccgtggatctactgcgtctttaactgacctcgatgccgcaacgtcgtgatggcctcatgaacctgaccagtttatccatggagtggggcgatgatagcctgcatttgacttttcgagttcctcttcagaagtcttgctcgattttcgtagcgtcagttcactcgttggagattgcctactggatcaggcaacagaccgaatttctccgtccgctgtggcttaagcaaccgtacgatttcattgtgcctcgcgatctgaataacgaaaacaattttcccccagtgtgtctggacgaagactatggctgtttcgaccgtacattggttgcccactgtgccagctatggtatcgacacctccaacattcgatatactattgatactcagtgcgatgatgctccttgcttcagactactacgcccagcttcaccacagcggagcaaatatacagccttggaactgatcgccctcatgcgaacattgaggtataacgagtcatttcggtcaatatctttcagcggagtcagcttggatgcgatccaagacgtgcgagacctcaacggaatcgataaagacgcgttactaacacgtgcaaatgcccaaatccacattcctggacaggagaacctctcagtactttcgcaagaaatccgagcactgagtttgaaaagcaaatggcttcgccggctggacttctcatatactcttagccgaacacccaagtccgacaatgacagccacgacccaggttgtggcattccggaagctatcttccctatttgtcggcgagagctcacaaatgttgactggatagtcttgaacggtatcaaactcggggactctgatcttgactaccttgttgatgccgcgtcccagcggagtagtcattttcgagctctcgaagtgggaaactgcggtctgtctgttcatgatattgacttgcttctttcgacaacggttgcccaagtatcgacacttgaagctatcaatatctctggtatacaaggacgtataaagccagatatgctacaacaatacctgggctattttcctcccgtctattagcttaatatatcnccnggatgctacaaccacactcattaatgtaattctgagtattgtagattttttattttgtgtagataaagagtgaggagttgtttgagaaagatatagtaatagaatggtgatgttgagggagagtgt

SEQ ID NO: 9671 - DNA, 1989 bp, Emericella nidulans
cggtgatatttgcttctgccgcttctgccgtgtgtgatttacacctagcatgtatacgtacccgggtgtccttgtgtactcctggccacattggctgcttcgtcgttgaggcacatctggaacctggaacccatgatcaacactttgttaagattaaggaaccaggacccagtcagcctcacaactccgtcgttgaaatggccatctccgatcccgaggaccgagactgaaaaacctcgacatgcatgcggcttcgtagttatcaccgagtccgggagaccagctcggggacaatgcgaaatcccgagcaagacaagaatttctacccagcaagctcaaccattgacagcaagaagaaataatcatgcagcaccgtgaataatcaacaagatctcatttgtcttctctccgtgccctggaggtattcagcatgctcgatcatggtctagctcaagcagatcgctgcgggttggtaatcacttcgctctgattggctcgggtggccgagcggagacttgttttgcagcgtgaagcagcagagaaaaaattggcatcagacatgcacgtccgtagctcggatttaagtgagaaggcagaggataaatatcttgctttggctggtgcattgtagctcaatcattcacaatccctcgtcagcatctctacgtacctttctttggtcgctgaagaacttctaaacatttgcgatcggccctagatccggtgacgtcaggagtctggaacgcgcccgctcccgctattagcgcttttgcctattttggattctttaagagcagcgcctacagcgaacaaaacccagacgagcctattccagaacaagggactacctcttgtaacggagaggatacgaaatggccctcttgtttatcaagccgaagctcttcccagagcgacgcactaacttgtcacaaccaaactacaagtcgtcagccctacccagcaagctgtcttatgagttctggctaatccccataggaaaaccactgcttttacagacgaggacgaggacgaggacgacactattacaaacggcagtggaagcatggagcacgacgttgaagcccaacggagcagagcataccacacattccgcgactcctcaccatcatcctcgaactacgatgttgaaagcacggggagcagcaacacacggtcacgcatcgacccgcgcatcgtctcggatgccattctcggcctgtcagatggcctcactgttccctttgccctgagtgccggtctctcagcgctaggagatacaaaggtcgtcgtgctgggtgggctggcggagctagctgcgggcgcaatctccatgggtttgggaggatacgtcggggcaaagagcgaagcgtaagtcttgcctttattataatcaagatcaagtaagggttctaacccgcagcagagaatcctaccagactacggtccgcgaaactaccgaactcattgattcgtccccctccgagacccaagcaatagtctacgacatattcgcctcgcatggcgttcctgacgacgcaatcgcgcccatcaacgcttccctgcatgcatcgcgcgaccgcctccgcgaattcctcatcaccttccaccacaaagagtctgagccggactgtaaccaggcctggacgagcgcgatcaccctcgccctgggctacttcatcggcggattcattccgctgattccgtacttctttctcaaccaggtgcttattgcgttgtattgtagcgttgcggtcatggcgattacgttgctggtttttgggtatatcaagaccgcggttgtgcgtgggtggagtgggaaggacaatatccttgctggggtcaaaggtggcattcagatggtcgttgttggggcctttgctgcgggcgcggcgattggtttggtgaggttgattaatggggagtcatgattgatttgccctcgtcgcgctcctcttcgtcctttagcatcattgttgcatgtacaagatt

SEQ ID NO: 9672 - DNA, 1518 bp, Emericella nidulans
ctacataatgcctcaacctcaacaaggaactcgtccggcaacatcagttggacttttattcgtcgcgcatctgacaaaattcaggacgcgggtttcgttctggacgatctcatagggtaccgccaacatgctatcaaaattgtcagcgacaagtcatccaactttcgccagaaatggggtaaagcatccgtgctgtacgagatgccgccggagaatgtcttagctctccagtctgagaaatatctttctctgagccccaagccggcggtgcagcaggtagttcccttgttgagacttccttttatcgaaccagatactatccctacgtctatccgagaacgcgacattattatggacaatcgccaggccactctggcgaagttggaaggcaaatgtgtcggagaagcgcgtcgtacggagggccggcgccgcctgatcgatctcgtccgcgagaggaagtgcatatgccgttctgtatgcatttgtgctcatgactgcacccaagacgtggagcgtcattgcccctgttctgagcgattgctgagtctgatggtcgcaaaacgccgaaacagcgttggtcctctcccttttggtccccgatgtagtgcccttgcgaaagcgatattccatggaatcgcatctgtccggcccgatgctgatgacatagagcttacagcggagattgatcgcgcaaccatgatcttcatagaagaggttcggaagcagcggtccgccaacatcttctcacacggcgctggaatctgaacagacaagacgatatcgtattgctgataagccaggtgataatgttgtggaggatagtggatcggcactgagtgggttcgtttcttgtggaaagcgtcataactttgacaacgatactgcgggcgagattggtcgagtcaatgagaaggctgtcggtgtcccatctacgatcaaaagtccatttacaaatatgttcataatcccatgttgcttaggctggccctaaattccagtactttttgctgatgaactctgacacagttcaaagtggagaaaacggtctcttgtcagctgtgctagtgagcagtgagcacagactggcaagacactagataaacgccgcccgtagtccacaatctacagagtagaacacagactatccaacagagatcgcatgcaggcatttttagcgactatcactggctcaaaaagctgggcgatgggtcgggctaaaacagcgtcatctgtcaaccttttcttccagagagccgcccttccgacaacgaacctccccaaggctctctcggataaagaatcaacctcccacccttcccaccgttagcttatctctagccacatattgattgttgtggagagtgctgcttcgcgagaaagagcctgtgctatactcggaaacaaatagacaacatcctctcttgcgggcatggtgcctaggattcctgggactccctccgcaagtatcgtctacctcctccgtcgctgtgcgtgcatagcgacttatcgttccaacga

SEQ ID NO: 9673 - DNA, 533 bp, Emericella nidulans
ttttaatttcttttttaccgttcttttcttctggcagctgacccgcgcagttctggatttcctcgccacccggcctgattaccaagggaagggcgtcggaacggcccttctccgctgggggatcgagcaggcccatcatcagcagagacggatctacctctgaggccaccaccgagggatacccggtgtatgtgaagtgcgggtggcgcgccttggagacggtcgagatagactatgcgcggtggggcggggaggggaacaggagctgacgctgatggtgcgcgatccttccttgcctgagtgagttgcctattactcgctgcgctgctgctgtgctgctgctggcgctggtctcttgactccgttgagagacgtaatcggcacgacctacggaatcgagcttagcttgaggctgcgggaggggcagacttgtacaattccagggctgcatcaaccgcatgggcctacccaagacggttagtgctcatgaccagtatacttatatggcttatacttggccttatactgtgcct

SEQ ID NO: 9674 - DNA, 577 bp, Emericella nidulans
tcctcgtcaacggctgaggcgtagactacactttctctcaataattctaatattatttctctatcattatcttattttcttttctctattattactctcaaaataatacctactttactaccttcattcataccattttctatactattctacttttaccactatttataaatctctctataatttctttttacctcatccttatcttatacttatctttcacatcattcttttttacaatctcctatttctcttctcttaatactctatttcccactttccttttacttttctattctcctttttatctctcatatatcttctcatattaacatccccttatattctcctctttctttctatccttttacctcatcttacattattccatatctacatactaccaattcttctctatttttccatcctatcttaccactatcatttttcattcattatatctataaatttattatcattctacctattaatcaaatacctcaattcttcttacctctctaaactaattttatcaactatacatctctatctctattctcttactcattccatcccc

SEQ ID NO: 9675 - DNA, 1049 bp, Emericella nidulans
cctaaaccaggactttgcggctgaccacccagaacattagcttagggccactcgccgcgtaccaaatacgaccagaacagcattccctaattacaatgcggcagaaaaagaccggaaagccgaagacgcaatagaagaaaactatcattcatcgctcctctaccctcggcaaagcaggaagagcgcttgtgcctgagaaatccctcccaaacgatagcccgctcgaacgtccttctcgattggcccatgctcccatctgcaacgtccgcggccgcgaagacgaattctcgctccatgagaacggttctgcctctgcaatatcccgtctatcgcagtacatttgacggagaagaaggtcattgatcgggattatgtttcccaaacaaggacttggctaattggtgcggtatagttcacgaaccagaggccccatccagccagaagtcagccagaagccggctccggattcacctaccccttgatccaatggagatatagaaaaagcgcaccgaaaaagtgtcaggtaaacgggattccagtcttatttatgagatgcacgctctttgctttaatgaccgactatacaccctgctttgaggagtctgtgttcgtagtgagtccgtgcagcactgaatggacggtagaggtggacaccaagtcgaggcagcattgaagtgccacggttatccgcgagagtgaccatttctacaatacgtaactacggtttatctgtattgatgatgggaggatctcagctcaaccggtttaccacagtgagaagtaaccagcagaagtttatccttggctaaggtgtatgtgggtccacagacccacggttcatcccgaacgcgtggctataataccataagcgtaagtgggcgggttagagcgcatttgtcccatggtttgaaccgctctcgagtggtccgtaattgagctcgggtcgcgcgggagcgtgaatgctgctggggttgagataagaactttagagcgcgagaggcactgttggagcttttcttaacactggacatgggcatcgactccgatag

SEQ ID NO: 9676 - DNA, 2050 bp, Emericella nidulans
ttggcactcagaagtcgcccggatgttaatagtagcgcctctagagatcgatcttcacggtgttttggtcatgctacaacatcttcatctcatttcgctgaatttattgaaacatcgcatttaccactattggctacaacatggatcgcggatagacttcaggcagaatataaggaggggtaaaccgtaaacgaggttgaggacgcggacgggcccatgatcatcccctcaaatgcatacaaatgcataccgtaaagagtacagacaacagcttctaagagaccactcttatctcattgccatcctccttcggagttacaagggtggtcaccttcggggtacgtccagcgtgggccaatagcgacagatcaggcaatatatacagaacggctttgtgtatcctgagatggaaggatggtgatcttacttttctccttcccttctccttaactgtttcattgggaagcccaataaccgccccgttccgtcattcatgaggcgtgcccagagctcagggtaatcatggtcccggacagccacagctagcgcagatcactcgaaggcagacgaagcttccatcacctatctgtctcaaatctttgaaatcatcatcagtataatcgctagttccggaaccattctatcctcttcgtgtttacgtgttgactgcatctcagcaggctgcgactctgttcgcatgctgaaaatcccactcatgacgtggatatcgaatccgtcaccttatgtagcgctgagactttgaccatgagtagtccatgacatgacttgacatgatgccgtaatgcccctcaacatgctgcagtatacgcatggttggtgtgcgaatcaatactaacgcactgaacgtaatccttcatctccatccaggatcaagaatactctcaaaaccgagcacaatgcagcgactcatgtcgcgcgatgcaatttacggtgaaagtgaaacagcaaatcagaaacgggctgattaaaagaattgactcttagtctgctgctgtatgattacagctactgtgtagatgtaagaataggcgctgtatctctagaaccggcacttgttgaggggcggtaagaaagtcatgtgagctctaggtgcttttggaaggagaccggaaatccgggctatttttgttgaggactcctggttgcgggcttgatgaggtcagattctggccatgttctattctctaacgtttgttgcttatcgtgctggagttaacgccgcatcttgagatgcaaacaggatgagatgtctaaaactgctgtctccactgactcactcggcagcatggtggttctacagcgtgcaggtacacctcaccaggtatgattaggaaaaaaaatcggaagttatgcaagctgttatctatttctaccttcttctgagccgataattaacgccaacaatgggaagctatgctgtctgcggctttgtgatcatgctcgctagacttgagaaccagcgcttgcacctagagcttagagccttgacaccctcgactttcggcccttggcgatctttcgagcataggggtgcagaggaccctctggcaccaggtggtcaacatccccagtgtggacaagatgaggcccagcttcatcgagcgaggtgatcccaatgtttcgcatagcagtttccaattcgtctcgcataactacgtattttagcatacattcgagagatgcagtaaacaaaaacttactgtcgatcagatgctcgactcccgcttggccataattggtagcaaagagcatgctgcgtcccattccgaccgctgttgcgcctaggcagatggctttcaagatatcagttccccgccgaatgccgctgtccacataaatctccattctgtcaaatatctccgggcagcgtttgtggagctcaaggagggtgataatcgacggggggctagtgtcgaggttgcgtccgcagtgattgctgagtaggataccgtccagaccagcttccattgccaagatggcgtcgtctgcagacattacacccttcaggcatacaggaaggtgggtatgt

SEQ ID NO: 9677 - DNA, 1266 bp, Emericella nidulans
aagtgatacacacttgatggtttacagtgtatcaccggggcgagagctcacaatgtagattttagtgggccagggaacattgtgtggggagtcctccttgcagatggccgtcgctttacagcgcgaaaggaagtcatcctggcagctggagcactgcgtacgccccagcttctaatggtgtccggaatcgggccaggggacaccctggccaagcacgggatttcgtctgtcgttgaggcacccgaggttggcaggaacctcatcgaccattttgcgctctatcagttgtacaagctgcgcgagccagaacgtggcattgcgctagggagctccaagctactctcacccagctcttacccaaggctttcccgttgactgggccgtcaaccaaagagtcccccgggatgtgcttgacccggccgtgcagaaggacaaggaacgatttggttcaagcaccgatgaatcggtcttgatcccgggtcgacctcttgtcgagacattgattctgtacgccccgatcggcatgcccaccgatggcagcctcctcatgacgtcggtcatgctcctctccgcaacgtctcgtggcaccgtcagtatcagctcagcctcgccgagcgatccgcccctcgtcgattccaactactacgatacggaaacagaccgggcagtgcttacttacggttctcgccgtacagcaaaagctctgttggaaacctcagctctcaaaaattacgtggaatgcgaggtgcccccaccggacatgccagctctgacgtcgcagtcctctgacgaggagttcgacgctcgtattagagctacgggaatggctcatcaccatcctgcgggcacagccgccatgggtaaggttgtcgacacggagctgcgcgtgattggggttcggaatctgcgggtggtggacgctagtatccttcccgtcagcatagggggtcatccgcaggcgactttatacgccgttgcggagcaagctgcagatcttatcctgcaggctgacgtggagaaagcatagccgagcttgtttcatttgttgtctgagtacccagagtataagctgcattttagggtttcagattgtttgtgagtggggtcatgatgctgatcaataccgtgggttacaccttatccaagagtatgaactgcccaacaattacatggctatggtacggaagtggattggtctacagtagtacgaacgttgcgaataggcaaccaatgattgtaattctcgtacacgataccccaggagca

SEQ ID NO: 9678 - DNA, 1739 bp, Emericella nidulans
  unsure (1)..(1739): unsure at all n locations
acccagatgcatccatggttttcctggatattctggatcaatccattggcttacggctacgaggcgatccttagcaacgagtttcacgggcagctaataccttgtgtcaacaacaatttggttccgaacggccctggctacaccaattcagaattccaggcgtgcacaggaattcgcggtgtccccgcgggtgcttctgtcatcactggcgatcagtacctgcaagggctgtcatatagccatgctcacgtctggcgcaacttcggcatcatgtgggcgtggtgggtcttattcgtcattctgactgtctacttcacaagcaactggagccaagtgtctggaaacagtggctacttggtcattcctcgtgaaaaggcaaagaagacgaagcatctcacaatggacgaggaagctcagcctggacttgacttgcacgactcgagccatcgaggtggaacttctcccatcgatgatgagaagggaagccatacaaatagttcctctaaagtcgatgctcagcttatacgcaacacatccatctttacgtggaagggtctctcgtataccgtgaagacaccatcaggcgatcgcgtcctcctagacaatgttcagggttgggtcaagcccggcatgctgtgcgccttgatgggttcttcaggagcaggcaagacaactctgttagatgtgcttgcccagcgtaagacagaaggtacaattaggggaagcatcttggttgatgggagagacctccccgtctccttccagcgctctgcagggtactgtgagcaactcgacgtccacgagccactttccaccgttcgagaggccttggagttttcggctttgttgagacagagcagagacacgccagtagtacaaaagttgaagtatgtcgacactattatcgatcttttggaaatgcacgacattgagaatactcttattggcacaactgctgctggcctctcagtggagcaacgcaagcggcttactatcggcgttgagcttgtttctaagcccagcatcttgattttcctcgatgagccctccagtggattggatggacaggctgcgttcaacattgttcgttttcttcggaaacttgcagacgtcggacaggctgtccttgtcaccatccatcagccctcagcttccctgtttgctcagttcgacacactacttctgttagccaagggtggcaaaactgtagttttccttcctgtccgtggagaaatatgctaacgcgtgcgctcaggtatactttggtgatattggtcataacggcgcaactgtcaaggagtacttcggccgtaatggagctccttgccctcagaataccaacccggctgagcacatgattgatgtcgtctccggaagtctcagcgtagggaaggactggaatgaagtctggctcaccagcccagagtacactgcgatgacccaggagcttgaccgtattatcatggaggccgcatcgaaacccccgggcacccttgacgacggtcacgaattcgcaacgcctatctggacgcaattaaagctcgtcacgaaccggaacaatgcttcactctggcgtaacacggattacatcaacaacaaattcatgcttcacgtcatctcaggcctcttaaatggctttttcttttgggaaactaggcaactcagtcgccgatctacagatgcgcctttttaccatctntaacttcatcttcgtcgcaccaggagtcatggcccagcta

SEQ ID NO: 9679 - DNA, 2239 bp, Emericella nidulans
cgagcgcattttgtgtctcctccgactgcgatttgttgctgactgatactgattataagctcggccgtccctactctgttctggcctggtcaactatgcccgccaaccgagggtctttgagtgccggatatgctgcccttttctaaaccaactcaccgtaagactaccagatgcaatcactcgtcctccctcctgctttcgtgccgtcagattttggacatcttcgctaccccggccctgagcggcatttgttgagtcggccgcgatctgcaaatgcgaggcggtacacgcctagggatttccctctcccctctatgtccagctctgatccagaaaacgacccgctggagactctagggaatgtcaggcgccctgaccacccggagctgccgaagccggtgaccaccgccgccattcctgccgggaccgcggtgacttcagctgttccacggcctgtctcttcaacgcctccggaccatgtcacggttcgggagccggcgctgcagcggttcgtaacagcgccgggttatgagactctgccgcagccgctcgctgttagcgagccaacttcctcacggtttccgccgacattcatcggacagccgtcggcagggccatcgacagtgacgtatccgcccgcttatggaaccgcaacggctgcggcgtctcgtgcattgccacaaaagaccgtccggcgcacaaaagcccatgttgcgtccgcttgcgtgaactgcaagaagaaacacctgggctgcgacccagcccggccttgtcggaggtgtgtattgtctggaaaggcagtaagtcaactatcctggtctgaccgaatccgggagagacggtggctaactgagcgcaggatacctgcgtcgatgtcacgcataagaaacgaggacggccaccgctgaaggcggacgaaggctccatccgaacgtacgcaacgcagatggatcatcctggtgcacccactgaccaagggcaagccagacggccaatgcaccgcacgacatcatctcgcgaacttcgcccaatgactgaccttcagctccaagcgcaacccggactgatgggcgcacggctaccgcctggacaaccccagcggtggccgatggtatattcgcatacaatagacccttccctgacgcagcggacaatcggacacagacgaatttcatcctctggttctacccagtcaatgacttcagtctcaccaacgggacatgtcccaatctccacaggttacaatccagctctggcagctggtcgtatacccccaggcatgagcgtgggcatgggcgtcggacggccgagcccctatcccaacccaggaatgcatcttcatcctactccgtcgcctcctcagtaccagccctacggcgttccaatctcaccatacccggaaaacccaaactcgcgtatcatgaatcggataccggtgagcgatgccggtccaccaccgcgagaccctcgtgagggttacatggagtcacccgttaggctgccgtcaatatatccttcccccgttgccaacccgcagccgccaccattgccgcaagcacagacacacagaattagctatccatattcctcaacatggtctccacagcagcagcagcaaactccagagccccgccagggcttcatggagccattctctcctagcagccagatgcggcaggctcagacaccccgcagtcaccgaccttgggcagcgccaaagccaaagccaactaggcttgagctcctcgcccggggcgcaagttcagcagtcaccagcttctcgttcgtatggtggacaaagggatcaagatcggggacatgggcataaaacggaagagggcgactcgtcgcggccggcaaagcgccgtaaaatggcgttggatgatatggtcaacgactaactcaaccgcctatcactctagagctggagctctggtgtcagaaaatttgaatctgatcatactggatacttaatgtttgtagcagggcctacgacttctcacgatacttatgtgtttttcctatgtctctatcatgtttagaaataattatggttggtctccggcaggtcagcaggaggcggatatggatatggatatgaatactgtatcgggttgcacctagcttgtttgactgactgtatactaactagttttcttcaaaagtttcctttcctttatccttctgcgatctctttacttatttcctttgtcccttatatatcatgcatcggcgcgtt

SEQ ID NO: 9680 - DNA, 556 bp, Emericella nidulans
taaaggctgtctagactctacactccgtgatgaaggtattcagaccccccgaaagttcgccaagatgaacgagaaatacattttgttcttgcgattggcggaaagaagtcatgtctacatgtttcacaagctatgctggaagccaagagagtccagtgtcttttgattgctatctagattgaccagtcgcccgaaaacgcgttgatcatcgcctcttgagtatttgtcctggaacacgacgttgggatacaacttgtatccctgaagatctgagatcgctttctctgttggatcacacaaagcatgctttgcgccgcataaggctgtagcctataaacaccagttttcgagggttgcgttcgtcggcttcaaattagcatctgagtgtacgtactgcccgttaaggacaccttatggcgaaacgagatcattctcgcccagttttgcaatcaataaatgtccattctaatcatagacgtgccgcattatccacgtagttatctgcatgcacgtagttaattgcatgcctatgcggtcccgattaagcagtacagat

SEQ ID NO: 9681 - DNA, 810 bp, Emericella nidulans
atctcgccgagtaccgttttcctccacgcaaacatccaggcaaatatcgcaaatcaacctcattcgcgggtctgctcgttcccacgctattattacgtcggtcagcggacaagtcgtggcttcaacccgcatttacttcacaaagattgagccaatatgcagcttaccgaggaacaggccgcagaggtcaaagcttgggtggtgaaaaagctggaagacatgtaaggcgctccacacgaagccgtaggtgcctgtgggaaattttaatagctaactccaaaatagctcagacgcggattccgatgtgcttgccgattatgttttagccctcataaggtctgatgctccggatgatgaaattcgaaaagcctcggttgaaaacttggaggactttttgagggagcgtgagttctactccatacacccctgtggtctattgcgttaggaagaatatgctttttaacttgtgcttggtgaatagatactgccaacttcgtcgaagagcttttcgctacattcgcgcttaagcagacacccgcggctccggcccaggtacaacttcctcagggctgccacccagccatcagcacaagcggtcccgctagcaggatcatcgaacggctcgtacggcccgcaatcgcatggtgacaatttgagccgcaagcgcacatacgatgatggcttttacgacaattacgggcatgagaaccctcaaagtcatcggaaccttaagaacccacttcttgggcggggtgggaaaaaccactggacagggagagaatggacatcccccgtccggcctgggcagtt

SEQ ID NO: 9682 - DNA, 265 bp, Emericella nidulans
actgggccaaacactgcgcgaagacttctttttcaacgctgcagttgcagagtcaccgttggcaaattgtcctgcatcagtaattgacgggcttgcggcgatcgtcgacgcggacgatctagaccctatctaataggaatagtcggacctgtgcagggtctatctaggcatatacatccgcgatacctcgtctagcgtcatcgtcagacagagctccttgtccaccgtcaccagacatcgtatcatcccaatcgaagccccgtct

SEQ ID NO: 9683 - DNA, 584 bp, Emericella nidulans
gctgatcaagcaaggtttggtgacagttaacggacaagtggtgcgtgaactagcaaccactatcaagtcaggcgacaaggtcgaagttgaaggtcaacctatctacaacgaagaaaaggtctattatctgcttaacaaaccacgcggtgtcatttccagtgtaacagatgacaagggtcgcaagacggttgtcgacctcttgcccaatgtcaaagagcgcatttaccctgtgggtcgtttggactgggatacatcaggagtcttgattttgaccaatgatggggactttacagacgagatgattcaccctcgtaatgagattgacaaggtttatgtcgcgcgtgttaaaggtgtggccaataaggacaatcttcgccccttgacccgtggtcttgagattgatggtaagaaaaccaagccagctgtttatgaaattctcaaagtggacccagtcaaaaatcgctctgtggtgcagttgaccatccatgaagggcgtaaccatcaggttaaaaagatgtttgaagctgttggtcccaagtagataagttgtctcggactcgtttcggacacctagacttgacagg

SEQ ID NO: 9684 - DNA, 1149 bp, Emericella nidulans
ctcagtatgttgtgagccgttcttctctaccttgtcattgccgctgtagccctgctcgatgcgctcggtgttacggaaaatgtcgtccccaagactagacgccacctcaacgatccggcacgtcagtttctccactgtagggtttcgagaacatacttgtaccaaagcaacgccgcctcctgcgggttcagttcattgtagtgtgatacatccggctcgcccggttcgagaccgatacatcgatcctcttcaatatcaatctcctcagaggcgaagtcctcagtggcgtcttctgaaagcgcgtgccgccactccagcttccaccgaacatacgtctcgccgtctagatacgcggggttgggtggactatccgagtttattgaccgtttatagtcattcattacggcataccttacaggcgaggatatgatcattgactaaatctgattacccccttccgtattacctcccggagcctcctcagctatggagacatccgggaggaggtcaagctctttgtagaggtcgaagtagccggcagcagcacaggctcggccgacctgatagcgcattgagggatactggtgagctacttagcgataagtgtcctcactagcaaaatctgggttccagatgcaatacagccgggcctcggggcactccagtccgtcagggacaacgttgctcataatcatccgagcgttacgtgctcgacaaattcgggaaatcgcgacgttccacatagctctatcatggcctggctcactgcgaagtcgtaggagcagcgcagacttcgaatcactgcacatcgtgcaggggcggaactgaggtcatctggaatgccccttccctcgagggaagcaatgcactggtcgtaattgtagagttcgtttgtggtggctgtgcttgttgggaaaccgctaagctgggttcgctctcgctgtctgacatattgaagactgtcacttggtggatggggttcggcaagttcagagtcgcctgggccgcggatgaagcctatcggcggcaacgtgattatgaagcagaagactcagtaacaaattgcaataggatatcatttgagaatttgtgctagggacgagggtagacgcgtttgcggcctggtggatccttttcgccttgtggggg

SEQ ID NO: 9685 - DNA, 1827 bp, Emericella nidulans
gccgttaacaagtgctcagggagaccaccattggacagtgaacggtgtttcccctcgcggaaccacgagtccttcaattcggctcttgatcgcggggttacccagccgactctatggccgttgggtcgagctcactcctgccccatagagcaaagcatcaacctgtgtaatagacatgcagtctcgaagtggggctctcattggcccctcatcttttttgaattccccttttccccgcagtggttttgcgtaaagccgtaattccgaacatacgcccctttggtacttggatggccctttcaagagccggctctttttcgtgtccgcgcattcgtatacagtgcttgagggctttctgcggagatagacaaaggacaaggtcatgctacggcttgtatgctaggaaaagccttcctatcaagcagaaagcattccgtgcggggacgggcgaaccatctacaacgatagccttggttcaacattggtaatcagctggcccaggcatcacactgctggtatttgaaactggctcgtgcaataatatattctgttcatagctcatcatgctgatcaaatgaatgttggctaccttgtagaagcaatttatgccacgagccgtcgaccagaaaaaatgtcgagagcctaaccatgatattatactatatattgtggcccttgctctagaaagagtggcgcgagggaaactgaccaaggctgcgaaatagacaccaacccataattcaaacactatgttgtattaacgagcccaaggaaatcgttttcatgagttttcttgtttatccgttaaacgcctgcaatgctttatcatacccgtacccgtctaatcctttctcttaataaagagcggtcgcctatttcccagcccagatcttggtttgcgttatcggttgcgccaaatcagcaaaaggacacgcggaggcaaccgaaggcgcaatgctaacgcggtcatcctccatcgagcgcgaagaagagcggctgctgctgctactgtcgccaaggatcttcttgtcacccaggtacccttccttatcgtcgataatatactcagacatctcatcagcgaactcctcgccatcacgcattcgccagcgcgcaatgaggtcgttttgaatccagatgatcttgctaatcgctctgatcatggctgtcttgcgcgcgattgacagcgtcggatgggacaggagagcctcggtgaacagatcctggatgtatccgagacaagcgcccatatggatatattcgatgttcaacgggtgtatgcgctcctgggctgtgtgcattaaactataaagtacaccattagacccggttattcaagacgcaagagaataaacaaggtatcggttactcacccgactttattcaaatacctccagaaatccatctgcatcggatcagtgacgatcttcgtcaggtaccaccgcaggaacatcttcctccgcatgattggcgggctgtcttcgttgtagaaatcttcaattggtgcctccgatgccgtgtctttggtgtgaaatgagcgcgcggttatgtcgtactcgagaagcttgcggtagacgagattcacgacggcggggatgagtgtctttatgtatttggcaccggatgcgagggcttccatatcgcctgttcgataagtacatgttagttcgtcgctcgtccattgccaggatccaggtaggtaggcagaatgcggctaagggaagattgcgacatactcgaattgaagtcaaggaagtccttgagataataaattcgagcctcgagacgggtatacaaagccttgcggctgatcttgttgtccgcgcg

SEQ ID NO: 9686 - DNA, 543 bp, Emericella nidulans
cacgtatttgctgaggagctcagtactcgtcctcaaggtacctcatgcaggctagggaacaccagttaactaaccaatccaagccctaattagaactacaccacttaacaacaaaatcataacaacgacaccaccaacaatacccactctatcaatcacttacactctcacaacaatatattacacattcacaacttcaaccaattcactccactatatccccataacatatacactccataaacccaaatcacatcctcaaaaccaatttaaaaatctaattcaccatctactcaatatatctaccatacattaccatctcactctccaaccctaacttctccaaacccccaacccaactccacataactatctaacctaaccaatacatacacatcaacgtaattgaaatacctcacccaactccccaataccacctcaccaaatattcacaacccacaatactactatcaaataatacaaacaccactaccacccacatacaacaaccacctatttactcttacaccatcactcactcac

SEQ ID NO: 9687 - DNA, 910 bp, Emericella nidulans
gtcgcattttataccccgcacacaacccctgctcgaacaaagtcctatattgaggatatagcatttagctaaccggagagtgaaacagccgtctagaggacacaatcactttccacctaatcgagcgggtgcagttccccctcaacaaaacaatctatatccccggcggcgttaaaatccccaatgaacaaatcagcctgatggactacctgcttcgcgaaactgaacggctgcaatcgcgcgtccgccgctaccagtctcctgatgagtacccgttcttcccgtctgcgctggagaaacccatcctacaaccgctcgactaccctaagatcctccacgacaacgacgtcaatgtcaacgagaccatcaaaacgcggtacgtgcaggatattctacctgcgatttgcccgcaatttggcgggcgcgaggaccgtggggagacgcaggaaaattatggatcagcggcgacgtgtgacgtgagctgtttgcaggcgctatcacggcgcattcacttcggaaagtttgtggccgagtcgaagttccagaaggagacggaaaagtttgttgcgctgattaaggcaggggatcgcaaggaaattgatgaggcgattacggatgcgaaagttgagcaaaaggtgctggagcggttggcgctcaaggcaaagacttacgggacagatcctggctttcctgagcagtcggggccgaagattgatgttcaggctgtgcaggacatgtacaaggtaccttccctcttacctcaccctgccgttcatgatctaatcaagaacaggaatacgttatccctttgaccaaggttgtcgaagtagagtacctgatgcaacgccttaagggcactcaatgggagtagctgtgctctcgaacagttcgccatgccgtaacgacaata

SEQ ID NO: 9688 - DNA, 1639 bp, Emericella nidulans
gccgctgcggctggttcgatctcgtcctccttcggtactctcagtcaatcaaccactacacggcgctcaacctcaccaagctcgacatcctcgacgactttgacgagatcaaggttgctgttgcctataccttgccggacggcactcgtctggagaacactattccagcggacgcggaggttcttaacaaggtcgatgtcgagtatgttacattgcctggttggaagagcaacaccatgggtgtgaagaaatatgaggaccttccggagaacgcgcgcaaatacattgagtacattgagcgcgagctaggcggcgttcctgtgaaatggattggtactggccctgctcgtgacgacatgatttgccgtgagtagatgaatggctttacgacatttctctgacgcttgacaacctacaacatttcacctttttaccacccctcatatcattgtggaaagaaaaagcgacaaagcggaaagagaaattagtaccaaatatgatggaatagagctttttatgttctcctagagagaaacggtatgatctttgcgtccagttaatcttcctatatatttttatttctttattctctgtgagagttcattgacttgtacaagttttggagttccaataaagcgtgtacgacgatggcctacatgatatcttgcctctggtgatcgtcattcctggagtagaatgcgcgacggtgggaatactagatatctagcatatgctctataatcacctataaaaaaaaaacagttgcatctagatcgactgaaatcaaaaccgtatcctgaagagcggagtaacatggaaggatcaagatttatgatacagtaagaagtcatgtctattatacattgaacaaatctgtaacgtacatggtatggtaaacttagaagttatatccgtatccaaacacccttccagaaagtaggcaagacactataaagacaccggtagataacatggagtccagccaagtcgagtctattgacagtagacaaaacaaacgaaccgaaaacaagaggtgagtcgagtatttccttgtaacgccgcccaatgcattctcattttgaggtaggttttgtcgttgcgaagggtgattaggtagtgctgagctagagctattccatagtatgaacagctagggagcggtagggtgagtcggcttggggtttatttaggcccactcatccttgcggttatcgagccacttgtcgaacctctcggccgaaggcgcaccatgacgctcacgggcacctgaaccttgacgaccggagctacgggcggcgcgacggttggggtagaagtcattattgcggataggccggcggtcattgaacgaacggcggcggtcacagtagttattgtggccttgcgcgctatcctgcctgtggcgttgcgacggtttataatttcggatactgaacccgctctctcggtcgaggcctgccttttcagccatggagctgggaatatgcggtgcgtctcggaggccgtagccatgaatggctaggttggtgatagcctcacgcagcagggacccgttgcgaaaactgccaaccaggttggacagttgaaagaggcaggtttctgacttagtagcgcggatgacttagcggaaccggactta

SEQ ID NO: 9689 - DNA, 770 bp, Emericella nidulans
ccaaaaccagataattctaatcaactgcagcttgacaagcgtcaagctttctttggattcacaggaaagacattgctgtttttggcaatcgtgacgtttgacaagcgtcaggccgagaaaatgccgagtgacgtcagtctatccaaaaagttgctgaaaccatcagtgtctactacccagccccgtaagatgcaattaatcggcaatggtctgctcgtttccaatttgctgaaacaggatatatgatctgagggccatgaccctttcagatctggggaggaacaaaacgcagtagaactcttgcgcattgaatggtttgctatacagagtgcgccccaacagcctcaccgattatcatcagcattacaatcaatagtttcacgcccagtctacggtactcctagtggactttgcccagtgatcctgtaaattattccagctctctccacacgggggtggcggcgtgggtatttctatttgagagctcccatcccgcacttttctcccccttccctctccgcttctttcaactttttctcaagactctctccgctctttgtcttcctctctcctctcctcttttccttctctgccgtccttttcgtcaattcttctcataatgtcggcttccgccctgctcaggagccgtgtccgacggccctcgtaccttaacaagatcgccaaggctgaggaccttattgatctcttccccaatggctcgtatatcggctggtccggtttcacaggtgttgggtatcgaagtatgtgat

SEQ ID NO: 9690 - DNA, 2011 bp, Emericella nidulans
actgccgtggactcgaactatgattggaattccagacgcgatcctgttggatgtctgacgtgaagggccccgcgaagacaggaagtatcggtctcgatcagaagacagacgagacaaacgaagagaaaggagcagatccagggatcgccgcgatcgtgacagggaccgaggccgtgacaggagggaacgtgataaggatgggcgggatgcaagagtccgtgacagaagtggcagccgcgacaggtacacagaccgacgaggtacgtactccaggaatttagctacaaaaacgggtttctaactgatagggaaggttattcgttcaagggtgacaggtatcgcgatcgttcccggtcaccgacccgaaacggcactcgagacagagcatcgccaggccggggctcgcgaggtgatcgcagaaacgaacgtagggaccagcgagaccgacacaacattgcgccagattcaaaatatcgagcggattggacaaaagatgaaatggacatggatcttgatgaagcagaagaggatgacatcgacgagctcatgcgacggtgcctgggattctcgaaattcaggagcaccaagaatacaaaggtacctggaaacaatgcctatggtgtgcgaaaggagaagaagacggagtatcgacagtacatgaaccgtcaaggagggttcaaccgacctctgagtccgtcgcggtaaaagcaagatatcccggcctgttctttgctattatatccttattcctattttttctttaccgttacagagcttttttccatcctagatttgttacatgcattttgggcgttagggttgtctctttagctttatttctgtgcacgttgtgctatcatttttttttcaacatgttgatgaattgcatcgtccctgcatcaatttcaaatatcatctttcgagcgggattcatctgacagtaatgacaagttccggtccgacacatttaaaccagcgtatctccgattatggagtgagagaacaagacacatgactccggtgacgtagtcgggttcatttatctgttgtaccttctccagcttctccgacccaaacttttaactcttaacaatccatcactgtggcttccattagagcatttggtcctaaaatcgcacccatcgcaaatcttgtacagtacggaaagatgtctgtgtcgagtgaccgtcgcgacatcatcattgtcggtatgtaacgagtcgttactttctgctttaccccgcaaatattgataagttcaaggacggctattctgatgagcatattccaggtggcggtatcattggatgttgctctgcctattacctgacacgacacccttctttcgacccttctcgccactctgtgactctaatcgaagcatccgacatcgcaggaggggcatcaggcaaggcgggcggccttctagcgctgtgggcatatcccagcaatattgtcccattgagctacaaactacatgcagaactagccaaagaacacaatggaaaagatagatggggatatagggaagtcgggtgcgcacaactggtcgctcgaggccgcccgctcagcgagaagaaagagaaagatggtgctggtagctccttatcgctgcagaaacgcagcgcatccgccatggggaaactaaagaccgcaaagataccccctgagcttgactggatcgaaccggagcttgtcagaggctacgaaagcatgagcgaccccggcgaaactgcgcaggtgcatccgtacctctttacaacgtcaatcgccaagcttgcggaggagaagggcgccaaagtgatactgggctcagtcacagacatcgactataaaggtggctcggttaagtctgtcacttacacagagaaggaaaccggtcaggcacaaacgatccctgccaccgacattgttgtggctgctggcccgtggacaagctccatccttccggatgcccaatatctgccatgcgcgcgcatagtgttgtgatacaaccacgagaccagcagtg

SEQ ID NO: 9691 - DNA, 1462 bp, Emericella nidulans
agcggccgcataatacgacttactatagggatcattgcaagcacaatgttgatgaatttaaccgcaaattgacatggagtggtcacctaccctcgccaattttctcaatcttctggtagttttccatactgaccacggggcagccactacttatcgatatgatagagcgatagaatatgtccggctcaggtgtctgggacagaacagatgcgaggcagcgtccaccaaggccgtggggtgcaggacaagtcgactgcacaacaacaatgacacagccgtgatgttgcccggggacaaaggtgcagaaaaacaactgccggacagggttcggtcgttctgcgagggactcgaatatcgaacgggcgagcaaggggcgagacagaaacccaattcccaatcaagggctaaccagatccgacgatagctgaattaaacttacctgttgtctgtcgaagtcggcgattctttcttgattgacagagagtggttttcgtctggtgggggaatcaaacgaaggcggtcaacaaatgcggttgtacacaaacaaatccatcgcgtctagagaaggcggtgggcgcgtcccacttgactgcaactacgcaggatcgtatcagtgtcagagcccctttcaaccctccatatcacactatttgctacaaaggatttgctaaaagatagaaccggacgagagcctaaacttgcaacctgcttcgtcagcggttgttcactattttatcaggtgaatcatcgtcgcaattttcgctaatctctggttcccagcagcggaactctgagccgctttcaatctaggtttcctcctgagaaatgaaccattggccatgacacaccggctgtcgcccaaaatacctgctgttgcgtcggacgaccgctgaacatttgacgggcgtcacccataatatccagaacggcccctgcttatcgctttatggagtatgaccgaaaacggaatttttgcacttccttgaagaattacggcaaacaacatctgagttcaggcggcattgatcgagtgagaggtcttcataagcaatgacctttgggtttggaagatcaattgaacaagaaccttattctgcaaaggctaacagttgtgccacggtttctggtcactattaagaacttctcaaacaggttgcaaggcgcatgtatagtgcccgcaacccgtagacgacacatttcaggctctgttttgcaccagtttcacatcttgtccctctcctggaagtgaattgtgcgaggaagggtcaataaaccgatggatagttccgaagggacagtatcaattgggcaagttggaaaacccatggggtgttaacaccgatgtacctttaagtcctgcctctgaggatcatacctaagaggagcgttcggtggtaattggtctttacgagttcaattgaagtctggagaagttttgaaagaacttaacgcttgacgtccg

SEQ ID NO: 9692 - DNA, 1827 bp, Emericella nidulans
gttgattgcatacttccttctcactcgcgtcacacttgcctggataacttggtttctctcgcgcccagggctcaagctgttttcagcccttcttgtttgaggagtagtgtttctcgtgatgctaacaataattctacagttgcgcgcatcatgaaattagcattgccagagaatgcaaagattgcaaaagaagctaaagaatgcatgcaagaatgcgtgagcgaattcatctcttttattactagcgagggtgagtgttctattcgcaaatagttatttgatggagactaatccctctgaagcttccgaaaaatgtcaacaggaaaaacgcaagacagtcaatggagaggacatcctgtttgctatgacctcgcttggctttgaaaactatgctgaggccctcaaaatctatttgtcgaaatatcgagaggtaagacctgtgcaacgtttttggacgatcctgtctatcccagacagcctttgtgctagggcaagtgttgctaataaatatcagactcagtctgccaggggagagcatcagaatcggccgccaagtagtgggtatgccgggggcggacccgtcggcggagctgccagcggcccttcagtcgtgcgtgccgggggtgctgcagctggaggcgccttccccgaagcctctgataatgcaggcagcattatgaatcagggcttggacccatctgagcaggacgcctcagcttatggataccctcccatggttggccaaggtcataacggagctggtggcgaatcttattagtctttctgttacggaaatgtacaggggacctgttgacgatacgggcaccaggctttttgtcttagctcaaaaagacggacatcttcttgcgcggtataacagagttgggcccttggtcgttgtcgccaaccggtagcccatttgaacatacagaactttgccttgcggcattgatatcattacagtttcttgaagacgccgctccctgtgcggcattcacatggtcttggttgggttgatattgtgttatggggtcttgtacactggcgtttctcaaaccgacggaacacaggacagggatatgatgaactttgttagaatttagcgcttctttccactttcttacctgctcgtactatgcagtcttctttccattccctttctggaccacgccacgcctcctgcaactaaccactataagtgtccgtcacaccaagacgttacgttggcctggtttcttgcaataaagcggctgtgggaagccctatttacgggaatgttgcgttcaccccttactcctaaaatgatcatgtatgcatctttccaacagaagctcggaagcaatgtcggacggccgatttaaccagaagtgagttttctatatctgatagactaactacacagaatttcatattttttggacatatttggcctttccaggatatagctcactgtcacgggcttaggttcatgcatatgataagggatttacgtatatgatataggtggaatacctgtaggtaaattatgcttaagttctatgtccatccactttacccgcactcatcacagcgttgccttcaaatagtacccaaaacgccaagattagtatgctaaatacgatccccaaagatagactggaagataagctctttcattcccgcatgtacccaggtaaagtatacttctccagttacccatgcatccacccaccatcctgcaagagatccgacatcggcgtttcttgccagtaaatctggcgccactcgtcttccagctcggttatcccttccatagttgaaggaaggactggtccctccagatcggtg

SEQ ID NO: 9693 - DNA, 136 bp, Emericella nidulans
tagactctgtataagcttggtgtgaggggcttgaatcacgatcattggactggacactgcgtatggaatcgatagtaagagtattacgatttacaacattttacagagtcacgtaatatatgcgcagtgtatatcc

SEQ ID NO: 9694 - DNA, 1327 bp, Emericella nidulans
cgcattcaagttcggcaaagcgacgcaaccgccttctttagaagatcgcttcgccgtcattgttatcttaggacacgcactctaatcggctctacagtcgttccggtcagggttcgacaatcctacgcaaactcagcaggtgctgcaggtgtttgcagtaaaatcatcctttctgtatctattattcaccgaagcccgcgacgaaaagccccaccaaccctttatcgtctgtcgacttgccatgaaccacaatcatcgtcttcatggctagtcatatcatcggcaaccgcaatagcacaccggaagcttccaaatcttctcttcggcctccttcgtcgtctcggaatctagctacccaccagctccgcgcatctgccgacatgtcaggttttccttctcctctctcctaccgcagtatccgccctgcatccgaggtatacttcaatcagcaagcgcaaacgccaggaaatgcggaggatcctctggatcgggcagcccaacagtggctggccgatattgaccagcacgaaaccaccttggaggaaatggctgcagcgacgctagaccaggacttcaaggatgaactcagtgccatagagcagtggtttcgcgtactgagtgaggcggaacggaccgctgccttgtatgctctgttgcagcagactactcaggtgcaaattcgcttcttcattcaggttttgcagcaaatggccaaaagtcatcccatgtcgggcctgctgtctcctgcaaactttggagagaagggtatgtatttttgatcatcaagtaaaatgtccatatcagtgtctaacagggatagacgccatgtccaaccgtttgaacgatgccatgtcaaagctcaatgtcgacagttctcgaaactctctgggtcgccctcctccttcgccgggcgccaaacgcaactccggacttgactcttctaccattaatgccatgtttcccgatgcagctgcagctatcgcgaaaaagaaggccgaattcacccaacagactggaaacgcgccgccgtccaacaggaacagtgcggtgttcaatgagcggacatcttttgttgctcccactatctctgcacctgacaacagtgcagacaacctgagccagccaccggtgtcgccctgggctcagcgcggtggtcagagcctcagccacctatcgctcggccaaagtcgtcttttggtcagcagcctatggggcaattcaaccagtctggcttgcgctctcctctacgcacaagtcagactgcgaccattcctgctcctgagatcgaggctccgttgctgtcaccgtatcatgttaatgccagctg

SEQ ID NO: 9695 - DNA, 775 bp, Emericella nidulans
ccgcgagaagagtatgacgatgattactatgtatactgcataggtgccatacccaaaaaagaatgaccctttcctaccagtatattggagagcattccagttgagttgagatacatgaaaggtgacgagagcccattcattttaagaatgataagacagtttatgtatagtttctcaggtacaaaagaggccataatcaaaacgaaacaactaccaggcggtactatcatgtattacggccaggttcttaatcgacgtgcttaatcttctacctcaaaaagcctggtcggtgcgttgctgatcatgccatgcctgccatataagcctattggctcggaattgatcacaactcgttgagtttcatcgttttccttaaaactcctgaggggtggagctgagcagtatcgagcaacgagacaaggagaaggccagaaaagagaccaaccgacgagaggatggacgggatagacgaggctgatcagatgcccgtcgaggctgctccagaagacagcgatcccctctgctacatatgcagctggtacgtgggcgacttcgaatgcgatccgagacccaaaccgggtgtctactacggcagcggaatgatgaaggatagacgattctggcgaaactgcgcatggaaacgatatttccgcatgagcaagtaaccctccctagctcctgaaaacagtgggctacgccggggaaaagagatgacgactgatagaaagtctctagtcttattccacccgcgtaagtcaatctgtcgcctctctgg

SEQ ID NO: 9696 - DNA, 554 bp, Emericella nidulans
gggggtgctttagtacccagcttcggttccatattagagaggtaaattttgatacttgtcaactactaataaactatctttttcaactactaatattcatttctatttttcaattaattaatctaatatatcttttattaattcattctattatttattaattccttattctaaataatccttaatccacacataaaatattcactattatatatacaatatactcctccatacttttataaacatttcaatcccccaatccacattattaatatttatacataaaatattactatacaaatatacttttaaatactatataaatattattacacttttaactctataaataaaaatttaatatacaaattaacaactctactatcaaaatataaaatattactttacacaactatttattaattacaatatattcatattatatatcttcatcaataaaaaatcttatgtataagtattattctaataatctcaacccttctaaattatcttcttctaatcactaatacttattatcaatttaatctctaatt

SEQ ID NO: 9697 - DNA, 207 bp, Emericella nidulans
ttctcctttggcttagcggcttgtctgggttgtctaagatggttctgctttgcctttccggcgcttgttgtcgtgtgtgtgtgtggctatccgtccgtttgttgcttatgttggggcctagccgtttctcgtttcccttttgcttattcgcttgtgcctttgcctcttcgtagtctgcttctcctgctgagttgcttttctggcctg

SEQ ID NO: 9698 - DNA, 951 bp, Emericella nidulans
gtggcagatgcggaacaacggaaccgtcatggagagctaccttggccgagaccaagttgtcagcatcatagccgtgagcaccctggagcacgctatggccaccgcccaagagaggacctaggatggagacgcactcgcagagaccgtgaactaaggaaacacgcttgtcagttaatcgtccttagctcgcgtccgtgtacagaactaaaaagggcgagggagactaccagcctgctttccgtacggatacagagcctggacgacttcgtattggattacgccgccgccggcatatgcggtgtcattgttcggaccgaggccgatgtggtttaggccgcgcatgcggatctgaattccgaccggtatcttgctgatgtcgtcggtccagccgtgcgtgccggtcacggccaggaacgggactccgatctgatttgcgactttgatctggaaaagggtcagagactgatgctttccttcttcgccaggtcgcctctcaccgtattcacgacatcatcttcgacagccacgtcgacgacggctaggtaccccgggtggacgcggggtgcagcagcacgatgggtgacttcaacccattccttagagttgggggaaacgatagtggcgttctcagagagctggggcttaagcagtttcctgatctgtgccagcttggcttctgcagtaccgttggaagatactgctgcctggacggcacagatgaagaacccggctcccaggatgctccagaactgcatcttctcagaggttgtacctgatgtcgctcaggtttgtcggataagccgattgctgtatggaaatgagaataacctgtctggagcagaagcagaggaagattagcctggctgaacagtccctatctttatagttttcaaaagcagtggccaaccctatgaaccgttccttacaagccgctcttggggcatatccaat

SEQ ID NO: 9699 - DNA, 1782 bp, Emericella nidulans
tggcgaataaccctactaaagggatcttcaccttaaatcgctcggtattcaaaggccgccacaaggacgactgggtgcatccagtcgcacattttgagatggcggcaaatctctggatggagcgtccaacatatattgcacagcatggtggaccaacgccgagggattccgaagagaatccagagcagtttgagagggaccgagtgcgggaatgcaaggacaatctgcagaaggccgctcgttgggagagctacgagcaggaggctcgctttgggttgaaggtgacggccgcgctggaggctgttgccaagtgggaaagccagcactcaaccaagctggagtgagagttgtatatatagaagcttgcgcggtacatttgttcaatagcaatgatagacgaacctcaggagcagacctagccttgtttcaagcagtccagtctgacaatccagcaacaaggtctttatttttcgcttgctgaatactagcagaaattgcagcaatagtactgatcctgattaatggtcacctcaactacagtcttcattttgtacaaaatatggtctcggcacgctaggtggtctttatttcctgtagggcagggcagctccaccctgacagtggcgatctgcgtcccacatttcgccggaaaagtttccgttgctctcttcttctcccatttgccgcttggctaaaacatcacccgctaattgctctcgttcctcaatgccttaactatagagaaactgatgaccgtctgagagatggtctactgcaagcctgccaaggtacggtggttggcagctcgaaagtcacaatggcccacgacatacccaacatgacctcctgatataacacaagggaagtactcaattgaccaggctacaatatcgggatcaacgatcgtctccagactgaggctccaccgtatccaaacgagtcaaacgagcggcgttatcggaggtctgatggacataatgttgagtcggttaagacggcttcgatcgctgagtctgaatcctacgctaggaagactttttttggctgcggtttctcgtactaactaaataataaacgctggttcgcccagacatgcagtgcgaaatgacgtctgatcctgctttctccaagttccaaggaggatgctggagtgcttcttcactccagtttttatacttgtacaataatctttcaccttggagggattctctatacatatctctatacgcctaataatatggagctttcaaaaaccgaaagagagggcagtgagctccaaccaaaccgctcctctacttcatccgacgatacagattctgaatccctcgacgaccacaaccaagatttcaatgcattacaaatgcaagcaaccgtcgtatcgagtacgtcatttgaacagcgtgcgcagtctgttatatccagaattcggagcagagagcctggccaggtcgcacgtttcacgcacccgctatcacatacgaagacgagcgacgatgtgatcgtcgactttgatgggcccgacgatccctaccagccgttgaattggggctttcggaagaaggcgattacaacggttttgtatgggctaaccacaatgggtgcgttgatctctgtcatgtcaaaatcctatactactccgtataaggcggtaaatgtattattgaacttagggctgacttaccatgtgtaggcgcgacatgggcaagtgccatgtaaaatatagcaggctgttttttttctattagactgtcagaaaaactaactctctctgtagcaactcaa

SEQ ID NO: 9700 - DNA, 1773 bp, Emericella nidulans
gtaacggccgccagttctaaagacatgtgctgtctatctactctgtacatactccggtctccgaactccgactcctcttatggtcggcttgtagtttcatcttatcagccatcgtcagcaaatttttcgacacagagtaatttgatcatcagttctatggttatagcagtcaaccgatcgaacttgaaacatcaatgaatcaactccagtccggactgtgagctgtcggtgtattttccatccccaactgtcggtggatccagccccatcgtactgtcacgtactgtacaggagtctcatacatcgatacgatacacatcctttttggactccttcatccaagctccataataatattaaccatcctctttaaccccccccatcagctcccgatatcgtcctcttcttctttaatctcaacctgggtcattttcaattctcttctcctgactttcctcatcctttacctcctccatctcttcccgtttactcctcttcctcctcatccttctctccatcttagttggaatcctcccaactttttctcccactttcctcctatccctactctatcacagtcgcagactgctttatctcagtcgaccttaatactctctccaaccgtccttctccctgaatcttaaaagctctgttgacaggcaagccctccacaccgtatgagtgcattgttacacctagttaacatcgaccgagcagagtaccagccatcatgcctgccgctcctcttgtagcactgtcaacggccctaacgccaacgataacatcacttcgtttgagcctccagccgagtgcgctctcccttcgccgatgccctcttccacaacaagacaagatgtttcgtatagtgagtggaatgcgatcctgggtagtcaattgcataaactgacggcaatcatagcggtatgcagccccgggctgtccagggtatgctggatttcgacttcatctgcaagcgttccactccttccgttgccggtatcatctacacattcggcggtcaattcgtcagcaagatgtaggttgcatatacaaggatcgatgctggttcatacagctgacaatatgtccgtaggtactggggtaccagtgaaaccctcctccctgtttaccaggacaccgcaaaggccatggccaagcaccccgacgttgacaccgttgtcaacttcgcctcttcccgttccgtctacagctctactatggagctgatgcagtaccctcagatcaaatgcattgccatcattgcagagggtgttccagaaagggtatgtgagctgtgtgctgcacaattgaagagacctcggcgctaacatgaaaacagcgagctcgtgaaatccttgtcaccgctaaggagaagggcatcaccatcattggacctgctacagtcggtggtatcaagcctggcgctttcaaaattggtaacactggtggtatgatggacaacattgtcgcttccaagctctaccgcaagggatccgttggttatgtgtccaagtctggtggaatgtccaacgaattgaacaacatcatctcccaaactactgacggtgtttacgagggtgttgctattggaggtgaccgttaccccggtactactttcatcgaccacctccttcgttaccaagccgagcctgagtgcaagatccttgttctgctcggtgaggttggtggtgttgagaaataccgtgtcattgaggctgtcaagaacggtgtgatcaccaaacccatcgtcgcctgggccatcggtacttgcgc

SEQ ID NO: 9701 - DNA, 726 bp, Emericella nidulans
cgtgttaatcgttggttcagggtatgactgtcggtctcagctatgattcagcgcaaagtatggggggctcgaggctgtacgtactgtggccataattttgaatcaaataagggcgttcgtccaagtcaggtttagcagcagtcggctgtcaaaccacgcgtcgctggttgagcgagggatttcgttgtagaggttataatcatcaggaatggtacaagcagcggaagaaaatatagtctgccgatcccgatcagaatacgatgtgttcttccaatgtatctctgtaccaactctctccttccatgacccaaccgagtcctcacttcagacctccgcaactgtcatggcagttcctgtattcgcagtattgttgcgattgatgacctgctttacagcacgaggatcatcggatcttactggcttgagttgttttcgcacagtagccagttgccgtctaatccaaggtttgatgagagtgaagcgaccagagctccaaaactcggcgcagccaagggctagggcgaatgcacagcagaccagaataatgggaaccaggacaagcgcgacgacgataattgctgtcttctgtttagggttcatggcgatacctatacagttggatccaatgctgccatgtaacacacgatagacaatggagtgctcagaaggggcatatggataagtccgagatcctagtagtgtatagtgtcccatacatcgtatggt

SEQ ID NO: 9702 - DNA, 1560 bp, Emericella nidulans
acactggcccgttcgcgggcgagcaatgaacggattcagaacatcgggcgtcgttggcgagtggcttttgctggatagtttgaagaaggacaggctagatgaggtaggtgatacgggacttctcaagccgtcgaccgaacccatacgcgataactggtctgtagagttggtcctcgagcttgatcgcgacgttgtgtgtcttgataccgagtcttgcaaggagtatcgtccactgctttccgaaccagtattatgtagggcgtccgatgcctggtcaagtgattcgatcatacgggcatgctgtatctttacatttccaggacaaaggggacacattgcattcatggtgagaaatcgggacttgtcttgtaattgcttgaaacagttagccaacagcgcagcaaggcaaacggcgatggacagaaatgagaaattaaggggggggaagatccgttaacagggacgtgttcctacttcgtacgctttcctgtccgagctcctcagctgttcctccagaagcgcctcaggaactgggtggactgcagggcagttgacaacgtacacagcacccacattccccctcttcatttgggttggatggccgaaggcctgtgaagacgaattatgcaaccattgggtcagatgtttttgataatcatgcgagaaagcttccaattctccattgcagtcccagagctggaccctgcggttgaccagccatctcattagcagacttagggctgaatccgtggaatcccgtagcggcgaaagcttgccccacgagtctctaattcttctggtctgcagaggagcatgttcgccggcgttttggctcagtatcactgttgcaagtacttgcaaggatggagtgtcgaattcgtcgtcgaatgcagccagaattgtcctagctagcttttttctgttgtcttgcgtctgggtgtaagcctcttctacctttatcgcaccggcacttgcgtgtccttgctcttgggaaaaccgacggcggtcaatatgacagtgtatcagagcggactcagctgcccataaaagatcgaataggaggtaaaaagatgtcagttggtcatcttttttcctcatgagcgcggtcaaaaggtccgtcaccagagtgtctggcgcaccagggaaaggatactagcagcgtcagccctgccaatttgccgatagacatcgcggccttttggggaaaacgtacaataccagacgaaaatacggggatgtaggctttactagatcttagtagtgattgttgagcatgaaataagtccgtcgatccgatactggcaatcgccttcgggagcaggtcgttaatcaggaagctttctgacttggaaagatcagggtgctcccaagcagaccgcatcgcccgttccagtctgaatttcgtctcggaattcataggctcgccgcgcaggacgagaagccgaatgctgacgagaaaggtatgtcttatgagcccccgacctctcaaagattccgaggccgtcgaaaaatgagcagggaaaaaggtcgtccttgacattcgtccaatacaggaactgc

SEQ ID NO: 9703 - DNA, 1503 bp, Emericella nidulans
tctgcagcgtttcgttctcgccctgctcctgtcatcttccataagctaacggggacagattccctgaatgttcgtgcctgcttcttcacaccccaggtctagggttgatggctttgctgaccactacagtactacgcaccgcaaatattcgaactcatcggtgtcaaggacaactcctccttgttaactaccggtgtctacggtgccgtcaaagtagcggcaacgatcttctatgtcacatatctagtagaccgcgtcggccgtcgtctccctctactgatgggagcaaccattcaggctacagccatgctctatctagccctttaccttcgcttcgctggaacagacaacacggatatgggcggcacgccggccggtggtatcgtcggcataatctggatctacctgtatgcctttggttggtccttcggtcacagcgttgcttgctacattgtagctgcggagatcttcccaacgcgaatcgtaagtacccttctcattttctctcttctttaactcttgcggaaatatcattaactcaatgcatgctgcagcgctcggcctgcatgggcttttgcttcttcaccaattggataatcgattacggtatcacgcgggcgacaccaaatatgctgacgaatatgggttatggggcctttctgctatatgctcttttgacgtacctcggagtggtatttatcttcttctgccttcccgagttgaaggggcggtcgattgagagtatggatgatttgttccagcggcccctgtggacactgtggcggcatgcgtatccaacggccgaggagacggttaggcatggagtacgggaagccaaacgggaagaacagaagcagagtcataattagctttatgatgaagttgatgacattttgggattgtttggggaggggcttaagtgctcgtgcgagttgtgcaaagaatgctgcgtgggaaggatatcaagttcgcattgggtagtaacaaacatgcctatgcttacagcagatagataatcatgcaatttctgggttttggttcgttttaaggcttgtgatacgtaatgcctggactgtctccgcaatactccaatcggccttctccccgttgctaacctacgataccccgtggccgcggggttggtgggcagctacggctcatgatacttatatcagaacacctctcgtggtatcaacctcaagagtacccaggaaaacccaggaagatggccacagactctttcatccttaacacaggagccagaatttctcgccgtaggcttcggcacatggaaggccggtccaggcgaagcagcagccgcagtgcaggcagctttcgacgcagggtatagacactttgtaggtctccataccttgccgctgtctaatatagctaactactgttaggactgcgcccctctctgtacgttgtctgcgcaaatatacccggtgcaagctaatcatcacagacggaaacgaagcagaaataggccaggtcttcaag

SEQ ID NO: 9704 - DNA, 724 bp, Emericella nidulans
caatgaatccaacacgatcgattccgcgcacttccacagtttcagaagtggctttctcgctttccgcaccagatcgtttgatcaatgccccgacagtcctcggaactaaccctgatgcagcatcaaaagcacgtttcttcaggggttgaacggagatggtcgagagttccgaaaggagtgtcgcagcagtgcctcctgtagagcgctggtaccacgtacaaatgtcctgaaggaagccgacacggataatgcccatactccattgaaaattctgggtccaggacgcgacaattggcggcaggtgaatagaagtcattccaatcatcgcttgcgattgatagaaggagaagagagaaagagcattagctgcgacgtgcgcggcggtgtttgaatgcccaagtccggaggtaatggcagaggctgtcaagcccaagccggcaatgatggccgtagccaatccaacgcccttttggtaaacggttttaccgttcgaaagactagcctcgagacaagcaatactttcgtgagtggttgtggaattaatatacacacggacagatgcatcaagatctggaacagtatacgcgattcctaagagagtcaatgcctttccttgttagtctgcaatccaagacacgtacctggaatctgagatgctacatcgtcgccaatagtaataggagcgtcgcggatattcatgggaccggtgttcatgggacacaga

SEQ ID NO: 9705 - DNA, 328 bp, Emericella nidulans
  unsure (1)..(328): unsure at all n locations
gaggtagtcgcgcataacgctgctctcgcatccttgaagctgtctcggggcgaacgttggtcggaggaggtgtggaggcgggcgtaagagaggtgtagtgccgatttcagcagctcaagcagtcgtgcatattctctacgatactgtatgccgtggaaccggcaaagactatgatagaacagaaggtacccaggtctacggntctggcgcatggtttcaggagtggtagcggcagcgttgtgttcaaggccgttagaatgcggccgtaccaaagaaacatatgaataataatgatggcaaagctcgaggcgagcgtagngttgcgggt

SEQ ID NO: 9706 - DNA, 167 bp, Emericella nidulans
  unsure (1)..(167): unsure at all n locations
taggttaatgtatgcangttatacaagagttgcttgttttctttgattgcttaaaggcagtgagtagcagcggtcgtgatgtgtgggttactgagtagaagncgtatccgttcacggtagggcttacagcgtcgggcgcaggggantagtgtagatgttaagtaagg

SEQ ID NO: 9707 - DNA, 292 bp, Emericella nidulans
tgatgggcgcaacgggccaaacagcgaggagtcggtagcggcgtgggtgatcaaggaggggagctattacaggaagcacattgccttgggacggttctgttgcatatgtaatgtcagaagcatggtatgtatgatatgagaactgtgactggtgaggccgctatggtggtactatgtctagaataccgaatgggagatcaaaaaaaaaaaaagctggcaacgggtgtaatgtagtgacaattggatccgatatcagatgcagtagcaggaggaagtttacgcaggtatatgc

SEQ ID NO: 9708 - DNA, 1202 bp, Emericella nidulans
agcctcgctgaggtaaagatggacaagcccaggttctctgcgactatcccagtcgagcgttttggagttgcaatcttggtatgctatctacctaaatattgaaatctctggggtgaatacatcggtgtgaatgcatacctcgctcgttatagattcaagaccccgagtcatgatgcctttggtaaatgtatcccgtaattgaccaaatgggctctgttgtccagaaatgcaatcgtttctactcttaccgggaaaagaaaaagttgatgtgtaagggaaagataagatcacgggcacaatactgcatatacaaggtcgacttgaggagcgttgtaacggaataacatcgccgaggcgagttgtattagctacgctgcaggttcccacctctgactcgcccaagggcactcttcgtgaacccttaccgcggcaatttttgttaaggccagtttggagactgtgagtgtccaacccttcagagttcaacgtccttgaactgcaatatgtgtagggatttaggggcaattcgtcaagggcatggcaatgaagcgagtgaatcttgttgtttatccataattaccccattatcttctttaatatgtaaaacactaaaaataaccatccaaattctaaataaaaccatagaaatatctatatatctgtttgggctggtgctcttagaagagcattgttattgacattaaagtcatacagagttgtctgcatgaccacagacttaaacctaccctgaagtagaacagtactctaactgattgtataatcagagtagactgtgtaaccgcgatgtcgccattgctgccgcgcatgggtagttgttcaccaaacaaggcataaccagcgctttcggacgagccatgtgtctctgtccgcactgcagacactttgcatcggcacccgtggcaataaacaatgtcacggacagacagtatttggcgaactggtcttcttgtgaaaacggagcaggtattcgatgacgctgaaattccgaggacccaattccgccaagtgcgccaatgcggtcgagcgcttaagctctgaagagcagcggcggcttgtcttcgtacttatgcatgccgcgcttatacagctatctctgtatcttagtaacctgcgtggcggtcgaccaccccaaatccgcctcgatcccgcgcaaaagatcgataaaaatctgccggtgttcg

SEQ ID NO: 9709 - DNA, 1356 bp, Emericella nidulans
  unsure (1)..(1356): unsure at all n locations
ctctgtctggccaagcagcatgcttgcacctttgacgaggcccctcgcaagcgtcgccggctgcgggtctcggtctcgcctctccctgtcaacagcatggatgcggcgggagatgcacttggatctggcgatccgctgatgggcgttgcgtcccaacaggtcggaccagaatctagcctcgaccatgagctgtacgatatcaatacctatagtttctcaccctcggccgttttgcagggtatgcactctccagacggccgacgggactccaagaccaacacttctggtccgcaagatgctgtccactgcagtcccgcttctatacatgctgtgaattcagcgcccaccccgacgttcgcatccaatcagtcgcggtcctgtcaagaaaggaacgcggcggcctcgccggcatcttccgaaatcacgagcggtcgaccgtcgtcgcctctgatgcgcttcgttggatcctcgggggacctcgacacctaccttctcgcgcatcgtcactacgacgaacagaacacctctctttccaggcatactcatattgtctaccagcgcctacagaacctggagagttcgctggccgagtccatgcccccgccgcttctgactatgtgccggaacccgtctctccccagagggcatgagatcacagacaccaagctggtccaagaggcgcgacaagaggtccagcagttgctgaacgccgatacggtgcagcggctctgcgcccttttttcccgctttgtgcacccatacctacccatcatcgaccggaggacgctgaccaaagaaagttcccgcctcttggactcgcccgccttgctggctgctatagctgctactgcaagtcactttgtggcctacgacgatgttctgtgcctcgaatcggctaagcctccgtctccaggccggctgtatcagttgagctggcacctggtactgggggagctcgcctccccgcggctgtcaacggtgcaggtcttgatcctgctcctccatcggcacctgcctgacgagctctcctttgaaggatcgatggactccaacatgcgagggctccttgtcgcgtcaacgtacactctcggcttgaaccgggaaccaggtaggtgggacacgctntcgccgcaccagcgcatgctccggagatgtctttggtgggtcgcatgggtgacggagaagtggatggcgttcagcgatggtatgcccagtcagtattatgacagcgaaacaacgtatctncgttggggagcttacatagcgctctcgacacccggcaagtgctactcgcttcgtgacctgaccaactcacattatccttgacacgtgtcgacattttagcttgcaccttga

SEQ ID NO: 9710 - DNA, 464 bp, Emericella nidulans
ggggttgttcagaacatcagctgtcgttcccttatgtctgacaactcattacaattaataaattatatcccatttattataactttatttatctatatatacaaatacattttcatcaaaatattacatcactattctataattttacttcttactctctttcattataacatccaatcatatcttaatttattatattcattttcattattacataccttaacatcatatttattttcatatcatcttcattcttatctcatactactacatttattactacaattcccctctttataatttctcttacatatctttattctttcattctctaatatttacatattaatattcttataattaatacttataatcaataatactaaaaacttgttctatttcacaatgacccttctcacatctaaataatacaactatttttaaaatatacccgactccacatt

SEQ ID NO: 9711 - DNA, 1365 bp, Emericella nidulans
gcataacgctgccacttattccgcaggtctcagattcgtaggcccttacggcatcgcgcatattatcagtacgctcaatccgcagaatgcagtcgaccggtccagccttcagacgatgggtcaagtcaaacatctcacctgagaggcgagatttaaaaacagtgtttcgcaagaggcgaaagactgagatgaagtctggtagagacgatacgtataaacagggcctaagactgggtttcggataaagactaagaagggacgttcaacgagacaattcgccgccgttcgtggaggtttctggttttatggatcctgttcaaaggagctcggagggggatcgggagcaggagcatagactcattttccggctctggcccatcccacaccccaattatcggtcttacggcctcgtacggagagagatatacgatctttgcctgttccgtgctagcgagatcgctggcttcgtacgtaaccggctcactggagctggggcccagaggcagttacgcaaaagtcctggtcgatatgtcgaacggcaggctcggggcaatcgagcttcggaggattaatgatgacggtgttgtcataattgtatgatgctgtgttccgggatcctaagagacgatcaacagccgcgattattagccaatttgctgatgctgagggattcaggaacgagaaaggaaggattctgtgtgcagcttacatacggcgtatcgtccagtgagcgatgcccgactgatggagaccaaagtaatcaaccattgtgtatggactgagcccgaggaacggaggcagtgctgctccacggcgagagcaatcttggacaacccagagtgccgggacccggcccagctgatcctcccgtgccagccgcgccagtcgagttgttttaaccgactcggacgctgagggcgacgctaaggtggctgtcgtgagtccagattcaggctgcctttccctgaacgggtaagaatctgcccaccagaagcctccactcccgcctcgactcgatcagaattcataatactactaataatacagcttcgatctccttctctcccctctctcgcactctctcgccttttttttatctgccttccttctctttcacgactacggagtactttcgtaccgtctccctctttgtttgtttagattgcactatttgcctcaattcccgttcaattcatcgtcttcgctcttttgtcctcgcctgactggctggactggcgcgacacgccgctgcttctttttctgcccagtgacaccaatcgctggactgctcctgtttgctttgacagtgaactcgactgattgcctcctccgactcccgacgactcttttctattcgtgcgactc

SEQ ID NO: 9712 - DNA, 211 bp, Emericella nidulans
ttgtgtaacgtgcatggtcacggtataggtaagaatggctgacgccgttgctggtgcctcaaagagctgtatacgttagagcgcgtttgtgtgcggataggagcgtggtggtcacgacgtaggggtggtaagatctttggggtaggggtcttcgccgacagtgttgatgaatctcacaggaggcttaagggatttgtgtcgcggtttatga

SEQ ID NO: 9713 - DNA, 211 bp, Emericella nidulans
gcagaatggttgctcggaggtggaaaggaggaaacgaagggtgatccagttgatgttcgtgcgtcctctgcaatgtttgatgcatgtataagtagtagcacgtcggtgaaacgccgtctaactcagtccagatcggataaatcttgtcgccgttctcgccgaagagtgtaggttgttagcagactggctcctgtggaggatggtcctaact

SEQ ID NO: 9714 - DNA, 999 bp, Emericella nidulans
  unsure (1)..(999): unsure at all n locations
gtctgtatatccatcccaagtgggagaattgaaaagcctttgatcccagctttcgatgaacatgtcgtaagaagagggccgtgcgccgcaaggtcgacttgaagatcatggtctgggtttgcgtgatgtttgcagcgctcaacattgaccgcaataacatctccaatgcggtctcagacaacatgctcgatgatctgggtctctcacatagtgattacaacacgggccaaactatttcccgggtgggctttctcgttgcggagcttccatcacagatcatctcgaagcgaattggccccgatatctggatacctatccagatctgcatcttcagcataatctcgggcctgcaattctttctcaatggacgggcatcgttccttgccactcgttacctcattgcaacatttcagggcgggttcatccctgacactattctctacctcagttatttctacactagcagcgcacttcccgtccggctggcctggtactggatgtcttctcaattaggtacgcttttttatctggtttgtggatctgggcgtattcttgctgacgccaccagtcgatattggcgtcggattcgcatctgttggtcttttggccatgcgcggtattctgggctacgccggctggcgatggttgttcctgatccagtaagttactgttgctctcaagtattgatgaaattattaacaaatcagcaggggggcttttacttgtaagcaaaatttgcgctggtatggcacactcgctaatttcaggtagtttctgtcggcgttgcctcgtttttcctcatgccccagtgcccagcgaagacgaagagcaaatggaatccaaagggctatttcactgagaaggaggagaagataattgtccactaagtaaagctggtcnggttatgacatgattgatgaagtgactgcatttgcctagtgatcgcgagaccccagaaggagcatgtcaacgcagggctctcgttggcaattggagggt

SEQ ID NO: 9715 - DNA, 2219 bp, Emericella nidulans
cacagttcaatgggccgcaacaatccttccacagcttgcttctccgtctaagaacctctctcaacgccgcgttgggttcacgattgaaaagggctcacctgcgcgtgagggtgctgtcattatcgacttgaacgatgagtctaagactcagattggcgttatcacttctgggttgccgagtccatcgcttggtggaacgaatattgctatggggtatataaagcagggattgcataagaaagggacggaggttggggtcgtagttagaaataaggtgaggaaagcgacggttgttgggatgccgtgggtggagagtaagttttaccgcaagccatcagcatgagtctttaccccttttctttcttctgttatcgttgtttgtcggaaaataggttcctgttatggcggtgttggctgtgctcttcaacagtaacggcgtgacttttatctcttagagacaattctctgtatatgcatatcttaggtagatatataatacaatcacggcccctgccgagatcattttcaattcacggtcaagaagtaacgtgtaaggttatgtcaagaacagcctacaattttaccattctctctccattgctgccgtaactctccagcttaccaattctcttgcttttctttgcttacttccagctgtccggggggaagggctacaagacaccgttgcccgcggattgatgcattcagaatgcctggatctcagtttcgtccgccttgacaatggcacaacagcacactacgttgcgccctatcttgttcctctctcccctctcgccgttgcagtggacagtggacctatctatatagactacgaagcggagtggttcaccttcagtgtgtcactggatagccggcggtctgtagttggggtagagcaaataatgacgctatctgcataatgctatgccttgctatcctccgtgcgctatggcgtctacgcgctatttgacagttcatgatctgtctacagggtctggaaggatgcgtcttgcaggcaggctattgcaatagaagactagacgtatcacaaacaccgctgagcatgcgcagtatcgggttaaggtcggtagtggtggtaaatgggttggtgtgagtccataattttttatccatgtaatggttggcgtcaagctctgattgtttcgtatttttcaacttgagatgatttgttgtagggtttttagttggccgtatcggtttgttatgcgcaggttgtagttctgattactgcactgtgttttttcccttataactcgtatgtagagcctataatactaatactgctcatgtaatgtttgactttcttacctctttttatatgatttagatttttttcgtgctttcttctttcttttgcattatagagttctgtaagtatttctttctaaccttttaaatattccggttccatagtttttgaatacttgtcttataacttttggggtgtctccatgttgttcaataattttccgattagacattatcatttggctctgggctgggggggaaacccttccattcagagatttcatagtttcaatttctattggtaaacccgtcagcccaaccttttttttagccgtaatttttagattggcgcttctagaatggattatcctggtcgctgttcttaaatacttatggacattgtttattggggtcttaaatcgaatttggtcacaccaatcttattctctgttgttggaggttactacgggtctttaatactctccctatttaaaaaagccctcttttaggtccctttcttaacaccttggaatctccaattataaattcttctcgaattacacatttcgggaaatcttgtttctttttacatttggtcgtcttccctctttcttaatattttctatatcatttatttatctctatgtgtggctacttcctctttctcatgtatattaatatacttattcatttactaatattacccactccgctccctctattgtctctgtcgtgtctatatagtatatatatattcatcaatgactataagttaaacagtggcgttttctctgttttcaatcattacgatgtgctctctagagcgtcttcccacttatcatatatattactttttatgtatgactacttctatctctcaatcactattaattcttctagtttattctatctctatatgttatgttctcttgttcactcttctattcttt

SEQ ID NO: 9716 - DNA, 2170 bp, Emericella nidulans
ctttatttgctcggtcactttgaccgttgcacccaaaggttcttttagagcggggaactcaatgttcttccgcggcaccttatctggttcataatgggcgtcagctggtgacaaaactggcgacgtttgtggcgtccctttgtccttgtgcgcttcgacatccgacgaatgctgtgaccctgcagtcgacgaagagctatcaccaggctgttccggcgcagcttgtgcctgtgattgcataaagttgaaccgagcaaagaaactctccttcgagatcttcttctttgtccgtgcatcatgagccagctgcatgttcctgctcattcgttgcgtttcgcgactcatctcctcaagagccttctttccggctcttcgagcagggcgcgcctgcgttgctttcttttgacgagaggtaccatcatctgtactctcgtcatcagaaaacatagctgcattgagcgcctctcgttccttcattctggcagccttcttctccgcttcagcccgctccttctcttcgcgctcctttcttttctgtgcgacaagttcaaggaaacggctattacgcttcggcgccacttcttcctccgcaccagaagcttcactgtgctcatgtccatcattcagtgatttcgctggagacgatataaacagtggagaaaaagagcgcgcatgagatcgcgagcgagactcatcctcaccgtgcatctgctgaactctccgtctcggtccagtcgtagggagatcatcgtcagaggaatcagtcgtatcatctgccgttccacaacgcgtatcttctgaatcatctttattcgctcgtagagttttcgaaactcgttcgtatgctgactcggtgggtaactgtttgttttccgtggtaatgttgagtagacgcgcagccatgcgccctctaggcataatgatgtcttcatcgtcatcgttttcttcgtctgggtccgtcggtggctggcccatcgtcgattttgtgtttcctccagggaaaccggcgtgattcttgtgtgtatctaggtccactgggttcccgctctctgactccgaatcactgtcaaatgctgcgagcatggctttgatttttcgtccaggagtgagcatctctggcgaaacggctgccgcagaggcagaccgtgccgtccgtggagttgagggcgacgacattaggataatcagatatgaaaggattagaaaaaagcaagaaataaactgattgaggctaaattggcattttatgaattcaatgagtacatgaattaggcagtgggtatgatgttggtgctgcaggctgtgtcctagagacaagatgagcggagaatacacgacgcgctctggaacggggaccgcgaccgcgtcgccagctatcggcgcagcgccgaaattccccacgcccgctcacgtactttgtcgccttagggcttaggcattaatatgtggttggacaatcccacacgaagcctacagatgttgtcctattcgttctcgaaagtatagccaaatttgaaatttttgtatagtatacagaccgttgctaactgatgataacgccagacaaaaaccatccctagagaagtacaggaaggatcaaaggtcaaaccgctgcgcctgatgctgcaccgtctcagtcacggttggtattcgaagtaagccataagtatgaggatagaaagcagaataaaagcatcttttaccgaatatattcaagttctaaatttcaatatcgatgtccagatccagggcggcaatgttctcgtcgtccatattccgatgacgaatctttccgccacctcccttggattgcttattttgtgaattggacggagtgctgctccgggcgggcgtgcttgggtttggtgtactcgaagcaggggttacgctggggcttccattctcagatttgggcgtcgactcgttggcatcgtagtgagtctttgctcgagtcttgacgcgcaagaaagggttcaaggacccttctccgcgcgctgcggcggcggcggctttccgactagcctttcgctcctctatctgcgcacgacggacgttctcataattaagtttttggttcagtaggttcaattgggccaggcgctcatgctcagtaagcttcttttcggtacggggtttggcgctggagcaagatttgcgagctcgacttgaa

SEQ ID NO: 9717 - DNA, 1950 bp, Emericella nidulans
  unsure (1)..(1950): unsure at all n locations
agcctagacgaacagcctcggtgtaatcctctgccacatagttctctatccacttccaatatcggttgccctctcgaagggtcttttcttccgcgtggagcctctgtgcaattgccccatatccaatcagacaaggagctagggcgacctgtagtgcaagccagtcttccgattggcctacgtcgagaatgtatctgctgtacgccgtgcaagctgataatggagcagttagtaattgagagtttattgtagggagatcttaggaaggatcatctacctgtcgtctctggaaccttctccatctcttctttggatagcccaaaagacgcgcagtaatcgatatgtagcgcggtttcttgttggatgtggagaacaattttggcagactatataaaccaggttcttagagttggcgaagcagaggactgacgtcttgataacttaccgcagctattgactccatgtcctttgccttataggacgcaagtgcgttgcttcgagcgaattggacctggtagataggttagatcgtaaacgatgagtggaacagtaacgttaacaagtgacgcatacgaggtacaagtagtcctgaactaggtattccttaaaacgttcaacgggaagtgtaccgctgcccagacctaagacgaattcatgctctgtgaatcgcttccaaaccgattgtacgtcgggccgatctagaacgtactctaggaaccgccctctgtggacaagttagcggacatgcaagcaactcagattagcgagcggggaagcatacggcgcgaagggcaagctgtacacggagtgaaaatggttaataggcccacttcctttcccgatgtcataactagtcttgattcccgcttcaacgaaacggacaccattacgcacggctctcttcaagtctttcccaagcgccagattcgccgctatggcagatgcaagagagcacccggtgccgtgggtatttttagaaactaggtactctgtttcgaattgagttacctcctctccggcgtatagaatatcaatcaccctcgaggcgtcgtctgatcctttggcggctgtgtagtctttcgtgagtggcaggtgcccgcctttcaacagaacagctcgagggcccagtgcagccactcgttttgcaagatctatgagcccttggaggtcctccggattggtaggctcttgaccagcatctttcagcagaagctgtgcttctgggatgtttggtgtaagaatagttgtcaaaggaagcaatttcgtacgcaaaccctgaactgcggcttcaggtaataactgggagccgctggtggagatcatcacctatttctactgagtcagtcattgtcagagtattcaaggaagtgcattaccggatctaagaccacagacggaatctgatacgacgtaagtgcatccgcaacaacgtcgatagtcgttgcggacgagagcattccttggagaaattagtacctattgacagaaaccgcgatggagctattgatagaagagagtattggcccataccaagcttgacaacgtccgccccgacatcatcgaggcccgctcggatttgtttctcacgaagtcggccgtaccacaagatgtcttgactccaggggttctgcgcgtcaaccgtagtgctgtagagcatacaccatgcagtaggactcttggtagctcagtcactaacccgaggacatacagcgactganggcatgagggactgggcataccccccgacataatcgcatacaggactgcgatgatgcaaacttttgcaggccctagtgactgcaagcttcctagtgcttacgcagcgggcaccatatctccggatcaaggtcttttcggtttatcctttaaaaaaaacattttttttttttagggtgaaaaaaatttttttctccccccacaaaaaaaatttattaattgnggttttatttt

SEQ ID NO: 9718 - DNA, 369 bp, Emericella nidulans
tggaggagtgcagagtgtagcgtattgtgtgtgtggcgatatgttttgtttgagggttaaggaataggtttaagggtggtatgatgaagtgattatggaatacaggttcttaggtctgtgtgtgagtttaggaacgggacagtaatgggatttgaggagggatgatacgggtgggtcgaagtgaaaagcaccagggtgttgagacgtcacgagtcccggttggagttagcttgaattagaggtggcggtgactgctggtttgaggtaggtgggtctagcaatgtactgtttttggaccggagacagttgaactctgagtattatgggtacgtatacgttggtagtaaccggactggtgagtgttgtatg

SEQ ID NO: 9719 - DNA, 872 bp, Emericella nidulans
accccagaaagaccgctcactggtataataaacagtataagatgacagaaaacgcaggatattatcaagctgctgggcgaagaaagacagaaaacggaaaaaatcccacagctgaaggtatgatgcttgagaaagtcatggccacgtccagcgcggaccacaagagtagaaggcaagatttgaggaacgtagaacagttcaccgagagaaacgcttgaaagccatggtagcagcgaacccagcagcgatgatggcaccgcccatggtaacagcctgcagtgcggcgttggccatctggcgcctgttgcgaccacggcagcgcttgaagaagtcggccatgtcgtttccacgggggaagggagtgtccggaacttcctcgccgaggaactcacacagcgggccccagccgtcgctgatcttgtactcgaggagcctctctgggggaacgaggctgcggacctctgcgacatggtcctcgtagacctgcttgcccttgttggggaagtcgccgcggaagaaggtgttgaagaacttgtttagcatagggtaatacatgctcgcagcccagctgaagttggaaacgaagcggtgctcggggtcggagacacgccagtagacggtcttcatgacggaggcatgccatgagtccacatcacgggtggtcagaatgacctttgcgttggggtaggcttcgatcagttccttggcgaaagcgcaggctggccagtcgcaaacagcctagagacatgttagtggtcttgggcatatggtatcggcggccaaggattagtattacctggcagtctcccagaagctgatcccactctttgcgaccgaattcacccacaccgtcgtatttggcattgagagca

SEQ ID NO: 9720 - DNA, 419 bp, Emericella nidulans
  unsure (1)..(419): unsure at all n locations
gtggagccagatacccctttcgatgacagtttgaaggataagcacgagtctatagtggacaaagaaggagggggtgttgaaagaggagcgctcgtggtgtctgcagataaggtagccgaagagtgacatgcgctaaaggaagatgtttgctgtgggagtgcagttgatgacgtctgtgagcgcgtcgcaanngggtcngtaggagaagaggcaggtgaagatgtggcgtggcctaggcgacaggtagcagaggaaaacagataggctatgggtgcacgtgagcttagtgngcttgaagctgaacgtgagactgntgacgacttnaatgagttgaaacaacacgagaaccctgaggtttaggagncacagaccgaggatatcgtgctgtctngctaaagcagtaagacagacgaagaaaa

SEQ ID NO: 9721 - DNA, 1914 bp, Emericella nidulans
gtagcccggttacagggaaccaacatggagcaggctcacaagctggtgcgtaaaaaaaaatgttatcggtcagtagtaagtgctaacgtttgtagatcaatgaatccggcctcaagatcttctctattgaggacctccagagcgctgcggagaagtccgttcagttctccaaggttgtcaagatggcccgcgaaatcgacgtgggcgttgaatttactctcggtatctaagctccgttcgaatccctttcaaccatccggtgcctcctttgttcgtttttttttttttctctttctctggtgaattaggtattcgctgaatcgattggaaagggatgcgcagaggagggatggtgtgtttgtaattgtcaagtgtgacgctaacagaatcccactgcccacagactagtcgtgtccagttataccaaacagtgggcggataggtgtatcgggggtggaataatctgaggaaaggttaggagaatctgtaatagagagctttccagttatttttgtacatccttcttttgtgggttggtttcctattgtcaatgctttttatgtcttagacttcaatccctccttaatctgcatatgaaatgtttagaacttcaacaagttgaatctgttcaactcccaccaactcctgtaactggtctagtctaattccaagtaggtagctataccaagctgctgtagggaactgttaccgtatgatccaacaaaattattgtaaatatctttatacagctcggagggggcgagatccgcaagcaaatatcatataccattcgtggggctttccgtcatctcggctgagtttcgcaactattattccagcaaacaaccttttggttgtcttcatgatttgacaaatgctttaataaccgcccatggattcgaatatccaggatattatctctcgcttcaaacagctgaacacggcctcggctcgacgtaccgtttaccaacagatcatagaccagctaaaccctcatgaatggagagacgtgcagaagcgtgtcaaccagcgaacctttcagaaggatatcctcggttcactacctatagaaatcgcagtgcagatcgttcaatacctcgatataaacgatgtacaccttctccaaagggtctcgcgaagatggcatgaggtactgtcttcagaaccagtctgcagcatcttgttccgccagtataccgggggttccctcgatagcgacttcaaatctaccttcgcccgctattcgaggcagcggtcccgtctagagcagggacgtccagttgcacatgtacaattggacataccctttagtcaagacctcgactattgtgacggcagatatgcctggtctgctgatggtggtaccacaatcgttgtctttgaaatgtgctcccgcaagacacagcgcttctgcacggagaatcgcgagcggtttgagaaattctgcttatctgaagatctagtggctgcaatcaccgttcgcgggtcagttgttctacaatcccgtttccagtttgcaatttacatgaagtaacaggtattgccacgcttgggacatccgtacggaatatacgcgctccatccgtcttcccaacacaaatttatctcactttgtcatcgacagcttcagagttgctgtatattatgagaactttcgcttagatggccaggaaggtggggttgtcatgcactttgaccttcggccaggaagcccaagaacccatcggattcaaccagttgaagagctagcactcttgagcttggataaatcctcaaaatttctgaccactatctgtctcaaacactatagcaaccggatccaggctatataccaataagcctcgcttcgcgtctgaatagagcttcatgaaaatgggaagctcatcgacgctctatacttgatctgcctctcag

SEQ ID NO: 9722 - DNA, 262 bp, Emericella nidulans
tcggcttcgtttggggtatgcgggtcgccttcaccataaagatcgatgctgagtatggcgaggtgtatcataacggggaggcaggagttatattttaagggttgagccgtctctacagttttgggaagttttggtacgtgacagtcggggctggcctaactgtgcataggattcgcactgaggtaatgtggaggggctcgagttgcagctggtaggtcggtatgctgagaaggtgaagtgagctatttgccaagacgtttgg

SEQ ID NO: 9723 - DNA, 1488 bp, Emericella nidulans
tgtttattccgatggttcacgccttccggaccatcatccttagccgacttctggagtctggcttcgattatatgtcgttgttggtctcgaacggacaaactcctttgtagctgttctcgcatgaccgggtcgtgggtctgaaagccgggggataggcaagcaagtcccacatcttgcatactaacatcacgagctgtcataggaccacctgcggggcgggctgatagcctttctgagcttggaaggctagtggaaagatccagttttcggggtcgaggacgggtactggtctgcagtccgggcgacgagggcggctccttcttcactaccacttttgggggttttccactctgtgaactactagaatgtcagatcctatctcattgttatcagtatttttgtgataagacttacgctggggaggtaactttctttccagcgggcgaacttttattagaggatccatctcgagaaccaagagctgcgcgtggtggtgtagagctgggttgactggagtttgctggtgccagccggcggggactggagtctctattcatgcggggagatggtagcggcgcggccggagcttgcgcaacagcggtagacattatacgggaccacaacacaaacgggcaagtcggaaagcgacaatggagccttgacaagagctatcaacagaacgattcgctatccggtcgacgatggccgcaataatccctttggtatcataaaccctctttgtgtgtaatataccagagagtccacctgcgactaacagcgatgtcacggtctagagcgggcgagcgtaagagcttcgcctgcggcagaagatgcgaagcgacgaggctgagagcagaaagcgcgcggtctgaagcgatcagcgatggaagcggctaacgaacgtctgtctctgcgggcagcggaggcaaaaggaactgaaagctaacgaagggaaggtcgagtagccgataacgacagtccagaacaaagacggcgagaatggaacaagcgtggcagggcgagagagccggcacggaatgggaagtgcccggcggaggcttgtcgaatagttgggtcgaaaggcggacaaggaaccttgggaatgggtcgatgcctgctgtgaagagggggagggcggttatcccaagttggccggcgcgaatgtgatgacaatgagaggtcaggaaataagaatgctaaatagcccggcccagaacgaacgcaaccggccgaaaggagccgggagtgaaaaaagaaatgagagaagagaaagaaaggctgtcggaacaataataataatagtagaaaatagcaagaagacgaaacggcagaacaacggctcgcgggggagcagagagtcgcttgaggaagaggaggaaaggagaaggagggagaagggtcgaggagaggagaggagaatcgatgaccggggattagggagggcgcagagtatcacagcagtagtgattaacagatgaaattaagatc

SEQ ID NO: 9724 - DNA, 376 bp, Emericella nidulans
  unsure (1)..(376): unsure at all n locations
tcgcaaacatcggggcatgacctgacctattgatggctctgttgtacactccgggactcgcggtgacaaccgaacactagtatacgtgtgagaagacattcttcagtagggggcatgngagngtagtttcaatgcccaaagggtcaacaagctctgaggcaacatttgcccggcgccgaacaaaacaaataaacagagaaatctgataaggacagcaccgcttcgacacgtactgccaaacctattacctggaacgctcagtgcgaacgacagcagcgtgaccaatcggtgacngtcgatcgaggcttgatagttgcgatcagacagctagtatcacacgcgtctgcggnttanaaagctcatgaacttgacaaaa

SEQ ID NO: 9725 - DNA, 2121 bp, Emericella nidulans
tcttgtgtctgggcgggctaaactgatgagcagccttactgatacagcctcagcactagtttcctcggtttcctttttgcctgcaacagggccagcaccagcactggtattctcaccgctaatgttcccagatttcatggcctcccactgcttcttcaactccttgtccgacggcaccttcacaccaaccggaacttcttcaacggtaaccttcatcctctcatccccatcctctaaaccgccaagcttcgcattgatcttcattagccaaatctgcagctcctgcgcaacccccttcattggccccgacgccttcgacgcattcataacatccttcaccttgtcagccgcatccccaccttctttcttgtctccaagcaccttctcctccaataacccgaatagaaacgccgcatccccatatctctccatctggtaaagggctatagccctcctcatctgtgcagagcagatgaggtcacgcttcgcacgctcacgtgcaaggattacggcaatttcagcatcgcgaagtgcattcttgacgttcgggccgccgtctgcgggctttaggcggaggtatgcgatcgaacgtttgatgtaataagctggggcgcggggaagttcgcaaagagctcgagtgtagtgctgaagtgcgctcacaaagtcagacttcgcgagagccgcgtcaccctgggatgcggcgttcatattatggattaaaaagctggttactattgaataagtttgggagtggggtctgattcgactgctcgagattgtgcagtagtcagcggaggaaaagcgtgtgaatggtcggagataatagactatgcggaattgaagaacaaaagaatgagaaatgggaggtagagaaagtcttgtcccgtggctccaagctctttgttgtatgttagaaattggaggcgattccataactttctccgaatctgcggggaagagcttatgtaacttttatcgtgaatgcaaatcaccggtcactcgaccacctcagagacgctatgcatatacaagtatccccaacaacctaagcacacgtatcttattactggcattatgttgtatatgacaagacattctaattcaataggctacagctgatgcacattatatctgttgcccgcaaccattttcctttgcataaatggacctgcattagcttagaactttatgatatgtattgattatattataaacatgtgaacgtatcgtattgtacacattcaatccgcaaattgtgcaattatggactctaatgcccaatcattattattatatgcaacagagcaaacttactgcagctcctcgttcccgaacttcctgctgtacaagccaagggcacgaatgggccaataaaacttgtagttgggataagaaatcatgctaatattctgtgagtttcagtcacgtttgaatgagttgcagacttaccaagactggttgaacactccctcaatggcctcttgtaaccactcgccgtttggttgttgtcgggacattatgagcttcatcgccttttgtagtggctctttatgggggtaacctgcctccatcagagcgaggcacgcccaagccgtctggcaaacttgggacttctcgtgttgtacgtagacgtgcttctcactgctgagatatgactctccccagcctccatcctccttttgctttgaaatcaggaactcacagccacggcgagcataattgctggtctcgtaagtctctccaatgcttgccagactctcgagggcgaacatggccgcataagtaaagcagataccccaagatccgtaccagcttccatctgctctctgcactcgcttgatatacttcacagctttatcttttgcggctttgatctcttcggcacgatagttagggtagaacttgctgaataatgagagcgcggtaactgatgcggtggtacattcggggtagtcatagccaatcatgataccgccaaaaacctccgcagcatttaaccattcgatctttggggagccgcgggtagtttcatactcggtgaagccacctgaaggattctgcatcaacaacaagcaatccacgctgtccttgaggcgttcttccgagatcatttttgggaaa

SEQ ID NO: 9726 - DNA, 124 bp, Emericella nidulans
aacattctcgaagcactgtcgaacggcagggattggaatgtcgcattgaactccacggactccacagcgggttcattgcagtcatcggacgacagggtgatcttttagtacgatgttcggacgt

SEQ ID NO: 9727 - DNA, 371 bp, Emericella nidulans
gggggggacggtgacccgagattaggaactgcaagagagggcaaagggcgcgcttggcgggataaggcgcattgatgcgtacggacggaaactgggatcggctcacagaaacgcccaacagacgtgccggaagcgtaatgtgtaatgtcggcggagcctaatgagtgtgctgacgaacattgatagatatgctctgactggccactccagagactgtaaaccggatacgccagctggatatacgaatcgctcaacgctcaccgagaggcacatagagaatcgtgcgctacgacgaagcctggctcagagactaccgatgctacaatagatggcttatgctggccatgtccgctgacgtacaggctggaata

SEQ ID NO: 9728 - DNA, 235 bp, Emericella nidulans
  unsure (1)..(235): unsure at all n locations
ttgtgttgttggtatagaggagtggtttctggatgccacggtatatgttgctgtacggcagaggaccacatggcactcagctgtaccgcagatcaggtgacgttaacgacggtgtttgcatgggcttgctggacnggaggaaagttgacggctcgnagttgaggcgcaaaaagtggccactcgattcggacgctaggggttcagttgtggttgtgtttacgggtgggctcaatgg

SEQ ID NO: 9729 - DNA, 816 bp, Emericella nidulans
cgcagaaagcaacgccacatcaaagatatcaaggtcgtaccaagtgcgacggactgctgcaacgaatccacgccggtggtggggtcgttctttgatcaggttcaatctcttggccttccgttggttcagcagcaatgaaagagcgagcggcagaaacgaagcgggcaatatgattgaccacatcccgtagccccagcgccacgagctattctcaagcactacatcggcaattgtgggccctatccaaactgtgaccaggaacggcagctctggaagtagggccaagagtgccctattcagaagactgctactgtcggcaatgaagacttgctgaaggatttgtaagcccgtggatccggcagcgtagaagatctgggcagatgcataggtctgaacgttcgtcgatgcggccatttgaatataaccgaggacatatatcaagatgctgacacagaatgcttcaaagcgaccaaagacatcggcgatcttggccatcggaggtttaattacagctgcaaggaacagtcaacctctgatcattaagacggtccatgataactcaccattgacgacgttttggacaacaagaactgttgatattaaggaatgtttactgaatgcactagtggcataagcagagagtgacatgattgtctggccctccaaagaagtacagaaggccataaggaaaatgcttgcggccaagttagatgcagttcattctgactagcctccgatgcttgttcacagtgtaatgtatagactcacctgatataagctatgaccagggatccctttagtgagggttattcgcca

SEQ ID NO: 9730 - DNA, 173 bp, Emericella nidulans
agagagtcaggcttaggtccgcaaatcacggcggttagaggcgagacgaggatgtacggctgcaaggtctgcatagtgagcttagaagctatcataaagcaaggtacacaggagctaggaaagcccgtggaagttgccagatgagccgcacatggccgttgaagcttgaaatt

SEQ ID NO: 9731 - DNA, 1740 bp, Emericella nidulans
  unsure (1)..(1740): unsure at all n locations
gcgcgccaaatgctacctgcttctccaacgaagacatctgttcaaatgttagcgtctcaacttcattagttgattaccactacgcactcttattggtttttctccactcatttggcttaggctggcctggaggaagtggcgagtatatatcgaaaggaagttggaagtctcgtcccgtctgcagcaacctctccccagcgaacattggaagcggcagatactttctctgatggttgggctgacttgtattgtggctctttctcctcttttcggtcctcttctggcttggccgtaaattggtatattcttgcccggaataaagtccatgagtcaaccatcgcttttctttaaatcgagtaataacctctggaggtgttggttcctcctgggaggcgtccgattctgatttcgctttgtctacaggtgcgctaacagagacacgttgcttctttgtcggcggctcggcgggaggttcctctctagcggtagttgaacgtcgaggtcgaagactggacctcctatctggttccttcgcattctccctcatgctggtcgagcgcttgcccagaacaccggtagcacggccagccaggtcggagactttacccagtaagctcagacgagacgaccgcctaacaggtgtttcgttatccgcactagctggtttggagtctttctcagagccgtaacctttgtctcgagccaatgcctgctccacgcgcttacgtagagtccggggcggcaaggcggcaggcacatcgtcagtatgcgatccatgcgacgactccgagatcggcgtattgggagctaaagggtgattatcaacatccatagcgtcctgtgtaagactcgtttcggcctgcaaggccgactccatgattgcaatactatggcggagatgggaggcgcgcggnttctttccccgcggtgccgttgccattgtcgggaggctcgtccatatcaacatgttctgaagtctcagcaaaatgtttgtgcccattatgttttatctaggccccgatatccatgttagttgttcctcttatcgaaccgcgtgttacaactgtagattgtcngcgtaccgttcggtttttccttaatccacgagtttttattattgtttggggattctgactaattgttcttatggttgagaaagtttttcgttgaattttaatgctcttcacgtgtcatggaggtctatggtgtggtctttatctagtctctgtattgcatgtccggtcttaatgaactcttccctacttatccgtttgactgtcccttactgtcctcattatagcttcttctcttcatcattctattatattcatcttttcataacaggcttttcttatatctattttaggtcttctgaataatcttcttctttcttctactcttttatttctatgttttatcccatttctcctttctaaatttattatactttctttccaatgtaatttatcttctatcatttattatccactttcttttttatctatatttttgctcttccattttcttactatacatacttctcctttcttagactattagtatactcatcgtattctctttatttaccatttgtatatctctttctttccatatatatctttctcaccctcctcacttttgtctattccaattttatcatctcttatcatcaatcttacttctctctcacttttttctaatacttccctcatgctactctctcatatatttatatacttt

SEQ ID NO: 9732 - DNA, 268 bp, Emericella nidulans
aagaaaacggcacggttctacggcagatgtcggtgaggctgtcgacggcattctgaagcatttcgcttaggggggccggaagcaacggcgatgaagtggtgtgaagcagctccgtaccgtcgtattgaggagattgttccagaaaatagactctgagtgggcatgaaggtgtgtccttaatgagtggttgaagaccacttgcgaagcagcttagaggagtttgagaaggaagaagacgaacgggaccaagatgaaggtgacaccgagg

SEQ ID NO: 9733 - DNA, 1881 bp, Emericella nidulans
aaccatgtcgagctacacagtttacacttagtaccggatctcgattagatgaagcagatactcacccagggcgcaatttctgcgacatagttcttcagatactcgatcctcatccggctggacagggggatctcgacggggctgcggtcctccgctgctcttgatgggtctgataatgatgatacggtctcgttaccgtcgtagacggcgacgtactcgtcctcaagtctagctctggtgctttcttcccggcttcaggactactcgcgcgtgttggtgctgccgaattggcaagcgtaaagagaatagcacgcagttcttcctgcgacgcaaggaatcccgggtcttgcgagaagccatcttgataccagctacccggcgaggagtggaaaacgtcgtgattagacgttgtgcttgattcgggaggtcttgtgtttgctgaaggcagggtcgcacactcttcagcaccagtcgtttcatctaggaactcggccgagtaagagtgagatcgagagtgagtctgagaaggctgatcaagtcgcggacgctttgagggcggttcgatgctgaacatggtcgggctatgcgcgagcatttgccaaatagcggatcacggtaaaaatgcagatgatcgtcaatcagcctgtgagtggcattaagggactcgtggcacgggacatgtgaaaagtcggggatcccccgctcccccggcccccgtcctgtggggccgccggctaaattccctaaaagggagagccgagaaagcttccacgagggttggggtgccccctcggaagaaggccgatactgctaattctgtggttcagattacattgttgccgttctggaggtttggtcctggatccagtccagtcaaatctcgttactgctttacgattcacaacaaggaggctaaacgaggcacgttgacatcatcgcagccccaaaccccggctcgctttgtttcttgacggtgagtggaggagagttggcctcgtgaattcccagtggacatctacgactggacagaccagaggaatggagataaaatggagctttgtggctgttgatcgtcacccctgcccgtgtttctctccacaataccccgggttctgtctccatctgcctccaggttctggtctggtgggtgcggggaagtctggggtcgagggagactgggggaaaggcgtggctcgagatgccgtattgagcgaaacatctggggaaggatcgggcgactagtagcagtcgcagtatagcctcgcatcgccatccactcttgtcccgaagaggagcatgctgtgccacccctactctgtacaagtacgacaatgcccgcccgctccgctccgtcctcttcgacagtctctgtatttcgcagttccgcgatagctcttttcatccacaatggtgcaagtcaacatgtttggcagggggcggtcgctccaagccgccatttggacggcctgcggcatggctttcatcctcttcggtatggcccttcacaccctatacggaagttgccgcccggtgctgatttcatgcaggctacgatcaaggcgtcttttcaggcatcgtcgagaatgagaacttcctggaccatatgagtcaccccaacgacagtctcatggggatcatcgtctcgatatataacctgggttgcttcaccggctgtgtggtgaatttcctcgtggccgataaactcggccgtcggcgtgctatgtggttcgctatgctgtgggttattgtatggcaaccgccgccagtatccagtactttgtctaactaacctggatccaagtcggagcgacactccaggcatcggcattcagtgtaccccatatgatggtcggtcgatttgtcaccggtattggtacaggc

SEQ ID NO: 9734 - DNA, 1105 bp, Emericella nidulans
gatgctgaaacccagttcactgctcgctgtggttccgtcagtgggacaccgatagcggcggacgaggcagcagtctcggtggcagtctcggtggcagtggtggtctcagcagggcgggtagcggtgctaagggttgtagggacctggaccttagcctcggtggtggtggtagaggtgggggcggcggtggtggcctcagtggtagatgtggaggtagaagcagcagcgggggaggtggagctgggggccgcagcagaagatgaggaagagccgctctgccgctgccgttaccacttccaccaacagtgaaatcaacgcacgactcgtaggtctggtcgatgctctcggcataccagtaccactggagaacacaggcgccggcctcagagcactggctgccaaggttatcagggatggtgatggagaagtttgtctcatcctccgtgacgccagtctcggtggaggcgtagacgtcccagctcttcagggcggatccaatgacggagttgctggcagtgtcgacgacggagacgttcgcgacaccagagtggggagcgacaatgtcgatcacgaagtcgacagtctcgccggcagtatacgactgaacgttgtccgtgttgtcgtcgaactggtagcccttgcacagccagatgtggcacgcatcggcgtcatagtcggattgcgaggcggcaacttgcagttcaccctgaacgttgccagcgcggtcggcggcttgattgttgtagacttgctggccacaggcagcggccatagcggagccgggcatacggggttgagggcttgagatgtagccgtgggcattggcgagggagacgaggccggcagcggcgagaacggtggtagcgtgcttcattttggcggagtgggagtgaaattctttcaaagattgaaggttttttcttatggctagctttgttgtagagagtgattggacggtatagaccagtataccgatttgggttgcaaaagagagagagatggtcacagacctgtatgaagagaatgtatggttggaaatgaaaggaacctgcgtgcgtgaagaagagaaaagcaaaagagtcttgcgaagacaatgctgcgtgtt

SEQ ID NO: 9735 - DNA, 1110 bp, Emericella nidulans
cgtagtgatggcgagaagggtcggctgtcgagaagagaattgaatccatgaaaggatatgaaaagagggaagctcatctgtcaaacagcgcgatcattttcatttggtgttgccctaatatcgatttgtcagaatctatttgggcgtaataaggcagtctgcagtacctggtaaaagtctccgttgttccgctccccgacttacttgcataaaccatccggccctatagcttatccaggtcgatcgcctcatcgagtttgactcgttgattaatactgatcttcaagctaccaccatactaccaaaagcgcgttgagtatctttaaagattggtggagcaagaaagaaggctttgagttgtgataagaaacgcttagaaatggcggaattccaagtatttgccgcgcggcagatgttcataatgaggcttgctgatcacttcaagattcattatcgggtcatcagtttcaatcagaacattgcactgtcagtcactgcctgtctaaggcaaagttaaggatctcgattgaatggatggtatccaaggatacgtgcggagctgctcctaagccaagccaagtcaagggagtggccaatattcttctctaagatgaatcaacacccggccgataaccgtttggaaataactggatctcagtgtctattaaactccatgatgaggatacgagttaacttgcaaggaaacatatcagccagcgaacaatttgccggaatcccacgcttatcagtggtttaaagcgaagaggtgatctaagcagcaaacggcgacactaccagggatatataattttgacaaagctagtttttccatggccttggcaagcattaactataaaagcacttagtggtccaacgtgaacaccggacctcatttctctaaccggcacggcaaaataggtcactgccactaaatatattaattccaaggctttgagcctccctaaatgcataggtccgtgttaaggaatggtgtaaagaagcttagctaagctcactctggaggattaaattaagcagtgttgaaaatcaaacggcccgcaaatgccgacaatcgctggatcttttcccctgtagagcacatgagcgtca

SEQ ID NO: 9736 - DNA, 256 bp, Emericella nidulans
caactgcaccttctacagcgccactatcttctccaactactccccttacaagcagcccgacgcctacaagaagcttcgcaccctgcagcttgcggacggctccaagaccaagaacactgagctgcaggcaggtcccgactggtacatcatgtcggaaggatccgagtcctcgatgaagcccgtcaacatttacacccttcgtgacgagtcgaaccacggtctcgtaaacaccgagatgctcaagcccggcgatgag

SEQ ID NO: 9737 - DNA, 343 bp, Emericella nidulans
  unsure (1)..(343): unsure at all n locations
ataatgaggagacttatgatatactaggccacccgggcgatggtatccaatggttttggaactccggattgcccgctgtgactgcggtccgtagagttggaacacagcgtggaccggtgcatagggtatagtaatcatactcacaccagggctgccttcgctttaaagtctcaagtgagctttaaaatgtttgggcttttcgcgtctcctctagctgcggttcgctacagaacccaggcttcgagngaacctgcgactggtggatatgntgacgcgatatcaggttgaacttcgtacactggaaagagctaaaggctctggttgcacggcgacgggcagaaca

SEQ ID NO: 9738 - DNA, 1442 bp, Emericella nidulans
catcactgtagtcaaaggtgaatagtccaatgcgagaacagactctgggtttatggcatagagttgtcttcttctttcaggttaagatggttaaagagttaatctaggatccagcacctagaattgagtcggcctaaagagcaatagagccagttacgagatataccaacagttcatgccagcttacaggtttctgcgaaggtattggttgttgcgcctcggcgcccaagtatgcttctagattattattcatgtgggaaatattcacaaaagaaaagaggaccgagtagtgcccgcgctgaaataccatattccaaaacgccgcactccagaccagtagtacgcctgaacaaaaccgagatacccagcagcaagaagaaaataattcacttcgattcactatcatcatggctgtgcttccttcgctttcctctcggtggtgcatccaactccgtcgtcttatatgtgatcgtgtgcgtgatgacatgtcgcacactcatcttgtggttggagcttcgagggttggcgctccggggagcatccaggtagcgtagcctccaatcaattggagaataaggagtgcgatcaagtgtagcacttcgaggtcccgcactgcgaggtccagcgcttcgaggcggctccgccgacgtgggcgagtacctaagcgccggcgggatgcgcagccggcgcaggttactcaactctcgtcgagaatgagagggcacaagaggagtcagcggaggtaatgttgttgccgatcgtgctggctcgttgaaattgaagctgccgctgactgcactggaaggttgtgactgtgcagaatggacattatgacggtcaaacttgtactttgaaaagtccacgccctcagcgctcgttgggctggagaagataggagtgaagactttcaggaactcagtataagcggcaggaggcgtaatcggagtggaggagctgtcctcattcttccctgagccagcgctcgagtctgtatggagctcggaggggaaggtgatattgctgggcgttctgaggggaggcaggactggtttgatagaaggcatcttcaagagtggatcgtggaaagaaaagagttgttaacgaaggtagactgtccgggatggttgagactggcagtgcgcccagttgtgttgggagatgtggtatactgggcgtggaagtatgcgaacgcgggtatagatgtataaaccacacaacgagagccaagggccagaagggaaaggataagttgaccaagggaacgcagagatgcaagtacagtatgagtaggttgtttctctgttgagcctcccactgaccgaagaaaagagggaagagaggtcgcgaaggaggaggagagaaggaaagccgatttatttatctggagttgagttggtgcagatggtgacttcactgccgtattgagaccgtcacgccgtctg

SEQ ID NO: 9739 - DNA, 1596 bp, Emericella nidulans
tactggcaaaacccagggacacttcgcataaaggcttcagctttcccgccacttattcagacccatttgacgtctggtgaatctagatagtcttgcgcgtcaaagtaaatgagcgccagattttgtatctgcagcccgcaggccaccgctgcgctggctatgcagttccccgacagtaccagtgggaagctcttgcttgctatagcatcgctaacggccctagagatccgcctcatcacctcaaagctgcttccggtatcgccctcgtagtcttccacctgctctaacaacaaattgactgcaacacccaagtgctggagctctcgctcgattccggcggacctaatgcgatgcagaccattgccggcacgatattcccgtaggccggcgtgctatggcgaaagattgtgggggttacgcagcccatagacgacggtggaggcacgctcaagctttcagcattcaacagccagctaattgatcgagtggttgtccattgacgatgtcggacaactggagtagcagtggcagagtgcgttcccatcgagatgtgagcctgatagatgagatttgtgcgtacattctccctgccccaatccgtgtaggttcttgatacaccgactgattcaagagatggtcaagacgaacccgaacatgaatacgaacccgaacctccagcttgaacccattccctgaacttcgatagatctctgaaccaatgtgacaaccgattctgtatcggcctggtcagccgagcacacgtgggatcgcgatgatgcatgctcagtcaccgaccttcttctggacatccatctctgccagagtctcactttcgaactcgaatattgactcccaccctgtcatagttatatgtttggttattcctgatctcccgattcattacggcttgtcttaccaaacgatgagataccctttgcggacactatctgaccctgagacgtctccaagtcagcatacgccatcgtgaaaattacagcaacacagatgtcaagcgcagcataccaagagccttccttgcaatagtactggctcagatccagggccagcggagtagccgagcatacacactgcttcggcggctttattctcgtacggttctagcagacggcacagaccgagattgccggttgcacccacgaaagccttcctgtttcagtggcctccatgattagtgagagctggggattgctctgtactggtttttaatgatttctagctgtttccagcggatttgagcagcgttaggggacgaacacatatggcccttgcagtctattcagggcatgcatctccagagccgagtcttccacgaggacgggcccgccgatctgttcacacaagtgttaagtgtcactgcaattactcttgaaaggagaaatcctgtagcagagcgtacaatctcagcagcggtacggcatttgtctcgcacgatctcttctgaagtaccctggatttcgcgcatctctagagccaccggtctgatacacacactatcgcccaggacggatttcactccaagactttgtgaggattccagtaatgaagacgatctcaggcatatttgatatatagtga

SEQ ID NO: 9740 - DNA, 1096 bp, Emericella nidulans
ggtagaggacccgcaaagggctacatcgaagcccttgagcgccgtctccaagagaccgaagcctccttctggggatcctgcagcaggtttccgactctcagctagcagaaagtatcccagtcccacatcatgatcccccggggcagctccggtccgcaaaaaggggcagcgagtactggaagctgttcccactaagatctgtgcaggagatccgcgcctggcaggaagattgtcagcgatctgtgcccgaacgggcttctacttctacgtctacgcctcagcttgcccaaggtgatttgtctactccaacagttggagacgaaccgggcattgaacgagccagtttgcagatacagcaggagagcccgggaccacagccgagcttgagtacgtggcgtggagccccttcggtcaatttccagcagcagtttctttggtagtagtcaggcgaccctgtttctgtgctttgttccctctccccgcatcgtcggtaccagcggtacaccgtactccccgggtctggggctttccccggcctccacagccccgcaatcccgtataaggggttggtcgcggtgacaacgttaatgacgaatactccccgcgtttaagctacaagttcacgtccactgtcagaagagaagacaagtcttacaactatggctctcaagaaggttggtctcccgtttcttccaaggaccttctaacaatgcgtagatcatcgtcgtcggcgcaggcccttcaggcctgctccttggccttttactctccaaacaaggcgtacatgtagagctcctggatgcagaagcgaaagtcagtgaccagccacgtgcagcgcattatgcctcgccggccgcctacgagctcgaccgcgcgggagtcctggaagacgtaaaatcccgcggcttcgccctcaaaaacatggcctggcgcaaacccgacgcaactttcgtggcaggcaccacgactgaacatcttcctgcagattatccacaccgcatggtggtgctaccgctagaccagctcggtgaacttctagtagagcacactcagcgccagccgacggctgatctcaaatggtctcaccgtgtggtaa

SEQ ID NO: 9741 - DNA, 570 bp, Emericella nidulans
gatctagtggagataggcggcccctaccacacaccatttcataaaaaaaaatatcatatcaaccctacaatacaccattataacatatctaaaatactttactctccatcttttattaaaatataatatcttcattacttaacactttttaaaatcttcattactccttattaatacctactattattactaatatcctacataatctctttatctacctaattaacacctctatctctcattactcctcacttcataactcttatccttaacactactctctcactctctatcataattctctaaatatcacacctaataatactatcatcctaatcacatctttctaacacttacctaattcctatcctatctcacaatcaacctatacaactctctcatctccctttaatccactttatcatcacatctattaaattatctaactactcataaatataactatacatctacctatataacataatataatatcaaatcaaccatccatctaacatattattattaatcataaaaacacatatcatctaatcttcttatcaatccatt

SEQ ID NO: 9742 - DNA, 1237 bp, Emericella nidulans
gcaatccacgagaagcgacgatagaccagatcaccgacctctccacaagccaatctccctggtgcacggcagcctggaaacgcccggcacaagtatcctctcctactacgaaacatacttccaggcccagatgccttcgggtaaaggctgcttggtaccaggtaatcaggatggaacccgtcttccagacaatataccaaagtccagaggatggctgctcgatcctgccgaggctgaaattggtgggagttcaaaacaaccaatgcagagacataccgcgacgccgcgtcaggaggccaactgcaagcttactcgtggccgcgcacaagctcaaagattgaccttgatgtaagattcacggtcgtccactatcagcccgaagccgaggcggacagtcgaagcaccctgatctggtcggtgcatcacgcgctgatcgatggctggtctgcagcacttgttttgaagaaggtgatccaggccgctggagggaaaactgtccagcctgggccgcctttctccaatgttgctgcggcattagatcagtggagatgcactcacagagcggagcaagatgccttctgggccgagcagcaacccaaattgtccgaagggaaggaagagtttctattcccggttgcagggacgggcgacgacggagaatgccagcaagaagaaaacctcgtcaccctgggccactattacacatctctcaaaggcgcagccggagcgtgcggcgtaaccttaaccgcattctctacgctgcgtgggcgctgtgtctggggctgtacgcaaacaccgataatgttattatcggcaccgtggtgtctggccgcaatatacctttaccaggcatcttggacgcattagccgatcgtcagcacacttccattccaagtcaatcttgtctgggatatgaatgttcggacttcgtccgcggcgtcttcaaccgcatgcagcgtctcgctcaatgctcatggaccacgccggaaaatggcttcccgagagtacggggacagctacttgcaattcagccagacgctcgatggccagctgatcagaatgaattcgtcgttggcatatctttcgcaaggcaaagcacgaatgttctgcttagtatggtcgtcacagacattggcaacatcctgctgcaatattctcgcaagcggtatagacactgtgatttagagggtgtggggaggacgctcaaacaggtgctaatatatctctgccaaccgga

SEQ ID NO: 9743 - DNA, 808 bp, Emericella nidulans
agctgagtaaggggactaaagaaacagcgaggctgggcgatctggctcaggttgtccctaagggaggacgaatggtggcggttttggtttccgaagaaagtgtatgttgaaaattgctccttgtcgcgaaaattggatttgccaactctttcgactaaaatggtattgcagtacatgaagcccatatcttcggccatcctggcctcaaacctgtccttgacgccacaacaagaccctcacaatgcccttcaactcaatatccccataccacctccgactaaagaatctagagatcagacggtccttgctgcgaaggcagccatggagagagccgctagcaatgtccgcgaaacacgcggtattgtccacaaacgccttcaagaaatgattaagaagaagattgctagaccagacgacgctcggaaggcacaggacaagatggagaagttgacagagaagggacagaaggaagtgaaggacttattcgaggtcgctaaaaaggctatggaacgaacctgaattttagaggtcgcatctcggccagcgcatattaccaagtaacgataggttgactcaaaatatagaaaagtgactgtcatcttatactacagattcttggtaatgcgtatgaaaggaggactatgatatagaacggccctaaggaatcgctttcaaggacgcttgacggcgcggttcggaaccaggagcgtctctagcttggccatgaattgggccttctttccaggagcctggtaactctcgttgttccttatattgcggagaatctcgccgacaacaggtggcttct

SEQ ID NO: 9744 - DNA, 486 bp, Emericella nidulans
ggtgtgtacagacgccacaacttagctcactgtagggagggttaatggcgcgcttggtgtaattatgagagtcgatgtcacctgagctacaggtgaatgactgcacaagggaacacatcataccagacgtatgactactgtgtgtagagtgatgggcgtaatgagcgagctcactgacattcagtgcgttgagctgactggcaaggatgcagttggttaacctgactcgccagttgcatgaatgaagaaagacacgcgcggggagaggtcagattgggtattgagcgctcttatgcttgctcactgatgtgtagatgacttggacgctacgctgcggtgagcaggattagcatattcaaacgccgcgatagaggtaatcaacaacatcatgggcgttgcttaagaaggaacatgttatcaaaaggatggtaaaagttttcgaaccgtaaaaaggactgttggtcacgtttttaaatagctccgagc

SEQ ID NO: 9745 - DNA, 1251 bp, Emericella nidulans
ctctcttgccgcgtagtgcgtcgcttgtcccattgcaagcccttctcacctcgtcaccagaaagtctgacaacacacgatgagcgcccgagatttcgtggagggggaggccatgctggacgaggaggagaatgaggaagagcttgttgacgactacggtgacggcgaggaacgcctcgagaccggtggcaatcactacgattctagcgaggaagatgaagatgaagacgatgatgaagatgcagtccgcgctgtaagttacgatattacaatctgatgtgcgccagcagctgttgctgtagttacttactttttgtgaaccccaggtccgagaagggttcatcgtcgacgaagacgaagaagaagaggagcgcgccgaacgccggcgagagagaaggaagcgaagacgcgaagaacgagaacgcgaggatgaacatcttgacgaggaagacttggaactgattggcgagctgaatccagggctccagtatgcggctgcagcagacgtatggttccctcgatccactgtcggtaggaagaaatactaacaggccgcagtcaaaattcaagcgcctaaaacgcggtcacaaggatcgagattcgcggcaaccatctcaggctattaatgactttttcaattctgacgaggaagatgagcctgcaccagactacggcaggcaccgaaggcaccccggcgacgagatggatgatttcatcgaagaagatgtattctcggatgatgaattacaaagggaacgggaagatctggaggtagcccgtcctagaaagacgatcggctttggagccacagacaccactggcctcgacgagaatgcgcttgaagacatgcgcgccgcttttggagatggaaacgaatacgattttgctcttgctatggaggaggaagaggagcagcaggaggaagacgtggaaaagcacttggatctgaaggacgtctttgagccgtcgcagctcgccgagaagatgttgaccgaagaggacaaccaaatacgtcttatagacgagcctgaacggcatcaaatcgcccgcaagccctaccgcaatgttgtcttgagcgaagatcaattccgtgaagaagccgcttggattgcgaacctcatgcttctaaagaaacggcttgagccagagctgcgtgaacctttccagcggtcagtggccaaggttctagagttcctcgtcactgatgactgggaggtgccgttcatcttccagcaccgaaaggactacatga

SEQ ID NO: 9746 - DNA, 154 bp, Emericella nidulans
aaatgtagagtacggccctgggtaattcatttggcgtctgagacgcgtactgcgccctcatgagagcgatacgtcggctagctaggagcccgatcgcctgaacataccatggttccgagtgtgttcctggagtgggtctggagtgtacatccct

SEQ ID NO: 9747 - DNA, 2272 bp, Emericella nidulans
taaggaatttaaaattttggttggttttttccaaaaaggggaaaaattgtggccagacgtatgtttaattccaagggggcggcatttcaaacagtttaaagaaaacaccggtcaattaattgatcggtcaaaaggtccaaaggggtggccgaaggtaaagactcaccgaccttttaaaaacgcggcctaagtacagccaatcacagggcgcctgtgcttagtaaaacaagaagaaagtggcgagaatttaaaaagggacaagcctggatccccaaatctatgacatcaacttgtcacagctaaaatgggttcaactggcatcgaaccagaactcaacaatccagtgacctccaaaagaagtggatggcatatcaattcccgtctgtgcatgggtgaccgttaactgtgtcaggggtctgtaagaaaaggaggtcccaccgaaatgggatcaaattatcagccggggaacctgggacaggaccccccgtaagctagtatggagagcctaatcatctcgaggaccagtggaggatgccacaagatggggtagcgcgggttgtctgccgctagggtctgaaaatgtgaggtcttggatacaacgccggggaaaaaggcaaaagttcaatatcggttttgttcgcggggaagcagcgcgactcgctcgagatctaccggcgagaggtgattggtgtatatttttcggatttagcctgccttgaactgaacttggcagtattggcctcgaatgcagacttcagtcgtaccccagaaagacccaaccccggattggaaggagaatcaagatccaatacctttcaccacgatctgtggggattcccgtctgagtggcaagagcgcaagcgctagaataccaatgccaaaactctccatacgaacgacaataagccaatgcccagggcactgctgaatttcattccaccactaagcggcaattccagtgacacgcaatccggagtaggacttgttcaatgaggcgtaaagaggtcatggtggccgccaagggctgccagccaaatggccaagtacgccacgagaggtagcgccggcggagtagcaaaaatccgtgcacggttccaaagcttttagatgttcaattgccgccctcacagcgatgtcagaagagcaggtatttgcggcgataggggtggcggccacgactgagctcaggcaaggtaggcgattggcgttaagcagagatgggtgcctcgattgtcgctagcgcagtttttgaagacctgaggatatgcaaacggcttatcttagacatttattcgcagcagttcgttggttaaactcacctagatagacacggacttttgtcaaggctacctttggaaagggtaggcgatttaacaagtgcattgagtggccattagcagatattgatactttttttgatcgaggatgatagagatgtttgtgttctcaagagggaggtgaaataagggaaacgaggatcagagtaggaagagaagagcggttgaacgaagacaggtcccaacatcttctattcactctgccggcctgtactttgtctccatccaccccatcacagattctaatttagttgatgaaggatgaacaaggttacatgcccagtcattttcccagctaatttgtgtctcctagacttccaaacgggtccatcttcagctttccagcctccagcttcgtcttcctaccagacagcggctaaaagtatgccatctgccgagtatatataatgggggagatcatatgtcacttaagcctgaaagatgctaccctaggcgtcgactttttattccaagaatatgaaagggtgatgctatctgctgcctactggggaatattgaagccaaaattgactgaactacggtcgataggtgtatttgattttcggcaaaaatacctggctcctgagttgggtgaaatttgatgaaaattggaaagaccgctaagaacataccatgatgattatatttagggaaacaggacttctttaaatcttgacttggttgatatatcttttaaaaatatagaagtctacccccaatttatgttagttcatccttaaaggaaaagacagataagcttccacaactttttaggagtgaaaatgattacttttgaccctcaggtccattaagttggagctacctattaactgttgattttggcccctcttgtcctaaccctattggattttcattatcattttggttccttttccccccaaaaaaccgaaaaaactcctttttttcctctggat

SEQ ID NO: 9748 - DNA, 427 bp, Emericella nidulans
  unsure (1)..(427): unsure at all n locations
cagacattcgacggtcgactactctaggcgttgatataactcaggacttcaatactgcactacttgtcgtcaactttagcggtgagggtgagagggtgatggctgttagtgtggccagagttctcacttctcaggcacaattgaggacacagctctagtatatacagtgtgaagggtgggtcaagtggacgacgttggcagatgacctcgttgtctcgacttcaatagctcggatgtgnggggtggtgcgttgggagagtagcttggttgttgggacattgcgtaggtacgctgaaaggtgaagacttttgtgtttcagtgacggtttgtctgcgtggtagttaggagtaaatgggatcacaagaggagactcngtgacagtctagagtgagtgtgatgtggggaaactgtcagtttcatataggga

SEQ ID NO: 9749 - DNA, 392 bp, Emericella nidulans
aggtcgagtggtcttgaacagtaagaagcgatcctcaatggacgcacagacagatagtgaggcagaggatactacggaggctaagcggcagaagaaatcgaagccccctatcacgatgcatctacttattaccggttaccaacggtgggtgggaaatatgaagaaagaagatgcagagaaggtttattattctcacatttcagacatatacatttagctaaccacttttagcgccaacttcgagagcttggtatcatggtcgttcaggatgcgcgcaaatgctctcatctcgctgcaccctctgtcctgcgcacccctaaattcgttaatgcaattgcgtatagcccgtgattgttcaggtcgagtttataacacagtgtctgaagaagaac

SEQ ID NO: 9750 - DNA, 998 bp, Emericella nidulans
ataaccctactaaagggatcctccgcggatctcgcttcatacctgacatgcgtgacccccttgtttccaaactgtctggcaagcgaatacagatggaagccgttgatataaatttccagcatcgagttcctcacatccacccggatctgcaggccactcagtaagaccaacagccaggcagggaacggaatcatttctttgttctcccaactctccccggctgccttggtctggatttgaatagaagacagacgccgaatgatgttaatgctcagcaaggcgtcgaagttgtccgtatccagctcgccctggctttcgtcgaaatgcatgaagataattcgattcatgtctcgccgggagggaatgctcaggttgaaagcggatgttgtgacggtgattgattgaccggtagaagcttctttgccgagcttgtatgtttgttcgagggataaaccggggctgcaaatagcactgttaatcataggaaagaagagtgggaatgccgacctacgtttctggttgcggtggagtgcctggttctttagagggttccggctcaggttcagcttccggttcaggctctggctctggctctggctctggctctggctctggctctggctctggctctggctctggctctggctctggctctggctctggctctggttgaggctcgactggccgtggaggctctggctggccgacatccggcagtacctcaggctcagtctctgtcttggatggattggcgggatctttgctgtgcgacatctcagccatggagacaagaacctgcagattcagcgccgtccattgttcttcaggaactggtcgaccagcctgtcttcatcagtatgtatattcccaggcgccacaattactgaccatggtaacccgccagtagagccgctttagtatagccacaacatcgtccttcttgagcgacgataatcgtccctccaggctcggtctatcaggatagggtatgggcgtct

SEQ ID NO: 9751 - DNA, 577 bp, Emericella nidulans
gattcgttcttccccaactagctacagctctggaatctgcagcgttagatgaaagtagtatggtacgatataatcactcgaaacttctgcaaggaatttgaggggcagccaatggccactcagcgcaactatacatatcttcggatacacctaagaaagatatgcttgttttcagtattcatctaccactctacctccccttcagcttctccataaccggcccttcttcagccacattcggcactattttcgctaccccatccagcaaccctccctcacgttgattaatctcacagtacctcccttcccaactatatatcagctccccactgcgcctactatcattacacagcataacaacactcttcgccacatcctcaggcttctggacatgcacaccgagacccctaagaataccgctggaaacaatccccgtcgctgtccatgagggcgcaatggcgttcaatctaacccgtcttgggctctttccatcatggccggagttaggctgctcttgctgtaagtcgctgaataaaccgcgcagaataccaagaacaccgtgcttcgcaactgtgta

SEQ ID NO: 9752 - DNA, 586 bp, Emericella nidulans
gggaatcgaagctcaagcgactcgcgtcggctggatatcccacagatatctgcgcacgaacacttgatagcaagcagggtgatgagcttgctgcggctgaagcacttcagcgcactcttgtacacggggcctcatctagcaactctgtgctgtcggagagcgaggatggctgggctgaagaacaagagacactggaagccatctttggagaacgatactcatccaaatcacccgaggtctgcgagattgagtgtgagttaccgggtgcaaaggcaatactacttcgattccagagaccgtcggcgcattatccgtcttccgtcccaataatatctattcagacagagaaaatacctgcttacatccgactaagtgccatccgccaggttgtgaagttcgcagaggagaatttcttgggagaacaaatgatttacaatataatagattggctggaaactcatttaccgaagatcattgaagatccagggaagttacgcgatatatcagcactatcagcacctcccgttgcttcttcggaatcaacttttgaacttccttcccgccaacggaataggaatgtgaagaa

SEQ ID NO: 9753 - DNA, 493 bp, Emericella nidulans
gtatagttggtgtaaaaagggcgcgctctgttgcccgtcgcatacaagaggcaagtaataacacacacatgtatgatggagctactggaggggcatgaacagactatttttattgtaccaggcatcaaaggaggaagagaacgcttgcgtaaaggtgctggaaggtggttactaaccaatctgatcgttcctgacatgaaacgtgcgcatcttgacatcgggtctggtacgtgaagcaagtcggacagatcattcttttaccgttcatgtgtcatggagtcattggtagcatgatctctgggccggcacatttttgtccgatatataatctggttcttgtttatgcccttgtttttatgtttatatattttacactctttctattcatcctataattaattttttctatttattttatgtacatagttttttatatctattatctttactttttttaatttatatttatttatgtattttattatttatcttt

SEQ ID NO: 9754 - DNA, 454 bp, Emericella nidulans
gtcatctgagcaatgcacggcaacgcagactaaggtggcttttatatatgagtcaggatgtgtacctgtcggatttacgcaaactcatgcattggcagtctgaaggtgacgccatagcgactacttcagagcatgctataggtgcagtgtggcagcgggggccataagctagtcgagaatagcggacctatacctgcacgcgtggaaatgtcgctttgtgatggcgggagaacctattgatcgcatttatgtgcatgacagcgctactgcggtggtgacgataccagtctgtacccactcacaggcgcatattagcatgcaacttgaatgtctgcttttgcacggctggaacggagtagagatgtagcccacaatgacgacttggaaacctgccgcaaagcaaaatctgctagcgatatgagctaacgttggttcaaaccgaattcccctgggg

SEQ ID NO: 9755 - DNA, 404 bp, Emericella nidulans
actagaaccagcaattattcgaggtaaaagcttatgctcaaccaaagtcctaaccacaccaacatgaaacgcaccaagagaagctccaccactcataagcaaagccgattctaccaaaggcatgccgtgtttcatgcataaaagagagcttctcttctaaagaaagctccactgaatcagagttacaaaccattctcaactgagtagacacctcatcaatgtactctttgatatgtctagtaacctgaagtctacctttatgaagctccgaattacacatattaccgagattcctcaccatatcagctctcatacacaacataatgtctctaagtgagccattcttggcgacgatgacgaagcatcctgaagcttgttcttaaccaactcttcatcataaagat

SEQ ID NO: 9756 - DNA, 413 bp, Emericella nidulans
cgccagtgcttttctcacttaaattagttgtgtttggttgtggtcctattgcggctgcttagtagctatctgtcataagatgaagtgtgacgatagatgagatgagatctggaccgtcgaattttggatggacagtggagatggcacgtctcatgctgaagctaaaaatctatgagaagataagatattttactaacagccaatggaagatgcaactcttgttccaaacacaaatcttcgaaaaaaatcttttacgtatttaacgtgttcaagaggtgtaagaaactaaatcaggaacgatacaattcctaccaaagagagaacacagaatgatcatacaaacgcgtccgtcaaaacaagtttcaagaaaggacttatttggagcagataactgaagtcgttgactgtgacct

SEQ ID NO: 9757 - DNA, 582 bp, Emericella nidulans
atcacaagacaggcctttgtgatggacaatctgcggaaggagccaaccctggggatatcaagcggtcctgtccaaaggcctacgtgctcgcttccattttgaccggggtgtctcagcttatagcgcttattgcagctccagccttcggttacttatcggaaaagcctcgacggtatcatttaccgcttatcgtggcctgccttgctggagtcgtgggctatctgttgctcgcgctcgcgcccagtcccgaattcaaaggcgaaagagggaaccctggaatatttgtagtgatggctttagttgggattagccaaattggtgccattgtgtgtagtttgtcggtgctgagcaacggtatcttgagcttgaccaattcagtcgaggcagcagagactgtagcaggcaacagccgggccccgaccactggtccccaattcgacgaacaacagcccttgctggctgctgaccgaaaacagccgcagccctcggacttgaagggctcaatcgcaggaatatattctctatttggaggggcggggatcttgttgctcaccaagcttggagggatactgttcgatgttt

SEQ ID NO: 9758 - DNA, 110 bp, Emericella nidulans
  unsure (1)..(110): unsure at all n locations
gttttgtgatcgnatctcttgtcatacctcggtcctgtgtttaggttgtctcgtttgcctcttctatgcacccggcgcacccgctggaccatgtgtatccgctgttgtgt

SEQ ID NO: 9759 - DNA, 1410 bp, Emericella nidulans
ggacagtttggtgctccggctgcgcttcgttgctgtgagggcctttgatattcttcaaaacgccagttgtttcgaggacaattgagagtacgatcatcgacgcgtaggcgaaacacagaagagaacgatgaacttaacccagcgaaacacggcactccctagggactcctccacaacaacatacagaggggcctctttcgcaccggttccagactgtttagaagaaatcccgatttgtccgccctggttctgagctgcaacagcttgtccaacggcttggatctgatcagagcgcagaccttgattgagatttgcagccggggctgagacacccccgccaacacgctccagagctttcaggtagatttgttccgaaactgcattactcgagaagtgcccgcttctgtaccgttcgattacaatcgccggcatgttggctcgaagaagggcttggtagaacgcattttgggcgttggcgctactggggttgttgttcgccgtcttttccttctgcgccagcaaactatgggacggtcctccaaagataaagcgttgctgttgtagggtacttggaatgagaacattgcgggtgcgattcagcggcggtgccaatgtcgaataggttttggaagccagtgggtggcaatgacggccggcgaaggacgatggagtaaatatagagctttctaaatcaccactgtcagatgcagtccatgaggacgagagtggattgcgcttactgctgagcagagatcgtggcaatcgatgtactggtgcgctgtaaactccaaaggcgacaacctcagaaggcgtcgacttgcgcgcaaaagtctgacatgttatcagtatcaatatttcccagaatatcattaagctttgatccgtccgacaaagaagactaacctccgtgtgcaggcgtcgtcgtgaatcctggattgcggagcctattgttgcgaaagactgtccggtgcgatgcaggggagacttcaagaattttgacatcgacggccatgatccggatgccgacacattctaacagaaagccagttatcagatatgtacttctagcaagcagatgcagcaacacttaccggcttgaggatcggaagttgagaggccatattcggagtaagaaagcggcgcttggccgcgagatcacaagagaaaccccctcgaaataatggacgttgagaaatattagggagaaaggtaaaaatactgaatattgctcagatgtcgcaagcacctcccagattgaacgcagatgataggattagaagagggatctgacgatgactgtctccaagtcggaggaggcggcggcgaaagccaattgtcgggtctggctattgtggcgtcaatgccttgccgtatgactaatcacgtgttggtagttaactattattcttc

SEQ ID NO: 9760 - DNA, 1372 bp, Emericella nidulans
gatgactactgactacagcattgggtgtccggatccgcagtctccgagtcagttgaagattgcgcgaaccgggatcacgatgttcaggcactcagaaactacggctgtgccggtgacatgagcggcatcaagtctgcaggctgctaaatgcaacgggactgggtcggctggctgcgctggctggctgcgctggctggctggctcgacttgcctagatataggagacggaaaacacccaaggagaacaagatgaatactcaggaaataccactagcttaagcgcctgtatggatattgaggcttgggtgactcgcaatatggttctcgccctgtcccaatcatggcatggattccacccagtaaaagctgggcaaccacgccccattgttattttccgggttacttacttatataattgatctattcttgctcttcgttagcatattccattgagcacgagtttatgttttgcggtgtacagagaacagacgacaggaagcattctactccagggagggttccctaccgatgccggtatcagattaactacagcccacacagtctcatcgaaagttgtaaagcgagcctgctaccgtacttcgtatagccactgcatcgcctggccgttcgcgatggccacgtccttctcgtgctggatggagagtaggggcggcatcgatagggactatcccatgtgccttcagtcaattgtcccaagtttaggacaatgaactgtgacatacgcagtcatcgccgtgcatattggtgtctctaccggtgcatcgatcacgcatgagcactagatcgagtgcaagagacggcgttgtcgggatttgtatacaatcatccctcagagtgcaatgccaagcagcccttgatagaatggcaccacggcgattttgatcaacaacagccaatatcgtggacatgactgtcggtgttgtagaggttgtctgttttgtgccgctagcatggctctcctcgctacacgggcagactctcagggagcacctgtagcgatatggtgaccgcagggcttctagtatcatcatatatatcatccccatcgcgagttcaagaagcgcagctgacaagtgagtaactgcgttataaaattcaattaaatctaattgggtatgagaactatacacgtgtaaccaagcacctgcagcacgcccgcgccacctaccaaaacacagcagaccagaaagaccagacagaccaaaattgattgctctcagttttccacacacactccaacctcgggccacactgggctctatgtgcaacaaacgctcggtaaaaataaacaaaagccaatgttaagaggcacttcatatgcccttcttactcaggccaagccactccccca

SEQ ID NO: 9761 - DNA, 1089 bp, Emericella nidulans
aagcagtggggaagcagttgtgggaagctagtgagcggcagatcgaagagagagagagagaaggggcagtgctgcgagccttggagaagaaagaaaacgagcaaaaggagaacgtgaaggtccgtagtcagggctcagttcgggtcaagaaatctgcatcgtccgcatcgtccgcatcgtctgtatccgcatcaagcggtgctaaagagcagaagccagggtcaagaagaagtcggaaggggaacggcaacagcaagtaatgtatcattaatgaacatagattacacacacataataagggcgttgcagttgaaaccggaaatcgtctagagtcaatgtatacgaagagggaaaacataaaagtaaagaaattcgtttctgtcagtctaaactgaaagccaatgtcgctatccatgcgatgtttatctatggtccgtttttgacataagctaactctcatgcagtagattccccaaacattcaatccattcaagatttccatattagttatttatttcttgagctgttccagcagctcagcaggggctgttgcctgtatccctgggggttgttcttggtccacagccacagatcctcacatgcctgctcgagggtgcgctgtgccttccagcccagctcggtgttggcgcgggtcgggttagaagttaggttaaggacgtcaccggcacggcggggcgcgacctcgtagggcaagtcgcggccaacagcctttgagaaggcgcggatcatctcgtagacagtgctgcctcggccagtgccaaggttccaggcgcgcacgccggggttattggcgcggaggtagttcagcgccttgaggtgaccatcggcgagatcaagaatgtggatgtagtcgcgaatggcggtaccgtcgtgagaggcgtagtctgcgtgtgattagttgattcatagctcagtttattcattcgcgaagaaacctaccgtctccgaaaacaagaagcttctcgcgcttgcccgtggaacctgcgcaacagcggcacgaggttgtacggcacaccctgcgggtcctcgcccatgataccgctggggtgggcacagcggggttgaagt

SEQ ID NO: 9762 - DNA, 515 bp, Emericella nidulans
gatgagctttgaaggtggactccaagagggctcttcttctcactgcttacatccatatcagtttccatcgtctaacaatcaaaatctaacatgttcaatgaatattgttttactattaccctcattccgtggcattatcctcagaatctataatcatgcccgaattctcttaacacaccctttaaggtccctatgctagcagtgccttaaatttaatccgatattctctaggtcctgctgaatgcatccttcactaactgctatgtgctgggtcaactgaattttccttgtgctaattgctatcagaatcctgaatcgcaaactgttatgattttatcaaattatcctggaaattagtcctatttaaccctccacatggggctcagaatcttctattgcaaatattttccttcacctgaatttcctcctttgtcagcatacaaaccttgtgcattgtgcttatatctcgatgcttattctgttcaggggttaaccctttacgaccattttactgc

SEQ ID NO: 9763 - DNA, 973 bp, Emericella nidulans
cttcccccacgagctacatctgccatgtcaatgtacggacatccaaaaacgcctccagcagcttcatcaaccgaggttgaacgccctcgcgccgccagtgctctttcgaaccatcgaccggtctcgtttcgtagttctttcagcagctcagccggtcggccactggtccaagagcccagagttgtcccggttcgacaaaacgtttcacccactcgggctttctctcgtacttctatgaatactcaattaccaagctatcaggagagtcctgaaagaaggaaagagcgagaggaagcgagatcattacgtgcagcgttgcaagggatggggatcgatgacgaaatccgtatccatgaggatgcacagaaggaggccacagagttagtctggatgcaccaaaatcctggcctccagttcaagaacccctatgccccttatcgtaacccggacatcaagaagccgcagaactcagaaaaacagagccaaccttacgagccgccgagtccatttcgaagatcgtggcgtgaaagccatcgactctcatttagaggtcaatctgccaggaataattcagaaaccgactctaatggcccgggcgaggagagttctcccaggaaaagtgggatcccgagaaagaatctcaaggttaattttgcactggacaaggatcaagggcaaactgatgctggttatggagtggagcccgcggaggtaaagaaggactcgcctagaggcattttcaggaacccgaaagatcagatttacgaggaaccgcagaattatgagcacaatgacaagaaccggtctgttttctccaagtctgactcgtcagcacttcgaaacaagccgcgcaattcagttcaaggatctcgaccgttaccaagccgattcggtagtattccgtttgttgataagctctctcgctttgagctccataaacacccgcctactcagtcgcacaatccagagtata

SEQ ID NO: 9764 - DNA, 542 bp, Emericella nidulans
gaggatccctgccgcgtagggaaacttgagattcaataatggaaccagtaggagtttcgccatcaagatgatcaaacgagtcaactgttgcgcaaacgttccatttagctgcaaggctggttacagattgagctttgtgagttatcttcgttgcacttctcaaacatatgaatactcctgtaaccaaactcaacgaacataactgtatagaccaaaacaaaaaacatttagtgatgagttcaatccgaataaacagagcaaaacaaaacagaaccggtaagaactcttaccgcgagttcgccaacttcatagatattaacagcaacactagctctcgtagtagtaagcaaagccatgaactgagtagcagtaacaagaatcaaagacaaaagaataaatctcctggatcgatgactagcaatcctcaaattacgacgaatcttttgatgctcgccgagagctgatctaacgtcagtgatctcagaagcgacgaacgagcgaagtcatcgagacgaagagtttgtagatcgcatgtggttttg

SEQ ID NO: 9765 - DNA, 1390 bp, Emericella nidulans
ggatctagccctaactcgctttcgaatcggtctactgactacaggcactctctgcaagagcatcaactaagggtggttcctaccttcagagtatgagctgttccattaatcagattaccaattccagtttggagaccagcgcagcttatctctaattgtgccagtttctacagatgattcacgccttggaagtatctactttctttccgctatttccaaacccataccacacccacacatctgccttaacgcagcattctttggacccatatatgcacagacgaaatccccatgtcaattaaaaccaggaattcctccgagaatacagaatttagcatgatctcgcacgaagaatcctttctccctggccatggattgggaaattaagcttgtgtgcctgcagtatttgcagcacaatctagtaatatatgtgtcatcatctgcagcttctacattggaatgcaaggcaatgaaaagtcgtcaattccgaaggaagcagatctaaccagcaaaaagtcataagaaaagccatgatttcatattgcaacagtcaagagcactttcgcaagcgttgaaaaaggtagtccgactgacacagcctgggcaacaagaattcacgggtgagagcgccagctctatgccaacaacctattaccctggaactaacttcacgcttgcgtagcattgctcggtgcagcaacaacatactgcttttctgacttcaattgattgagcgcatcctcaggcaaacgcagcgtatcaccgactatctgcttatccgttgagccgagccactggcctaaagcgatatctatacccagttagcgtcaaagcttacttgcagacggaaaaatgcacataccactaaagtggtcagcttgcaacacctcaagcaagaccagatcctcttcccctgtattctcgatatagtggctatgcgacataggaaagtatcccacatcaccagcatggaagtcaaacgtcgtcgccgtcgatggtgcttcaataagcgtcgcccggccctggcccctgataaagaaactccactcgtcgcttgttgggtgccagtgaatctctcgcattgcaccgggcttaacggtcaccactgctgcagcgaagttactggccgcggggaagttttgggggtccacgatcttgacgctcccacccgggacgatatgtgcgggctgctcagagaagtggtacgagtatgttcggtcgcgcgggacaggccctgcggcggtggatttgttctgggcggcaatttctgtgggtggagcagtgccagggaagataaagagttcgccggaggggatgtcgtcgaaggcagagacggggaggtcaaaattcttgctgaggacggatttctgtatacgtacacaatacagtt

SEQ ID NO: 9766 - DNA, 414 bp, Emericella nidulans
aggtaatgacaatgtatacagcagtcaaaccaggttgtccatgcccataagcccaatccattaatgtctactttgatattggacaaatgaaggtcatgtccactaagacccatgtccattaacgctcatgtccaaatgggttgttcagtggacatgacataacagaatcaaattttaacacaatagtatttgcttcatattttaatcaatacaaaagtcaaaagtctaacactttgaaattatcaatctaaaagccaatttacacaacaaagtattaaatgatttaagtatcaatcaatccgaaagtcaaaaatctaacactttgacatgtttttcgatgattagtgattttctggcttgctacaaatcacttaacctaatattttatgactaatggatcgttcatgtccatca

SEQ ID NO: 9767 - DNA, 1344 bp, Emericella nidulans
ggcggtggtggtgggatcaatacccgtccgcaggcctccataggcagtgcgagccaggatattctagcgaagatgaaggcttttcaactttcaagacaaggggttcctcccaacctaaaccagtccgtctcgacaggagcgatttcgcaaggcggtcaacaaagcacacccagcgtatctggtccattatcaggtaataactctccttcggccatgaacggcccattggcgccaaccgcttcagggcggcttcctccaactcaccgtccaggacctccgaagaattgggcttccgctcctactgtcggtggcggctctcccgtgagcggctctcctaaaggtggcctggcggcgaaacgcatgaagcccggactcaaactatcagatgctactggaccaagcaatccggcagctggaggtcagtccccgccggtggaccgattggaggtggagagtcagctttcagcaagtattcggagtacattgacacgaaatcgggaaccctgaagttcaagaacaaagccgtcctccacggaggcgggatcgagttctcgtccggccaaagtttcagcatctctctagatgaagtggatcgtatggatgaattgggcaagggaaattacggaactgtatacaaggttcggcatagccgcccgcacatgcgcaaacctggacaaggcttgagtgggattgtcagcagacctcaagggtctgacggttcagataccgaattgaagccgcaagattccctgactggcgccgtcatggctatgaaggagattcggctggagttggacgagagcaagtttgcgcaaatcatcatggagttggacatcctccaccgatgtgtttcaccgttcattatcgacttctacggtgccttcttccaggaaggtgctgtgtacatttgcgttgaattcatggatggcggctccgttgacaagctttacggcgatggtatacccgagaacattcttcgcaaagtggcgctttctactgttatggggttaaagtctctcaaggatgatcataacatcatccacagagatgtgaaacccacgaacattcttgttaacacacgaggtcaggttaaaatttgtgactttggagttagcggaaatttggttgccagtatcgccaagacgaacataggctgccagagctacatggcacctgagcgcattgcaggaggtggagtgcagcagtcaggggcctctggcggcacctacagtgtccaaagtgacatatggagcttgggattgtccattcttgaatgcgccatcggccggtacccttaccacccagaaacttacaaaaacatcttcagtcagctacatgtcagta

SEQ ID NO: 9768 - DNA, 537 bp, Emericella nidulans
ttagctgttactcatcgaaatgtttgcagatctgtgatgcataccctcgaaatcagccatgtaagtccacacatccgagttcagtgcgttgacgaccatcttccggtcggtaggaccagtgatctcaacgcgacggtcgacgagaccaggcgctgggggagctcccttccagctgggatcatcgcggatgtgcttggtctctgggaggaagtcggggaggtggcccttgtcgatctcggcctgacgatcaacgcggcgctgcaggagagccttgcgagtagggttgaaggtacggtgtaagatggcgaggaaagcacaggcttcctttgtgaggatcttgcgggcttcgttgctcacggagccgaggatggccacatccttaagctgggcgtcgacctgagacatgatgctagcgttcacttatccaatttatagagagatggagaagtgtagcgaagtttggaaagaagaaaagtcaatcaagaatccgggggcgagcctagaccagacttatatatatgaagcatgccgataaca

SEQ ID NO: 9769 - DNA, 564 bp, Emericella nidulans
gatttttcacgaggtcctgcaatacgccgcaattctgtatttgaatcgaatgggtctgtaggggacctgacccccgtatttgaagacatggatggtacacagaggagaggctcgctcagtccagagcgtgatttggtcgtccgacctcgattctctaatacacaatctgtctcaccacccaggaatgagcctcattcagttgggccaagcatcggaccaaccaccatcgaaccttctatccgactactgccccctccgccaggggggtccttcctcccccgacgcctttcggggtggtatccaccgtttttcgcagtacagctgtctttgtttcttgctaaaattgctatggcactgcagccttgctcgccgttggctgtcaacccctgggtgttgtactttttgatcatagcagcaggcatcaacttgcggacgaaaagcttgcaaatgcagctagcatctttggttttgcatgctcttgtcgtttttctaagcatgaagctggagattctatgtatctggccttcgaccacggccggaatggtgcatgggaatgaattatag

SEQ ID NO: 9770 - DNA, 1885 bp, Emericella nidulans
gcaagaagaaaaataaaagtaaataaatagtaaaaaaaataaagatagagggagagagataaaaaaagggagggagagaggggttcgcggtgtttccaagagggaaaaagacccccaaaagagtctctgggtcacacacaaaaaaaagcctgtaatgtcaagccccgcggcctctcacaaatagggcccccgggggggggggggggaatcccggcgctgtgccttggaagtgttggctctccagaaccgtttgtcccaaaccaaacggtttcacttcttgaattttatcgtccagtcaattgtcggtcaacgtcaataaatgaagctcggacttagcggtgattagttagtccataaaaccatggctgggtattacccaggaggatagtaatagcccgtttcacaacaagctttcctgattcgggaaccgaaggatatactgtatgttagacaccagggtgctccggattggcttgaagtaccacataaattaatagcggtataaaagaatctgctgaagtgtccgatttctttgcattccgcaatagaccttatggatgtctcagtcacgcattttttttttttcgccttagtggaaagaacttaccaaagataaccttgcagcagttaagaatacatattactttatcgcggggtgcccggtagccgttgattttcagaagttctataagccattagaaagacttcaattagaaatgcaaaagactcccaccttgctgagcaagattgagaaatcgacgacctgaggagctcactggcgcgatatcaagatgctcttctcttacccagctgtaaattcgcatcttctgcgccaacacctcgtcccgctcgacgtcttcctgatgttggcccttcctccagggaccatgcaatctctccatctcacgccgcttgcttctgctcgcacttcgcgggattgatggaggacttggtattgtcggtgaaaatgtttgcgtgtaaagtctattcatcacgagtttctccataccttccttggcgttgtcaaattcgctgtcagacacgtctcgccatacttcgcatgccgccatcttattagttataaaagctagaaagtcgctaatgattttgacctgttcatggaccatccattgtcgcttgccgaattcgtgaaggaacgaacgtaagaatttggcgacagggtcagcggtgcgatgccgtaattgctcgaggaagcggtgaaaatcaaagggttgatcaggctctggttctggaggcggaggaatcgttgaggtcgaggaacgtcgagtcaatgtgaactcctcggcggtggagtttctatggagtttgtgggcagtcgttgaaggttgctttttgagtgattgctataacactgacctagattttggggtctgcttggttgattcctgctactaccccttgatctaggcttagattttctgggttgtgaatgtcttctggcctctaataattgctcacattctatttatgttttgggttcaaacttggttctaaattcctgtttggatttttctatccaagtatttcccaaggtatttttaatttcactccagtttttagtgtattgtggttacttttcatatttgagtttttctgtatcatttgttgttttgctcatttaatttgttccattgtctttcattattctttaatcttctttctcttttatatagctatatatatattttctttatctatttttatttttttatttttaatcacttttatttattttattcttatacttatttttttcttataattctatctttatatttaatttttcattttttatctcaaatttttctatatcttttatcctttttcatcctcttttatttattatattatattttttcttttt

SEQ ID NO: 9771 - DNA, 1111 bp, Emericella nidulans
gcaaggtactgtgaccttttacattaattagtagtacggaccgctcattttgaaggataacgctccaggtatagctctcgcaaattttgaaagtagattgggagattttcaaactactagaaggcgaaggtgtgacttgtcaagtctgaatgggaaagggtatatagactgacgatagcatagatatgttggcagacgtacagcacagcctaaccaagatgaagaatagaactaaataacgtttaagttccatcaaaagtatcataaaccgcacaacaataatgcagaagtatcttacaagaccaagaaaattaccacggcagtaccaacgcgcctcccaaggccatagctaccatccagatcccaaccaccgagccaacaccctcccacacagaattcccgttcctcccgatcaggctgttggcagcattggtcgccgtctcgctagcctcagcctcagccttggctttggccgccgccgtctcctttgccgcattctcaagatcactctcatgatacaagagagtgacaaccggcattatatacatcgccgtcatcgactccttttcctcgccgtctaggtttgtcgtgtacgtgcggacagttgtctcagttgcagtggggacatcgtaggtgccgacgcgggtgatcacatcagtctcgcttccctcgtcgtcgctgtatgtgtatgtcatcgtgtagggggtttgtcgtctcgctgtactcgtagttgaaccctgttactacatggcagcctgttgccgcggtgtagctagacacaatcgagtagcaggcgccggtggaatcgaccggcatgaagctgcataacgtttgcccagatcctcaatagtttggttgagggacctactcagacacccagcgccacggctgttcgggtaaggctgctattatgccgttgcggcccaagtggatcaatgatagtaatctagaacctcgccaccgggttgagtggcaaccgggtttgttgcctttgggcgctggccagaactcccttggggagcccttttaaatgggctgcatgccccgccttcaccctggacttttgccggctgtgttttttttttcccctttgggcccccgaaaagttttt

SEQ ID NO: 9772 - DNA, 1696 bp, Emericella nidulans
gggagattctctgccaggatcagagatcgtgacatgatatctcgacactcatacaaattatcgacttaaaaagtctgtacgattatcacgcagttaacatctggcgctcgggcgaaggtttgatggatttgttcgccatccgtttctgattcatctgctcgtttttcagctgtttttctctcgaccaatagaccatgccattccctgataagaccacgttccttatatttgattttgcctagcatttatcaccatgtttgattccccctcagagcatcctctgaagatttcgtgagctatgtatctctgcctcagcgttccttttctcgcaccctggattggctgcttgctacatccaatcggagaagcatatactcgaattgagactacgtatgtatttaatcttgacagaagtactctagcatattcttcttcatgagccagtttatgtaatacctcgtctttactccgtaccatgttgttctaatatataggtaggctgccagtccgaagtagaccagggtctcaaataatgaaacaagcagattccccgctcaaaagtccaagacggaaggattctctaggtaaccggcaagacctatcaaatcgcctgtcacgctgtccaaaatggcgtggatgcaggaacctcccaacaagccgttttcttacgatccctgcagttggagacctacgtgctactctacataaacagggatccccataatttcctgtcaaacattgctcgccaatcgagcccttcacgttacgcaatactacaattaacctgccagccgaaacctcaagactcgagagcgatgatcacgcagtcggcgctccgcactattgcacatctatggatcgtctctactttcctcgctttagcgttcgatccattgggaattaagtacgaggtcacaggtactcatctagctcggcgcgtatgctcctacctttgctgtgcttcgtctcaccgcaatccatacacttgagccagcttctaaccttaaatgcctttgttgaattaggcgcaaaatttaggcggcgatactccggcggcaagttatacctccgtttaactaacgtctaatatgaacgctaatataggtctagatcaccgagaccggcgactccgagagaccatatgaggtagacgggaatacctttgtgagtgcttcatataactggagcatgtactcttcattacatgcctggaacctgcagcagcgagccgtatatgctaacctgagggcgtggacaggcagattatgaatcagcagctcagaggaggtatacttcgctccatgcatacacaatgcttccggctatacaaggatgagggagtccttactaactaatatgtcgccgaaagctgcaacattcagttcgataattgccaactagtgagcaatgaacaatctgccgtatacagctgaatactgcagtttgatctaacagatgttttaaccagatcgccaacacggatagctcagcatcgttctcgctagaggattgtcagaatcaacagagtaagacaaagacagcccttggagtccttgtcaactggaacattctgaccgcggggctatagatgattgtatagctgatccgccgtcggttgcagatggaagtagttccatgagcgtcgcttcagtcgacagttctgatactttcgagagtgaagccgagaccgcggcat

SEQ ID NO: 9773 - DNA, 1161 bp, Emericella nidulans
cacaagccggaaacgtttgaggcgaaatatcttattaccgtcatcataaagatccttccttgtagctgtctatagactaaactccaacctatttcccgcgaaatcccttgcaaaaaaccgacttggatactcgacccctttggtccctgagttctcacccggcttatctacattcaacggcgctgcatcccctccacgcacatggtggtcccatatccgttgctgtagttcctgcagtttctctaacgattcaagcttgaagcacggatgcctatcagaggtcttggactcgttgatgccaggtgcaatgtggatctgctgaccagacgctccgagattgaacctgttaatgcgaagctgttagcatactgactgggcttgatgagagattgaatccaggactgtggtaccataagatggtgcccttctgtaaatgtgggactggtgcggaggtgaggccgagggttcccccgtagaaggcctcggcgtgctcgagggagtctgcagggacgaggaggttaatatgtgcgagaccagtgatcatgctggtcgttttgtggtgtgatactggaatggctgagggagcctggaggaagcttgagaggggtttatttattccccgcatttcaccatttcaccatcttcgtcggcgatgtcggaaacagtttcccgcactgccagctcaggtacacctttgcaactcatagtattagaccatccgcactacatccactggactcaatttccgagaatatgacccattgaacgaaactgttaaaagagcgtcgcgtgccgggtctcccgatctctcacgtggcccggcctatgcaccagcttgttgagcaacaccgctggagtctgtggaagtgacaccaatgacaccgtgggaatagattggtggaaaatggcgaaagaggtgcgtttgccagagtagggcgcccatattgcacaatcttctagagagatctaaacgcgcaactaccgcagccatccggtccatccggtccctccgggacatttccttccttcacttggctgaacctcaatcatcaatatcgttttgctaacgtctccagaatttggccgcgtagtcaactcgactcgcgagatgtctcccagtcaaaagaccgtctaaaacggacccgacaatgtctacgagaa

SEQ ID NO: 9774 - DNA, 457 bp, Emericella nidulans
gaggatccccattcggataattgatgagcttcttgggaattgtacatgtgtcatcctctgattcattgttgatgataaatttcattaccttgccattttcttcgttgacaggatcaccactagggtaaggatatggtgcgtcattagcaagcaccaccgttctcgacggtgatttgtagaaatcaacaacaacgtctacaatttctgatggagataagagaatcgatttggtcatcaccggctttgacaaatacgctgtatcagaccccacaacgatgtccatctagaccgttggagaagaaaaacttgaaaaacctagcgttgcttgcgtttatgatacggaatctgtatttcctacgtcggacgtttagatcttggccatgcttttccattaacgattatcacaacgccaacatattccggttgacactgcgggtgaatcgatgggttgtcccag

SEQ ID NO: 9775 - DNA, 443 bp, Emericella nidulans
atagattcagatagcataataaactgaagtgaacatggctaaaattaaaattgataaacaagagcataagattgcctacgtcaccataaaactcgacacagaaattcataagtaaaagcggcgtaagttactaacatgccacatgcgagggacagaactgccattgacagcctccaggcagtagctcccagctcggcttgcttctactaccttatagggtcccccccagttaggatctaacttgcgcgttcacttaaggaaggagaggcctactctaaaagaaaagtagatctctccctagatgcttggaaagttcgattactccaccacttcgcccggtgaacttctaagcatccttttctagagaagaatagcgtatctttcgtcagaagtgacttcttttatgcctgagtgaagtgaagcactccgttatgtgggaacgt

SEQ ID NO: 9776 - DNA, 1497 bp, Emericella nidulans
ttggtgcaagttcttggtcacttggtcaaactgcacccaacgcgtcctgctgtacaggatatgcacgtgctccttgctggtaacgacgaggaggcatcttttttcaacaatcttcttcatattcagcagcatcgtcgtcttagagctcttcgacgactggccagtgaagcggctaacggaaatcttcaggcttcgaatatcagcaccatcttcatacccctgaacgaacacttcgtcttcaatgaggctgctgatgagaacgctcacaatcttattgcagaggccgtgttgactattggcgtgctcgcggaatggctggaatggaaccagtttagggctatctttaggagataccgaggctacatgcaaagtaaatccgaatgggaaaggagcgttttgaggcttctaggaagaatgtccgatgctcttacaaatgcgatgggccaactaacttctcccaactctcagaccgaggatggcgaggatgccatggatgtctcatctcccagcaagtccacccttgctcaatcaataccatcagcatctaaggttgcaaacgagcttactacaggattcattcctgtgttgacggacttcattcaccacaaggatgaggctcaaatgagtttgcgtcttcctgcggctgttacaaccattaagctcatgaagctactgcctgaagctgatatggcaattcgtcttccggcggttcttcttgatgtttgcagtatcctgaagagtaaagctcaggattcccgggacacagctcggaaaacactgaacgacatcgctcttttgcttggacctaactacatgggctatatcctcaaggagttgcggcatactcttaagcgaggctaccaacttcacgtgctctcctttactgttcattctattctcgttgcaacaacagacgatttcaagcagggtgacctagactactgcttagcggatctcgcctcggtggttatggatgacacttttggtactgttggtcaggagaaagaagccgaagactacgtcagtaagatgaaggaagtaaagagtaacaagagttacgattcgatggaactcctcgccaaaaattcaaccatccagaatcttgccagcttggtgcggccattgcagtcgcttttgcgggaaaagctcacctcgaatattgtgcggaaggccgacgaactactgcgaaggatcggaattggtctcttgagaaaccctggagtcgaaagccgtgacattctcatcttttgttacgaggtcatcaaagaggcatataaggagccggtccagcttggcgctcaggttgccaaatctgctcaggaggagaacttcctgatcaacatgaaaggccaacgccggaacgaaaagcgaggaagtacgtcctcatacgtctacaaactagtccgcttctccttcgatgtccttcgctctgtcctcagcaagtataactcgatcatgactcctgctaatatcgccggctatcttcccatggttgga

SEQ ID NO: 9777 - DNA, 1275 bp, Emericella nidulans
ttaatcaggaaccaggttcgattgggacaataatgaaacgctagcctcagatataccggatgagtagtgggtgtttatttcttcgagcacagacaccagatttgatcaggctttgaaggagccttggagctatgatccgttggtaggatctggctctcagaattatatcttcacaagttctctgaatgaggagctgatggcttttaccacggttgtttgggacttactgttcggtgtccacaacctggccgctgtatacatacggcgcggcaggtcaaccaaggacagggctttaagaccaattgtgcctcttccagtagtccattggctcgtgaaagaaggccgcttagatcttcagattgtaacggctcagaccgcacaatacttcaagcatcacctccctgaccatctattctcgctccgggcgttgggccgtgtaattggccattacaagcacgaactcccccatatcacgctgtctatgaacgtgatcaaagagtcttccttagcctaggcgtgggcgagaagtgtggtgaaatacttggaatgtcagcatcttgcagctgcttcgatagcccgcaatggcattatcacagactcaatctacccgagtccactcacaccacagcaagcatttgcagtgattctacagtttgaattcggtacattatcggtcgatgtgcatgaaatggacgaggcgatggcgatatcaagtgggaactccctgtttattgctcaacggatcctgcatgatccgattccacctctagacatgccttcatgtgctgttgcgcatgctatcggtaacgtgagaaagccagggatagcgctcctttttgcgcctgagcagccgatggtcaaagagcacgatgtcaagaagtggcacgtggtgtatcaaaaccgattcgattgtaagccgtctggcggatcgttcgaggcgtcgtctctccacatgtacttcacaggttgggaaggacctctgagaatccaagggacttcagcattcagagaaatggaagcgtacaatttggagaggcgaatctccatgtacgatcaagcagaatgggtcgccgacttgaacgtcctcaagtctctaggccagtccctgatctgcgagtgtgtggtgtccatggtaaacattgcagtcatgatccatccatgttagcgtgcgaagtagagtttgtctctatcgactgctggaggagctctttaagtccgcggatgaaccgacgatattcgctctggatctcttggatggtgcggctaacgggtgtg

SEQ ID NO: 9778 - DNA, 1926 bp, Emericella nidulans
agatgtaataattgataaaatgagagggaagagggcgtcctcctggaagagggggatcccctcaaggtggccggtaacagatttctagggatttgggacaggcccattttcgcaacttccctccaaggccctgcagcggggatgtcactttctaaaaagtgcagcgcggtgttcaaccactggcaatacttattagtacggtcaagaggatgaaaaacgctgaggccccgctgggcagtcagggggtgtccaataaaagttctcgacgcaccgaaactagttagtaacggcacactcaaaggcatgagggtgttttgatgcgtctgcaaggtaacactgggtctctcgacgatttgctcttggtataccaagctgctaacaaggtgtgtcgcctgtcctcaggccaccgctcctccggcgatgttcgatctgccaccaggccagctgcctcttttcccatgaacaccaaaatttcactatttgcggccatagtcaagcgttatattgtgtttcctcacttgtgagcttgtccattgcgagttttggatctattttccatttttttttacctgcaaatgcggcaagtgatacatcgggaacgattctcttgttccggacacgcacttgctaggccaggtgctcggaagactcagttgcatctatgccacagatattcgaagacgaccctggagtataatctccttcaggtgtcgggaacagccgaaggtgacacttatccagccttgcggacaagatttctcggcatgtcagcagtccatttcaaggattccaagtgcctgtcggatatgtcagatcacactgggggtaaagaagctgacgacagtcgtccagtatttgaggtaaaggtaggatcgcctgacgatgaacaggatccttaatctgacctttatctacgccgtctgatattacagttttctcaacactgtcccttcagagcatctacatgttgttgcttgacggtgcaggcccgacttaatccttctgaaactaatcgagaagaactcgtactatgcaagcgctgtccactctcgataacttggtcgccgggaagccgcagcgaatactggacggtggcgtccttctcagccttacttcctggcatttatatctcgatttggtactccttggacccaagacattggaccgccttcaggaagaccctctcattgctcaaggtggtactgcaaccctatctatcgcctatcatgaagacccccacggtagccgggatggggtatactggtccctgccactgtcgtgtctgcgctactaccgcccagtccaatgcaaacgatcgtctctgcacgactcgaagatttcgtcctcagggctccaggcgctcatactaggtgcctcttcagcctctttggacaatctttcggcggcgacggaaattcttcaatccttgtggacatgaattatttagcaaaccaagatgccctgcgagactttcggaacaaccctgctccttctcaattgacctgcgcggattcgaataagcggcctcgacctctcgaggaggatctggaacactcccgtatcgtaaaaaacagcgagaagcaccagtttgtagaagttatgcatagccttcacttattgtcccctttagtggaaggtattgagcttttccggtccaccagtgaggaagaaagaaaaaccgcattgcagctctttaggtacggttcaaactgtgggaagcgctgtattgagaatatcaaggtcaaggataacgcgcatcttcattcttcggggtcactgatccttcattcatcccccaagcttttaagcaaccctcagaccgcgtctgggtcctccgtgaaacgttccaagcacattgctgcgagccggaaggatgtattatccgcttcagagaagacgacggcagatggggctacgagactttac

SEQ ID NO: 9779 - DNA, 512 bp, Emericella nidulans
gaggatcccctgagcaagcgacagagagtccgtgtgatgaggttgctcaggctgatgtgacaacagtgagaagaggcgtctcatctcatccctaaccagacggggttagggatggcgtcttggagcagccaaccggagagattgacatcgctgataaagaggtagattcacacgacctcatctttgtcagtgcacaaaatggctccctacagcccactggtgacccgggtgcagaaagctctgggtgtgcggcaataccatgtggcctcagtcctgtgccaacgggccaagatggcgatgagccacatttgagcccaatgagtacatccactatgacctgctagagaagaacattaacattgtttgcaaacgactgaactggcctctgaccctcttggagaagatcgtgtatggacacctggatgacccggccagccaggaaatcgagcagggcaagacacatgtggctgtggcgggaccacgtgagcatgctgcagttcatcagcagtggg

SEQ ID NO: 9780 - DNA, 910 bp, Emericella nidulans
agccttgtcctggaatttactctcttgagcagactcactgtcgatggtcggtacgaagaactgccgaaaagagctttttgggctgtgtggtataggaggagcgatattggattaattggcgcgggcatcgacgctgagtctggcaaatggttcgcacccttcactggtgtatgccattatcctgccattgatgttgctaccgtagctaactggtgacttgacagattggcgccggggttgatagtttttttgaatatgcgttcaagtcgtatgttctgctttcatctggggagcggcccgagcataaccgcagcagcccgtggcacgctctggacgactacttcctcccacttagcgagtacgagcattctccggaagcatttttgcaagtttgggaggagtcgcactcgtcgatcaagcgtcatctttaccgaggggaggggtatcaacacccgcacttaattcaaggcgacattttcaccggcgctacacgagccttttggattgatagcctgagcgccttctacccaggactcctttcattggcaggagatttggatgaggctatagggatccatctgcttacgacagctgtgtggaaccgtttctctggacttcctgaaagatggaatgtggccacaggaaacgttgagggtaatcttggatggtacggcggccggccagagttcattgagtcaacttactacctctatcaagccacaaaagacccttggtatctgcacgttggtgaaatggtgttgcgggacctcaaaagacgctgctggacaagatgcggctgggcagggctccaggacgtccgtaacggagaattgagtgaccgcatggagagcttctttctcggagagacagccaagtacatgtttttgctgtattatccggaacatccctt

SEQ ID NO: 9781 - DNA, 1596 bp, Emericella nidulans
ccgagctccagaagccggtaaaaggacgcgatgtatcagattccacagcgtactactgcaataaggtttgcttactactgcgaaaaggttagtgctagagtactagcagcagggctagcttgattataggccgtgcggactccatactccgtaaaacttgatcttgtcccgacgggatttgggatttgggttttgggccatgagagttgggagatcatactggtcggtcgtaatcattgtgctaaagaaacgctatgctatgctctgctcgctccgtcggtactcgacatcgacaagtattccagatctcgattgcgcccatcaagcctgtgcttcaggactttggagtctcgctcccttcactaactctgatatttgccagcctctcctccactcgtctcactatctcgggatctggttctggcttgatttttttcggtctgtagcttgttagtaagaatgctctgtagaagtcgtgtaacggggtcgtacgggtctcgtatagtttctgcacacttctcctgcccacaattggcacaatttttctcgcccgatctgtaaacggtcgagcattggtggcaggtataccggaccctgtgccgcggtttcttccaggtccgagctggcggttcatactgcggttccgcatgtccggggtagccgtcgggatattttgcaagtttgggtctgatattattagcagaatacaaggcaattcacgatgttcgacgtacggatcgcgagggcaattcttgcatcgaatatgcttgcaactgctgcattccgttgagtggggcgcgaaaagcgtattgcacctgtggcacgtccgtcgtaatcgctgccggggctgcttgcggatgagatcctggccaccggagcgcgatggcagcgttaattggtgttctctgggcttgggtcgcacgggctgggccttctgggccagaatggcctggagcgcggtctcggtctgctcctgcttgtccttcggtttcgctgcggggtatcgcgggcaattcttgcagcggacgtgctggcagttaacgcagaccttgtcggggccaaaggtagtctggcagcgatggcaggtacggcggacgcgcatgcggatgggcttgacgacccgctgaacggtcacatcgttcgtagccttccactcgcccggttcgagggtcaatccatatttggcgaagagagcgcgggccttttcctcatggatcgcgctccagtgggatacaacagtcggttcaggggcgggtttcgccggttgaggggtcgatttcggttgactatacggtcagtagagaacgggcaaaaaagtgaagaaaaaccatacgcaggcgctttgctagactctggttgaaccggggctattgtctctctggcagtgcttgtcgtggctctggagggagtccttctccaaccggtcttcatgcggctcagcactttagccagcccctcgtgttttccatcggactgggatgtccacatggttaaggtcggtgggtcaggatccgtaaatgaaaagtagaatcaatcacaatggttgcacaatggttgaacaaatccatcgatcgaataggcgtgaattatgggtta

SEQ ID NO: 9782 - DNA, 721 bp, Emericella nidulans
ctgaggagttgatgaggctcagtgtcggcaaattatgccccaggcatcaaggccagcatcaccgcaacgtcagccaggggcggtgggcacaattacggcagatacgagcggtaccagaatggtatttgtagtgggatactccgcactaagccggtttcggatcccgccattaagtccattgtcgtcatccccgcagtcacaaaatctctattctactatactccaacatctaatactatctggaggggctattgcaagaggcaacacatggtcataacgcattttcagcacgattccaatcccattctgagcactgttgaacttcctggatgtcctcccgtgcgattcgcaagctgcaaaagctgcgtgagcaagagcagcaagccgagctacaagcccaagagtcgagcgaagacgaactgatagcgaagccatcgaaaccgaaaccaaatgcctttgaccttctaaacgcggcggataatgacgacgatgaggacgaacagccatcggaaggcgaggctcccgagtcggtaaatcaaccaacagaggaggtaacaatcccagcagcaccggacccagtacaaaagaaaaagaagaagacaaagaataagaagaagaaaaatgcggcaaaacaggagcctacgaatgaaggttctgccgacaaagatctggatgagattgatcgggcgttgaaggaattggctgtccagtcgcaagtaga

SEQ ID NO: 9783 - DNA, 451 bp, Emericella nidulans
aggatgccgatgcggaccctgaagtccgtccttgttttgcagagattgtcaatcttctggaggcggcggaaactgagataatgacgaatgtgagaaaagcccgtttcagatgttgcatgacgcaaccaatgacagtcgactaatctgttgtgaagaaagagagaggagaagaagaggaatgaacaaagaagagaacataaaagaaaaaaacagagagagagagagagaaagcaagaagggctttagatatatgtaagtttgtgtgtgtatctatctatctatatatatatatccgattgtatctcttttctcaagataggagaagtaacccaaccattttagactactgattttctagatttttgtattaagaaagaacaacgagaaaattagatgtacggtgattgtctcaagtgtttggtttagttttccatgaatttgatgatgcata

SEQ ID NO: 9784 - DNA, 460 bp, Emericella nidulans
aggatccccaatgttttggccttgttggtgagagaagatccacatggcgtttgcctagaaagtggtgatccacgaaccacatgtattacttcaggcgtttcatcaattcaccttgagtaaacaacattgtttcagtgtccaattattaggtgcgtcaccaagttcggttgagtatactgttttgcacatagacttgggtgctaaatttcttggtgtaagcatttttatacccattgtaaggtctttaactcttggaatacttgcgggaaaataagattaagttgatttcaaatcttctcatttgtgtttgttccatacatttgtggatttaaacctacaataatctttacaagaacaagttcgcacctttaaacaggtgaaacctgtctctgactcttacaacaatctctctgtcgtagatcatggagaatagcgatgtatatgtgtgacagtcactaca

SEQ ID NO: 9785 - DNA, 958 bp, Emericella nidulans
gggctcgacggtttagtggtcaatcggcgtggattgctaagcgccaagggttaatacgaggaggcgccgtgctacagtaaatgatcactgacaagattaatatgtagagaaactatccagtttgatgcctgcagcagcatttaatataaagacacgctctccgtttcctgctgatcggttaggtcgccagtggcttaccagctcatcatcacaccacatctcgacatccaacggagacttattacataccatgtcaaaaatcagcctcttcggactcggatccatgggccaggccctcgcccatcggtacattgatactggatataccaccaccgtctggaaccgcacacctgagaaggcgcagtcctccgggttgatacagaagggcgctcatcaggccctcactgtagccgaaggcctagaagccgccgacatggtcatcctttgcctcctcgacaatgcctccgtaagagaaaccctcagcaaggctgtcacttctctcagtgggaaaactatcgtcaatctaaccaacggaactcccacccaagcccgcgacctctcagaatgggccggcgcgcacggtgcagagtacattcacgggggcatcatggctgtccccgatatgatcagttccggctcgccgcactcgattctgctgtatagcggcaagtccaatgaagtgtttacccgcattgagcctgaccttgctcatttgggagcggccaaattcctcggcacggacccgggctcagcatcgctgcacgacctggcccttctctcgggcatgtacggcctgttttctggcttcttccatgcaactgcgctcgtgcggtcacagtctgacaccacatctgaagggttcttggagctcctgatcccctggctaggcgccatgacgcactacctgggtggactggcaaagcagattgacagcggcgattacacgacgcaaggttcg

SEQ ID NO: 9786 - DNA, 1231 bp, Emericella nidulans
  unsure (1)..(1231): unsure at all n locations
ttaggcttgcatgatcagctgaatggtgtctcatccgcgcntgcgggttccagtcaataagggaacccagtcggtctacataatggatcgctacccacaatggagttcaacatccctattcgcgcgaaagtgacgagaattaccggactaagatgatgttatccgcctcaggagaccctcctgaattacagcacattgtccaaggttttttcccctggcgaagttacttaatcggtccgcacaacaatgctggaacgatccttgcggatttagtcgccgagcttgcggaaatccaagtaccctcccacgactctaatttttccccaatatccccgaacacgaaggtactgggaaatcagtctccggaaaatgtgcggaagaaacttcgagccttggaattcgcccagaaaaagcgaggggaatttatcaagcttcttgtgctctcgcaatggagccgacaagctgcggacgtgagccggttgattgatattcaaaacttcattcgcacgcaacatcaagcttacgcgggagctttacaatgcatgggagacatgaagagagaccttgtacgagcacaggtggccaacccagatctaaacactgcattggaagtcttgttgagaggtgaggttgtatcaatgccagatgtaagcttcgctttgactctgcagactttgcaacatcttgatttccatctgactttgattgcagcttggttataggcctccaaagcccttaacgccaaaatccactttgaagaagatgcgaaagataaatagggtcatcagcacgaggttagctttgcatgatgatatccctcttgccttccagaagtaccgcgtccatgatggtcgggtcacatttgttgtgcccggagagttcgagctcgatttgtctattggggaagaggacgtcacgtctcagtttttcttcgtcgacatccgctttcttttcagcccatcaccttcgattcccgcaggtcggatgctcagcgaactcgatatcaaaattaatgatactcttcgaaacggtggattgtccgagtgctttaactggctacataatctaatactaacaaacaaaataaatattcttgcaaggcaagcttctgagctgagtaggagcctttggtccaacgttttgcgcagcgagttgctgcaccggactctagtactgcagtactgggcatcgaagcctaacacgaaaagttggcttgagatcgcatacgacg

SEQ ID NO: 9787 - DNA, 559 bp, Emericella nidulans
agacacgcgatgctaattatattagtccctacttatctaaccgcatgacttgtaatactatataatcatagctatggaacgtagattaggagataggatatagcagatcgatgcaggatagatataatagatagatataggctatggagagattctttagagaacgaacgacctgaaaaaggaccttatccaagcctatattggttcctaaatatcgttcttagtccacctccaacggtactgaggttttcctcttaatgccttggtgatctcttatctgcctttgctagcgttcccttaataatcttctctattcatcacaattatctcctattcttacctttcaatcctcttatccataccttctttctcactctttttgtttacactattcaactatcttattctttcgatcttctttatatccctttttctacattttttattatattttaacctactatttctattttctattctttattttgctaatactaactcttttatttattatcttatcatttttcatatccttctaatttcaatttctattctctcc

SEQ ID NO: 9788 - DNA, 1167 bp, Emericella nidulans
catcgttggggcactctgattggagccggagattaaggtaagatggaatccttctggctgcagcgctgtaagccctaagcctggtggcgcttctggcggacttttcggactacaggactccatccaagactccagatcgagactcacgtcgctagtccggaagtccgctggctgatgcttgtctcagcttttcgtctcagctttgtcgtcttctgtagagcctttagggaaaccccaactcagcatatggatgcagggctggttgggctgattgggcgttgtctggacttgtatctgggtatggctgccgtctggggatcaaaggtaaatggggcagaaattgcctgttgaaatagttattgcggaggccaatgcaatatcccaagaatttcccaaaatgcaagctactatagatgctacatagccagatagaggttgataatgccacattttcaatatatacacatacgtttgtgtgtataagtacataacacgactacagtggctgatatatatgcagtggacgcctttagacatgtttccatttatgattatagagcgatcctcaggcaagtggttatactagaccttcactacagcacgctcatacgcttctctcgcctggtcgaccatgccctgcacatcgaaatcccaaatcaccctgctcctcctctcccattcagccttacactttaccccgtcacccccaatgtcttcataccgccattcgtagagatctcccatctcccttgagctcttcacaagccactggctacgctcaatcctcacatcgctgtaagtcttcagggcaagctcaatattagacttcttctccttgaacgcggagccgttctggaccttctcaagcaactcagcgagaacaagcgcgtcctcaacgcccatacaggccccagccccgtggaacggactggacgcgtgcgcggcatcaccggccagcgccacccggccagcggcatagtaaggaagcgggtggtccgcctgatcgaagatggcgtacttgcttagctgttccgggaagaggctggcaagttccttgatatgcgggccccagttctcgaccgccgagagtatatcatccttcgagctgggcactgtcatggtgtggccgtgagtccactcgttcgagtcgtgcgtaagaggaaaacg

SEQ ID NO: 9789 - DNA, 1640 bp, Emericella nidulans
  unsure (1)..(1640): unsure at all n locations
aaaaagaaaataaaagaaaaaaaaaaatatagcttaagagaaatagaaggtcataaaagaaaggaggaaaggggtggcgggattagaatttaatacgcagtaaacaaagaagggtaacctcctggacaaggtgcaaaagccttcttaaaagagggggggatttaacaattttggaaaaggggaaaaaaagggctccggaatcaaaatgtctgttttaatagacgatccacatgttgtggtccctgaatgaatctgagaattgggctaccattgaagggaaaccgtgtttccccatcttcgctaatcatgtggtaggtgatatcaagctttgataaaggtaactaattgaccagttcagaatatgatcaagtttgacactcgacagcacagtgtgtacatggatatattgcgagaattacagcgtatgatgtctggtaggagttccgaccatctctgccccggctgccggaaatattgcaacacgggttaggcagttctgtattacagtacaaatatgatactagtgtcttattatgttgtgcagtattgcggaatagggataatcttcagtcgtcttgtatctatcgatttagggctatcatctacaagctatcctcgacccccaccaaccccccggtcatctctataaccgcgacctttcccttctcatccagctccctatacggcttcctaggcttcaacatctctagtggtctttcaatgcccgccttctttgcggtggtgatccccactgcatatttgacggacgcaatgcccgccttacacggctgctccgccaacgccgccctcttgtgcaattccattgcctctccaagcttaccctccatgtacagatcataaatcctcacaatcgtcttgggaaacacgttcgcgaacccggcaatcgtgcccaccgcaccagccgctaaccctccaatcagaaaatcacttntgtccgcaaaaagtcgcaaagctcccgncgnggtaattcagcagaaggcgaagtggatctttgccacagatccgcatgtcaacttcacacccacgatcttaccaggccaattcctagctagagatgctatagtagcagaatcgagatcgacgccattgcagacagtagggaagttatagatcacaatcggcagttcactttccctcgcgatctcgtcgaagaaccccctcaccacatccatcgtcgtctgcttcccaaaatatcctggcggtaaacacagggcatagtttgcaccggcatctttcgcgtccgcgataaattccaggacttgtttcgtgctgtggcccgagactcccgccataatggggaacgtctccccgacagcctcgcgcgccgtcgtcagaagagtcttgcgctcttcacgtgtgaggaggaatgtttcggcgtttgtgccgaggactactagtccggagagcccggtggtagaaagataggcatagtaggcggactgggaggggagatccaggtcgtcggtgtttgggttaaagaatgttattgcaggcgcccaaacgccgctggggggtacggaagaggagctgttggaggtggtgtggccgttcgtcaccgtcattgtgatgcgatctgcaacggtaggggccagtttgacttggacgctggaatgggggac

SEQ ID NO: 9790 - DNA, 1170 bp, Emericella nidulans
ccctcttctcgtgcttgctggatcagccgagaccagtgctgtcacgaagggcgcctttcaggagctggacgccatttccctcttaacccctcacacgaagttcgccgcgcgcgcctcatcactcgacttcatcccggatgctattaagaatgcctaccggacgtgctggtatggtcggccaggccctacatttatagatctaccggccgatatcatccaagggaaactgacttcgcagtttgaactaccgaaacctgagaacctgctcgtatcggcaccacccaaggcaagcggtgatccagcattgatattgaaggctactcaattgctgaaggctgctagcgctccgctcatcattgtcggtaagggtgccgcatatgcgcgcgcagagctcggaattcggaaattagtcgaccagacacaggttccgttcttgcctacacccatgggtaagggtgtagttccggactcacaccccctgaacgcatccagcgcgcgaagtgccgcattgaaacatgcggatgtcgttctcgttctgggagcgcggcttaactggatcctgcattttggtgagccgccgaaatggtctcctaaagtgaagataatccaggtcgacatctgcgcggaggagatcgggcggaacgctgggacatcagagcttgggatcctaggagatataagtctagttgtggatcaattcagggcatctctttctagctggaaatactcgtcctcagcgaagttcccattgcttctcgccgaatcagccaagaagaatgaagacaaggctcaaaaggctgcccttagacaaacgcccgccggcaagccacttacctatcaacgagcctaccacatcatcaaaacagcacttaatgccttgacacccgtcgaggatggaaatattgtttacgtctctgaaggtgccaacacgatggacatctcccgctccatcttcccgctctaccacccccgccagcgtctcgatgcaggcacgtacgccacaatgggcgtgggaatgggttatattgtcgccgcgcacgaagcattcaatgctaaccccggagcaagcacatcccgccccaagaaaattgtcgccttcgaaggcgacagtgcgttcggcttcagcgcgatggaaatcgaaacgctcgcccggtaccgtatccagcactg

SEQ ID NO: 9791 - DNA, 1181 bp, Emericella nidulans
ttttctggtgaaccataagcactgccgaggaacaatttaagtctcgaataagggttacggcccgctgttgaaccgccgtgccaggccgcctggccgaggagtcggtgaatcatggagccaaggtctcttgattcaataaactcagaagattgagttgtttgaacacttagctacaggagaagagcgatggctcgatagaaattgggattgctaatggcgaagtcagtgggtatctggtaggcggttatttcagtatagatacttgcatactcgtcatgtactctgcttgaacatctggcgaatgcgtagcggtagatcgctatgttagagcacattagcactggactgtatctgtctgccgtgtggtgatcttgtacagagagtgagaagaatgaagagacgggagaaaggagtatgtggtaagtttattgcatacaaggtgaggggcaatggggaacgccaagttgttctcatgaggctctatattaggatacaggtaactagggcaacagtagtctatagaacatttgaatacaagtccaaaaaaggagtttaagccttcccctctgcggccagccattgcgatgcgaactcacgaactagccgccagctcgaccgggttcagcacatgcggatagttggggtagtttggcttatacgtcttctggcagcgactgttgtactcgccagtggtgctcttgacaaccgcctcctcgctaccaggaacacccagtctggccagcggcccatcgactggcgtcgcacgttcccacccaggtccggaagcgggatttttaatccatgccacgaaccagtcattcatgtagtcagctagagcctgctcggcgtccgtgacgccggagatcgactcaaagcactcgttaccgccgtggaagaacggcacttcgctgccgtgcgaggggcccagccccgggatggggaggacgttgtcgtactgcccgaaccaccggtagatccacgttggctgagcggcggcgcgaagatcgaggaggtagtctgttgcgcagaagaagcgggcgtcaccgtaggaggcgccgctcatggcggcgacggaagcataatcggcagggtcgtaagcagacagaagctcatccgcagggacaaaggcaaggtctgcgtcaaaggtgccgatccagctgctgaagttggtgttttcgctg

SEQ ID NO: 9792 - DNA, 545 bp, Emericella nidulans
  unsure (1)..(545): unsure at all n locations
gaggacaaaatnaggccccgcccgcaccaacggcatnggnnagaagcaggagggaaaggggaatatttttttttatattatttggaagaagggaagaaagattagaaacacactcctcggtctcacccgaaaggaaaagagaaaaaaaaaaaaaaagaataggataagnggagaaaatgaagaagaagaaaaataaaaattaagaattattaatttttatataaaataacaacacaaataaatttataacatttccacattatataacatcaaaaatttaaatatactataaaacattcttatataattaaactatcttaattattaatattctatttacaaattaaataaaatacaatagcttctaacatcattatcaataactattttataaaatactcttaatataaaaacaatcacatacctcatctatttatctactttatattatactcacctatataaattaatataaattataaaataaactcatcttttatactacaaataattataaacaattaacttacttcctttcctaattc

SEQ ID NO: 9793 - DNA, 550 bp, Emericella nidulans
ttactttgttgctgtggtgggtcagtcttacctctttctaatcattcctctctccattcttttaccctcataactcatttttccttaccacctctctacatccttatttttactctatcaacctcatcatatcactcacatattatctcactctaacactattactctacctttcctacatcctcctattcacctctttacatttatcctctcaacaccactctaatcacattttcacccctaacacctctcataacccatcctttcctaaccccctttaccttccattaccctatcaccctaatcacactcttatttttatacttaatccttaacttctattacaatcactttataatattatatctccattcataattactttctatctcttcattataccactatcactatacattcctcacacccatattccatcctatcctcacattttacattatcctatcattcctcaaccatacattcctctacctcaactccctatcactttttcacatctatcacttcctaacctactcctttcaatctt

SEQ ID NO: 9794 - DNA, 589 bp, Emericella nidulans
  unsure (1)..(589): unsure at all n locations
ccattgactatgatattctacccggctgccttgcatgccttctagccctgcagctattggatatccttgcatgtgtgatttgtattactttttttgtttagattctttttcctcacattcgtataccttttcacctgttctatctcttttttcatatcctacttctatttcatacttattctatctcacattttctaactttctaatcttctcttattttttcacttttacttattcttttctctatatcatcttctctcttttccataacatctcttcacatcatcttcttatttttataatttttctctttatattctacttcttattacattactctactcttaatcctctttttaacttcttctttattcatacctattcctctatcacttctcataatatttcttattttcccatatcctctacctcatttatttattatttttcttattctttcctctatttacatctcattacttatactttctatactccatatattattcttttactaactcagattattcccttttcctttatctccctcttaatttttttcttatcaanttttttctttttctcttcc

SEQ ID NO: 9795 - DNA, 655 bp, Emericella nidulans
gcaccaaagggatacggcgataagacaattgacggaccaacagccatggcagtaccctaaaatcagaaacgtcaatacgctccttacctactgtatccgctcaagcgggcaccccggaaaaggccatgccacgcaatgccaggccatgtgagaccagcaccacgatccggatcagcctcagcatcgcagtgtctcacatcaatctcgcttcaatctcgcatgcatgaccgtgaaacaaaatgaatttcagcctccattcattccaccccacccatccgaacaatccctcccaaggggttcctaccaatttcatcgtcaactatgacactatgatctagtccatggatagctgataatcatcacatgccctttacaaatctgtgatagagaaaccagcaagtaccaacaagaagattggatctgtaatccgtactatgcatcaccgtttgcagtttcatctcaggttgcagtgctggggtttggatcggctgatggcctgcatggtacgtaatgtcggatacaagatgggccctggacaggaacaggaacgagctagcggacgtgattttgctgcaggggacagagcgggccttctagcttagcattcatgtctggacagagtaacgtgctatctgagtctaaagttggatgagaa

SEQ ID NO: 9796 - DNA, 546 bp, Emericella nidulans
aatactataattgaaaatatactaaattaataagaagctagcagagtacatagctagtttaaataaaataataaaaaacataaatcgttttcctctgatggatagaaaacaaaatatgatttaattattcttataaagtgatggatttttttttatggttagggaaccaggaattagacattattacgctacttgagggtaataatattaggcaagaatataataatacaagacaggcaggagttatagagaagtataatagtattacattgtacaggatcataactataatatgatatgttataatatgtgcgcttcgaagaaatataaatatcgttattattattttcccttcacttttaataatgtttgataagttgtttatatgtattaagatctttggtatgtatgtagtagttattttattagagtatattttttgaaataaatatggtatttagatatgaggattaattattgaagttattgttttaagtttatatttattagaattgataaagtaatatctgttatagagtatgagag

SEQ ID NO: 9797 - DNA, 1188 bp, Emericella nidulans
ttgccaactcattggccatagccggtggatgaaaatggatagtgccgctgacaggccgatctgctgatatttgagatgtgtcttctcatattcctcaaaaatcgagcacgacctgtaaacggatctccccctccatcgttattgaaattcgcgatcagcgaatgctccgtgctttttccctggaaatgtccgatggtggttttctacttcaatatagcgcatttacccttgcataatcgaccggccggggcattcctggcactttgccgcaccgaagctagcgctgtagcagccaacgggctgtaagaagcctaaaatgagaagttgacaagttgaattgatcgacgatattcaacttccctgatttgattgtctgatgaatggccgttcgtaagggcgatggttgaatattttaagagagctctgcgagctctctctagggctgccggccgtctcatcgatcggaacaatcaagtatttgaaagaagaaaatggcatccgtttcagcaagcctcttggacactttaccgcaatgtgcggtcagtatagtcccttccctctggtacctccaaagctcatactcttacaggcggcgtgcgtttctacggcgctgagggctagcagttgcgacacgggagacacagcctgtctctgcacgactgcaaccgccctcgagtccgcattaggatgctacagtctgcagtgtactgtcaaagaggcactctgtaagatgacctgcccggattatccccgcttccctctgctgaccagcgcagcctcgacgaacatgacccggtcgacgtgcggactgcctgaagagagcgaggcgaacctgacgccagcccttgctggatctctaggcatgctggcactaatcatggtaggactacgcatcgggtggcggacgggaacgaagaagacagttggatgggacgatgggtttatccttctggccatgggatgcacttcatcacttcatgaacggactagacctgaacagggcagggcctgtgctataccgctgaactgcatggcctttcccaggatgtgcttttcatgccaccttaagcctacagcccgacggggcgtgaataccacgtcttgaacaacctgggacatcccgtggcagtaaccgtagtaaggttgcatgctcccctttatttacgaggttttgggcaaacagacttt

SEQ ID NO: 9798 - DNA, 1738 bp, Emericella nidulans
aactgcagcaggagtcaatcaacacgttttcaagctcgagcaagaagaatatgtgcgagagcagatagactggacctttattgacttctcagacaatcaaccgtgcatcgatctcattgaagcaaagttggggattctttctcttttggacgaagaatctagactgcccatgggttctgatgaacaatttgttactaagctccatcataacttcgctgctgataagcagaagttctacaagaaacctagattcggaaagtctgcattcacaatatgccattatgcggtcgacgtgacctacgagtcagacggctttattgagaaaaaccgggacaccgtcccagacgagcatatggaaatcttgcgcaattcgtccaacaactttgtgaaagagatcctggatactgctgcctctgtgcgtgaaaaagattcagccgccgtctcatctaagccagtcaccgctccagggcggaagattggagtggcaattaaccgcaagccaacattaggtgggatcttcaaatcatccttgattgagctcatgagcactataaattctactgatgtacactatatccgatgtatcaagcctaacgaagcgaaagaggcgtgggtatttgagggcccaatggtcctaaatcagttaagggcttgtggtgtcctagagaccgttcgtatcagtacagccgggtaccctacacgatggacttacgaggagttcgcgatccgttattacatgctttgccactcatcacagtggacttcggaaattaaagatatgtgccatgctattctaagaaaggcgcttggtgatgccactcagcaaaagcatgacaagtaccaactgggcctgagcaagatcttctttcgggctggcatgctcgcattcctggaaaaccttcggacttcaaggttaaatgagtgtgcgatcatgatacaaaagaccctacggtgcaagtactatcgacgcaggtatcttgaggcgcgcttgtcagtcctcgccacccagtcgttagtcagaggattcctcgctaggcagcgcgcagccgaaatacgtcgcatcaaagctgccacaactattcaaagggtgtggaggggtcagaaagaaagaaagagatataatcagattcgcgataatgtcatccttctccagtcgctgtcaaagggcttcctttgtcggcgcaacattttgaactcgattcatggcaatgcagcgaaaaccatacaacgtgctttccgttcttggcgccaactgcgtgcatggcggcaataccgccgacaagttattattgttcagaatctttggagaggcaaaaaagcgagacgggagtataaggtcctgagggaagaggccagagacctgaaacagatttcgtacaagttggaaaataaagtggtcgaattaacgcagtacctggaatcactgaaacgcgagaacaagtctctcaattcccagctcgagaattatgagactcaactcaaatcctggaggagtcgtcataacgccttggagaaccggtctagagaactccaagccgaggccaaccaagcgggcatcactgctgctcggctcacggctctggaagaagaaatgagcatattgcagcagaaccatgctgatggacaagccactattaagcgccttcaggaagaagaaagaatctcccgagactcgatacgttctgcaaaccaggaactggaaaagctcaagcaactcaatgcagaaactaagagtgag

SEQ ID NO: 9799 - DNA, 1834 bp, Emericella nidulans
gcattctccgtttggacttggaagcagttgtcgttgtcactcgtcaacgtttcttttcttatgttcttttctgatgttttctttttcggccacctggcgccgccggactcgacggtggaaatgatgaatggtgagaaatttggagtactgtaggatgatgatgaatgtccatttcacatgccggacttttgtggaatggatagttgtcatgatttgaactgaccgcgaacaaaagcgatctattctatttttctcctgcttattggcagagtacacttcatttgcttgcttgctagtacaggagagggctctaggtcgcgaccaagactgagactagaccggaccacgacgacgactggcggcctccctcctcggcaatttgaggttttttcgtacctgtgccttttcataagttcactcactgcctcggaaaggcctctgcctgctgacgaaccgaaccgtcgtcgtggcagtggcagcgggccaatcacagtgcactcttaaatgagacgatgagcatcggcattattgacaggtttcagtgtttgatgcctctgtcctgctcactgcccgtgtttcggttggcgtctcggttggagtctccgtaggctgctccgttctccgtccggagtacagtgctcaaccaaaccaaaaataaaaaaaaaatcaaaaaaaaaaaaatccagaacacagatcggatgcgagtctggtctcttgagcgataataagatcgggtcgagtgtcgacactcaatccatccgtctccctcccagcgtctctgcctctgcaaaagtcaccgcgaagcttcggcaccgctcacattcgctgggttgtcggtgagataatttgactttgcactgacatgtaggtctgggagacgaatgaagaatcctgctagccgagagtctcttgccgcttcgacttggctttcgtcgtctccgcctgcactctgcgtcccaagagcagtgcacgagaaacattaataattactatacctatctcgggcacttaccgaaacaggtcgcactcggcttagatctatcttggaccccatatcaatatgacgagcgatctcatgcattcatgagggactgctgaacgacctaggccctcggacctgtcccgtccagcggcacgaagagtcgaaggccttagacggagacccagccatcaggcattttccttgagctccactcttgaacgatgcataatccgataatcacccgcttatagtgagtgtcagtgcgcggggaattattaaccactgcaagtctgctagccggcatgaccagcagggcctgactggcctgacatgacctacaggataatcgctgaacatcgtcacccttgcaagttgaagtgaggttaaattggctgatgtctgttgatccttcggtcccggtctcgacctgggaggagacgtctggacacatttctgtcagggcctatgcataaccacaccacttgtcccaattcttcgagagacaagagtctcgacgagccttatgaaagcatgatgggtctgtactgtccggatggtggggccgcgctgccggttgccttcgacttttcagtcctgcagcgaaggctctgaatgcccgcctgcttaggctcaggttatctcccgtatgtttctagtcctactctgtcgtcgtgtttatccgtttctcggctggataatagtgccagatagacggctggtgcgatcagcagtgcaagagctaaagcaattgcgcggaggagacactgtgtaatcgcccctagctccgcgccccttccgtcgcgccccggcgagcgctaagcaaaggaacgtgcattttggatttctcttaaa

SEQ ID NO: 9800 - DNA, 1788 bp, Emericella nidulans
tgtacattcccttcatactatcggtgatgaacaaggttcttccatcctctcccccgaagcaacagttggtcagatttttccctccttcaggggcagtaacaatcctggccttggcagtccttcgctgtctacgacaaagacgctccccagacttggatggcagattagtacgttcccctcctcgtcgacagccagtccatccggacctgcattcccaaacgattgaaagaagagaccaaccttggtcgttgtcccgtctgcatgtagcggtagtcgccagacagcattcgcgcgggtcatggcaacatagaggaaccgctcgtttggagacaaagcaagcccgttaggcgagatgccgttcgagacgaggctgtcgagtttgccgctcggtgaaaaacggtaaacgcgcccagttggatctgtcagaccagtctgcccctggtcggtgaagtagatgtcgccattcgaggccactatcagatcgttggggcccttgaaacgctcgaggttgcgccgggtgagcagcggtgtgatttcattggtgactgggtcaaacttgaggatgccctgtaggttagctatcagcttcagctcttctatagcgatgagtggctggattgagcacgtatggtatagctacctgcttgtaatcggccaccactaaccgcccattattcagcagagcgagtccgttcggctccccatcgcacctcacgcactccgtcaccattctctcatcatcgggcttgttcatatcagcccgcagaatccggccgtatggaatgtcaaccaagtacaaagctccgtctgggccactgaccgggccctccaggaaaatgtccgacggagggcccgcgaagccgccacgccactcggttggctgcccggagcagcgcagtgagtccggaatacggaagaggacttgtgcttggatgacggggggtgggggatagaagttcattatgctcttggtctgtccttgctgctcatggaaaccggcagtgtcctgcccgtgcgagagtactaatacctgtccacatcggatttttcccgaagaagaatggggtcggatattcaactagcgtccgatatctggggcacagttggggtagagatgatagtgtaagccaagtaaataccataaggggatccgaggggacaaaccctgcaccgttcttggtcgtactcttgtcactcggcctaccatagccagaacgccatgggactcatcgctgacacaaaaaaggcctttcgagaaacccccaagggcatcttcaacatctatctcttcagcgtgacttggatctttgccctggctggtgtcgccaaggggttcgatgaagggttgaattccctggtcctgcggctccgcaaagcgggttctaacagtggacaggaaatatcgcctccatcgtggtgcaagcgcattttaagaaacagtttgatattgaccacctctcagacgacgagtatgccggaacgaaggggtggattgtgtcaattgccactgctggcgcagtctttggctgcctgtgcgtgagtgctgagcatccgtatacagcgaacagagtgctgatgtctgaatttgcagtccgtccccatcaatgaccgggtcggacgccgctggacgctgcggctaggaacactcgtgaacatcactggtgtactggacaggggctgtccggcggtagtctcgcgggtctgtatgccagccgggtacacagtggcatgggtatcggtgtcacaacgattgtcccgccagatgggatctcacaaatatcgcccacc

SEQ ID NO: 9801 - DNA, 1613 bp, Emericella nidulans
ttgcttgcatttcaacagtacccgcaaggccgctagtcaagaattaatgctggcagtgaagtgccctaggggttttgatatacattagcttacagcctccttgaaacatttactgcttactgatttcattgatcccgccgttggctaatctgctcttgattgcagctatgagtcctttgtcctcgcgagcggtgagaacaaggtcgaaatggaaattgacacccgtatggatttgccatatccgtgtagaaactcaaccttcaatgatactgatctttttctaggaatcccatcatctgccatcttcacatttaacaaagaagaccacacgctcggaaacttgattcgttcccgtctgctgcaaagctctcatgtcctcttcgctgcatacaaggtatggcccccttgatggcgtgttgcgatgattttcgaaagcaactgctccatattttatgctcggctgctccatactgacccaaaaatcaggttcctcatccgctggtacctaaatttatccttcgtgtgcaaacggatggagatatatctccaaagcaagctgtcattaccgcatgcaacgagctagtgcgtgatctaggcatcttgtcccgggagttcactaaggaatacgaattgcgtaaaatggttggaaccacacagcagcaacaaaatggtgtttcagatgcaatttaattggtttgatttaaggtgaaaactcgttctcgtgggagtagcatgggctttcttaagtttagtgcgcgcacgtggctatgcgtgtctgtctccataatctcacatgtcctaacacttgagcttttctttattttatggagctaggtctccattatcttatgctctatgctacattatggacccaatgacatgattgacaccgacgctagcttcgaaaatttatgtcagatatttcacctggtaataaagcacagtcatgattgaccagcaatggccacctaaagctttgaataactcgtagataatagtttggaggtgtcgtgtgtacctgctgactcagctcccctttctagtgaacttagcggctgcgtgtccctgactccacgaggagcgaagcgccggcgtcaccagctcctgaaccaacctcgctgcctgcccgccattcattcccctccctccgaatttctaatcccgcttttgtccatcgctttatttagttgccttcgactgtgcgatttaatctgctgttgatgccggtgcatcttaactaatgtattcttcctcgaattccttcctgggcggtgcaacagcacccgcccaggacagcaaccttacatgcagcagcaacccccgttctcgcaattcggccagcagcagccacaaaaccaacagaccggacttgcccctcaaccgacagggtataatcctcagttttccgcgcttggagcttctcagttgcaaccacaagcaacaggatttcctcccggacagattcagcctcagtataccggtttccccggtgtatcaccacagcctcagcaaacccagccaacagggttcccagcatcaccgcagcaaacccagtacggcggatttccatctctgggccaagctccacagatacaggttacgtcgaacacgaa

SEQ ID NO: 9802 - DNA, 1027 bp, Emericella nidulans
ggagaattgaaaggggactggaccccgacgacttggagggcgtggtttttgtcgagagttgcacattgcggctggccttgaaatgcggagaagcgagcgcggatctccaagcccggcgatcatccccaattacagcttgcgagctaaggtcattcgtccacgcggtccagggccaaattgaatgctacagtccattgccacattggggttatatagcattggaattaatatatgtattgatgcggcgaggcaatcatatctttccgttatgcatgactttcccagactcacgctacccccaccatagatcatacgttgaagctcacttctttccaaagaacgacatgatgttcccctgccctgctttggtcccaggttttgccttcggagcactcactcctggctttttcttgggcggtggtggtgtaggctcatcctccgagaatgactcccagctcggttcctcgacagttactgggaaaatattaggtaaatccggcatttctccgagtagcagcatagactcaccgaggtagccttcgctatccttcttaactactttcttcatgacttgccgccgtcctctgcgacgaccgcctttgaccgtggcttcaaccttgaggtcctcttgcttggggggcggcttgtctatggtttcggattctgttggcggctctgtagcatcgatcatctcttcatcttcatctgcgctcattagtattcgatgatgcacaatgttcgagaccaacccaccgtcatcttccatcatctttctaagcctctcatctcgttcctttctgctttcgcgggtctcactcgggccttccttcctcgattctgggaagagatcttcttgctcatcttcagaagcatcgtcgacgactgtcatccgttagctaacatatcaacagattgcttggatgaatcaccatcttcggcaccgctagttgcagtctatcagacagttagtaagcacaaattgtagtaaaaacaacgtatagactcaccgactcagcagcagaggcag

SEQ ID NO: 9803 - DNA, 1149 bp, Emericella nidulans
attgtagtaaaaccacgtaatagactcacggactcagcaccaaagacagctgatgtggcaggatcttctttcttgagcttcggtttcgctttagcgaaagaactgaataagctgcctttttctttttttgccggagggatcttttcgttcgtcttcgctgacgaagcagaattctggcgttgcagaggcttgggtggttcctcgttcttgatttcagcttttcccggttgtaagggttcagattgggcaggtctttttgctggcaccgtactcgaagggggaggtggtggtcgtacacctgttctcctctgttcgacttcaagtcagcaagacaaggcttacatgatagttttctacatgtagacggagcgtaccatgacattcgtattttgaaccatcccccactgctttccgtactccagtggatcctcgtgcgcatggttaaccagcatctcacgactgacatcagtgagcacattgagatcctgcagtatggtaggttgcaggctataaatgtatatagaagatattgactcaaatgtggattttgcatctgtagcgctagttagtgactattagaggcatggccggcccgtcacggtgagtcaatacttgccttctagatcttcctcccgcgccagcagtacggcagatacaggaacttggtccgattcagtttccgggttgggcagcgagctgctgatataaggactgctcggcattatatcatcttcgttgtcaccgttgccattggcagtggctccgttcctcacgggttcgacgggcttgggcacccccgtgaggacataggtggcgtgcacgctggacggtttcttggagttttcattgaggtgaaactcatagagcattctgtccacatttaatatcatcttaaattttatgatttaattgacttactgcttcgcgagggtgctgtgtactctcaatgctcggcccagcgagcgatatgtaacctattgtcaagtcaggttaagaattgagtcgcaattttcagttactgaccgtacgacgttcatgaaagacagcttccgccaaaaacttcttatgatcagcgatagccatcctttgacgaattttggcgccgttgttgtatatcggagatgcaattgagcaggcactgtgatcgac

SEQ ID NO: 9804 - DNA, 467 bp, Emericella nidulans
agaggatgccttctcttctttttcacttgactaaatcacgtttcactaaacccacaattcccatgcacatttcttctcacaccatgcacgtccatcatgtatacacatcacaattcacacatcatgcctaggtttactaatcctgagtatatggatcaattacatgatcctatttttctattaattattataagtatatattaaagaatcaacataattgattgtgaactttcgattcctttataggcttattttgtggccaaaacggtaatctcattctacaatatactttagcaccactttggagacgcgttcttaatatgcactatagatgcatacacttattcacacacataataggacttcaacgacgcaagccaaagaacctagactacaatctatcgacacaagtacggaaactgaagctgctgaagattacaacctttgttcaagaactcaacttacgg

SEQ ID NO: 9805 - DNA, 1482 bp, Emericella nidulans
gcgcctggccggacaccatgagggactgagggtcttcctgttccttcggtaacaatcgaagggtactgatatccacccagcggaggagagataagagacccatcggccaattccagttggttgtcgaagaaagtggtgttgaacgactcattcaggggcgggtaaacaccctgcatgaatgcctgggcggatgcgagcacggccacatcaggcgtagaggtgattttgatgtcgtcgttgtccaccagataaggagagagattctcgatccttgcatcgggtctatcggcgccggcttttacagagacatatcgacctcggaatgccgagccgcttcatgaagttggtatgctccgtacggtgtcaatgcccttgaacgcgggaagactcgtggtatggtttctccgttgatagtatatgcatatactgcccagacccgcgccgtctggccgcttgctgcagctgcgacaactcccagaaggctcaggagtgcgaaagacagcccaaccatcatgttgccggtgcggtgggatgcattcttcacgtttcttccgctgggactggtcgacctaataagaataagaaggtcgatttactttcgcaaggatatcgcgacatgacgacatgatacggtcgtaaccatgttccaagattcaacttactttgccctattccggctggcggggtgaattttccgccgcaatcaacacgaattaggtcagagtgtagatagagccacatagattccgagcgtattactgttcggaaatcacgggcctgtatagaaaattctgctaatggacttcactttcgatttctaggattgtatgacgtgaagacagagcaaggttacattctaactctcagtagtggagttctacctagcccggcccggcgcgccctagataaccctaaatcaaagataattggcctgccttcgacgtttctcaacgagctatgtccgaaattttatctttaccaaggtcgaagtttcgtaggaactcaggcccattttgtgcgacatgagctgcttgttcggaactgtatccgctcgttccaaaccgttccatccgggcagttgcggaatcagtcttaggacctgatagatgcatgaaatagatggaccatcctgaacatctcacaaactcaaaaaaaaatttccaaccgtcacctgttataggcctggtaccgaatctccaacaaaactaccgtgctttctctggactgaatcttattcaccaccaccaaccggcccatactatcactgacattgctcagcagattaatccactccgccagctcaatctcacgctcatttgccaactgcatcagcgtcaagtcgcgcagtcgcgcgctttgcttcgacctcgttatgcacagctgagggttcaggcaagggccgcgttgtgagaatcatggccgccgattgtatcgcgctgaggatttgatattatactctactattattcttcattattttac

SEQ ID NO: 9806 - DNA, 1921 bp, Emericella nidulans
gacttgctgggacgaaccaaggccgaacattgcccggcagagcgggatctggttggcagcagcggcaaacaggggaaaatagtatgatgtggtctgcacagttagactcgctccgttggctcgttttattgggctatcacaagcccaaaatcatcagctacaagacatctccaagtccttcctttctgcggtactctatagggtgcggtggctggtgattgtcggacgtgtgccgagaacggtgatgatgcttcacgcagttccgcatccagcacgacccaagtcattttgggtcgtcttcacgagtccaacgcgattcgaacgcactaacgcaagcggagtcggcgaatgcacctctttccatgctaaggaaagtatgttaaggaaagcaagcctaaggtgaagtcgaaactcgcagccggtgcgcttaccggagtcggtcgatccgatcttacgacaggcaattacgctgtagtctggcttaccaggatgaaagtccaggatgaaggctgttgctgctcattggccctggtcgataagccagggagcggaattgtatgcgcacagtatacgcacaggatggcagcagtgttgagcttctgagtggctgcggccgtgaatttgccaaaggtgtttcgaagccttttccagctgcaatctgggtgcaatctggctgcattcctgaaggatctcgacgcccctgtacttttgtccgcgcgttcaatgctcaacagcgccacgatgcagaatcatccttcatcccgttgtcccatagggcttggatccatgcacattatccatttctccgcagttgacagtctccgcaggcagaatattggtccagcgacctcatggcacatccacatttccacatctccaggtaggggtgtcaaccttatcagtgttatcaagtggagagatcctgagctgaagaaatgtcgagtccaaagcacatcgtatgcccacttgactccacggcaggatcaatctgccgtctggagatccaggcacgattttgcacgactatgggtgctgtggatacactcagataagcttaatctgtctccagtacagcatccagacaaataagcaaccaaccccggtgtttatagagcacatcctggtcttcaattcttacagaagggatacaagtcaccgcagacggcttactcgatgtgggtatcccttaaacaagtcgaaccgatccttcatgcctctaacggcgcacaattcggcaaatcctacgattatatatttaatcttttaatctcgtaccgagtacactatctgcttccgtgttagtcctttatttcttgggttacgataagcgccagtctgtgatggtgacgtcctacggtagcaggcggaatatcccagcattccgcgcaggcacccttcatttcaatcgctaaacgcgcgaacgccgaaagccaaccttccatgtttaatgacgggatgtggcagatccagtgcgattagcacgccagcttccacgcactcccttgatcagtttaaccctgaaaggggccagcgccagcctaggttgcgattgtcagagacttcccctaacaggatagagtttaccgtccagtcatggttttggtaaactctgcgcaatgtgatacacaaaccttcgtatacattatccccgcggctgtgactggctcctatttagaaacagagttggcggctgagttccacaataaaatcgtcactgcttcttcggcttgatgtgggccttaccatggtggcggactcgacagctgatctgagcctgacggttctggtactcgacattttggttacagcacaccttgtagaagtgatgccacaccatgaatgcatccaacaatttcggattatggcaagcgaaaatgctgagagatttttttttcaagacatatcaaacgatgcgaccgta

SEQ ID NO: 9807 - DNA, 1569 bp, Emericella nidulans
gcagcttgtccgcaacggatacacgaaggagatgcagttgttgaccaagacagtagttgagaagctgaacgggaagaggcttgtcccgttgaagggcctcgataccgagtacctaaaggtgcatcaacttatcgagcagactgttacatttggagaaggtaactcgatgcttctccttgggtcgcgtggggcgggtaagacggccatcatagagagtattgtctcctctctgaagcaagagcacaagaacgacttccatgtcgtccggctcaacggctttttacatacagatgatcgactggcgctgcgtgagatatggcggcagcttggtcgggaaacgaatacggaagaggaagcaggaaaggtgaccagttatgcggataccatggccacattgcttgctcttctctcgcaccctgaagaattgcaggcctctgcagacaaccagaacggcacaacgacagccaagtcgatcgtgattgtcctagatgagtttgacctgtttgtcacacatccccgccaaaccctcctttacaacctgtttgatatcgcgcaagcgcgtaaggcccccttagcggtcctcggggtgaccaccaaagtcgacgttaccgagatgctcgagaaacgagttaaaagccgatttagtcacagatctgtctacgtgccgctgccgaggacatttgaggtattttctgatgcctgcttaggcggtttagatctcgaagaatctgaattcgccagcgccgatgatctatgggacgccaagtccgacagctggatgatggccctggatgggtggagagcgtatctacaggtaagaccacaggcttgtttcggcgtcagacttgtctcaaactcttgctcacaccacggccttgctctatagggactgtgggccgatccggccttccaaacacatctgcgcagaatataccacacaaccaaatccgtcggggaattcttcatgagcgcgctgattcccctcacggaacttcatcacagcctggccacttcaccaatcatccccactccgagcaccttttcaacacacgctctctcctgccccgatcccgcccctctccccttcctgccctctctctccacatcaccctcctcagccccatcctcccttcccctctctcttctcctcgccgcaacccgtctgacagccctatacgatccaggctctgctgaaaccgcagcgcaagatctcgccccactcgccctctccttccccgccgcctatgcagaatacgtccgacttctgacctctgcgaagacctctgcctctgtttccggggcgtccgtgacgccggggcgtgtctgggggagggatgtggcacgcgaggcatgggagcgccttgttgcttgggggcttgttagtcccgttggtggtgggagtggcacggctgatgggcggatgttccgcgttgagatcagctttgaggaggtggtggggctggttggtaaaggagggtcccttggacggtggtggcgcgatgcttaggttgatgtatggcgtatggcatatccaggcgcgagataccgaatgaggggctagggcctgcc

SEQ ID NO: 9808 - DNA, 2453 bp, Emericella nidulans
tggacattcatgtgttgtgttgttggtttactagcgctgcgccgatttggatttcttctcatctgggattggattgctttgaagatacattttctttgtctcataaacccgccctgtcattttcattaccatgtctttgttttcttctcatcctactgagtagatatacactacaccacaccatgtactaaaagctaccatgagcacctctctagatagatagattgggactgggagtgaggaggggtgaccgaccgactacagtaccgggttatgctatatcatatcatttgttcagacatcacttgctgcgcaatcagagtagaggcatcgtcttgctgggatttgatgaatatataactgagtggatgtttcgctgcaatatgctagataatgtacaagtccgtatcgatagatgactgcatgtagatagacacgtaaacaaatcatgcaaacttggtatggcacatgtaaggtggttagcatatgtgcatttatcagtgcctctctttcaaggacgaaggttcagtaagcgttgcggccgtgatttagcttagaatagccgatttccacacaacagatagttgaatgggtctgatacagccggtattttttgccaagtggaatagttatcggatagtattaacgcagtgatgattgcgccgatgagtcccattccgctaactttctatcggcgcgagccatggccgtccccattccaccgcagtctctttgctctggtggcgaacatgtctgcgaggatgccgggaatagctggctaaaagaagctggcctttcgtttcgtctggctgtcctttgctgttgcctggtcattcctacctaccgcaggttcggcaggatctttcgttgcctgttcctgaacccgcgcttcttctttcgctttatcttccgctgcccgcttttgcttctgatgccatagcgagtcttcgcgttcaatttctttcaaaactagcaaagaaaccgattagtgtgcttccagcaacagacccagaaaggaaaacaaaccctcatcccactcccgctcaaccctcgcatcgccagttcccaacatcttttcaacgtccacctcctctccccgctgtatcttcccaatgacctctttcaaaagcctaatcttcgcatctgtgctgcgcaaataggaattgtattcgttcttgagtgcaatcatccggattgcttgcgagccgatcaggatgaagatgatgatatagaaggacgctggattccattcttttgttttcggagatgacgctggtgatgtggatggggagcggttccggaaagacttcggaattaacgaggtccagagtgacggttgtgcgatcttgggaaggtgctcggttgttaggcgcgttccgtaagaacatgcttggaagtgggttgatggtgttcgtcgggggtgtgctggggagagaagtgcggtgggagtggtggtttttgaggtagcgcttggtcgtacgcgcagaaaaaggcgtgttgagttcatggcgagcgaggtaataattatgaaatattatgtgctttcctctgttaagacgttggaaccagttcaagttgaggttgaagttccgatgcgccgctgggataatttgcggaggcctgaatattaaggcataaacacatgtcggggaactgaacaaagcaaaagacactaagccgttttgaggcccgttgctgcgacaacgcaccccattgtggtctcgccgggcgaactccatcccgactctgtcacatcttcgatgcaggattgaggacggcatattagacatcactaacatacagactcatgatatagccagctatggcggttacatccttcccggccgattctcttgcttcaatggaatcggtgaagcagacggtgcgctcgacgtcaacatgctcagctgccaccgtgttgtcactccaaacactcttccgaagtgcaggggagatggaaacaacgttgaggaggaccgcacgaggcacgaaagccacggctacgaatgcgacggcgtcatcgcgggcgaagactacgcggacgaaatcgacaagcacgagcaccacaagaacgaaaacgccagcccaggatgttagcacctttacaagtacgagtgcgagccttgcggacacacggctttcaaatcaagaaaaattagttcttgctacagaagtgttcaattccacgctgaagacgctttcagatgccgtgaagacggttatgtccatctcgaaagaaaagaaggatgcgagccccacgaaacgcggcactaccacgaaaggtcgggtgaaaacgagccaacccgacttaacggataatgagaacggtgtgtcggcggtagcagagtgtgcacggttatccctctcatgtctcaagatgttgagaacggatgctattgtgaccgaagatgccaaattgcatcttggcaggcgcttgttgttgagccagtgct

SEQ ID NO: 9809 - DNA, 415 bp, Emericella nidulans
aggatccctcaagagttacctgtattcaagagttgaacaagaacatcaacaatcttagataaaatatctggcgtatccttacaaaacagcgggacccacggatggcttgaacacgtacctacacgcaaaaagatacacatgtttaactcagaccaaacgtttttagtataatccagtaagaagctagctttgaactggttcaaggtacataccccaagatctccatcatcgatacagtccatatgcgcatcgaaagcctcagtagagagactagggaagaccttgaagtagcgaggaattagctgcgacgcaagctgctttaccttcatactagtcttggacatcttaatgatcagcacgtgatcctcaacattctacgaacgagaaagctcatcaggtacagtgatccaacact

SEQ ID NO: 9810 - DNA, 926 bp, Emericella nidulans
tgtgggaggttctcaatttctccgcccaccgaaaaaggcatccatctctggggtgctggccatatgagcagtgtcgctatggctgcctttgacccaatcttcttcatttaccacaagtatgcctctatacatatgaattaacggacgacccttgacaattggtacagtaacattgaccgcttaactgccatatggcagatcctcaactgggagaagtggtttgacgacgacaagagcaagcttataaaggacaatgcactgacccccttccacaaagacgcagaccgcaacttttggaagtcagatgatgtgagagactggcgagccctgggatatgattacgaaattctccaggacgaactcatgattccatggacgatcggaaggagattctgaaaggcattgagaccctctacggaaagccgacggagaatctatatggattgcttcctaagcatcatggcgacagtgaagactatgttattactgtggtctatgacaagtgagttgcatatgaatctatttgccttagttctataattaacatacaaagatttgctttgaatggtgcgccgtacaagatcaatcttttcttggacggcacgcgcaactttggtgggcctgattcaaagggcttcattgccagtatctacaattttagtggctccctggaatcgtgtgcctgtggtaactgtcagcggcagaagaaggatggtgtcaagtgcattgcgcaagtgccggcaaccgtcccaatgcgccgatttatggggaaaactgcaactgcagtgcagaccaccagggatataagagacgaaccaaagcccgtatacctagctgtggacagtttgggaactgtaagtgatgctgatcctcctgagatttctgcggctgactgacccaaacatatatagcccgttcaaatggac

SEQ ID NO: 9811 - DNA, 1065 bp, Emericella nidulans
tcaatctcaggtagaggatgcctgatgcggtttaaactctcaccgacaacatatattacaccttactgtatcactgaccccagtgtttgtcaagacgtccaaacagtgcattctcctcttgaccagctcgagtatcgaccgatcgcttggtcgatccatcagggagctccagcgagcataccacactccaagaaataataccagggggtgaggaaagagaatatgcctcaaattccagccagagcgtgaagagggctgcgggttgctggcacttgtcggcgagggacggctattcgcatgaattcgaagccagccgaactgattgcgccattaccgcaagtcgccatgtcggactgatgccaaatggtctcgccactttgcacctccacatcggtatcaatcagagcaacctgagaatccgaggtgcaggaacaatctgagaccaagacaatcgccctagcaagtaccactcgggagtatgatcatgcctctattggtttcagttgcggcattggaatgctaccggccatatggatcggcaaagaatgtcctggataagagatccaggggtaagtggcggcgtctccaggggacgggagggtagctagaagggtccaatctgtcgtgctgcgttgtatgagcgtgttgtgtaaccagctgattcgtggtgaattttgagttccagctcagatgatggtttgatgcgtttgatgcccatcaccgtacagagttcgctagtgggttgtcattgacatgatataaggggcatggcggcgggtcgggaatggtgcgggtggggacacccttatgttaatcgtagatagggttagtgttagattagacctgaagccagggaccagtttgtttgtcgaagttatattgtctgtttgagcttggttgtaggggatcggacggactgttcgatccccaggctgggccatctgccagtgagcctgggggatcacccatcctcactaggtattggcgggacaagagacctggcccagacctgttgaggcggatctgaacatttggctgtgggttcgtgaagcgacctttctttgg

SEQ ID NO: 9812 - DNA, 609 bp, Emericella nidulans
ggtcatttactggccacaggtggcgccacacctggtgatttcgtgcgaacggcgttatgatgagatcgttttcctccttctcttttttctcttttcatcttctattctttcttttttctcttttccctttttattatcttttattcctacactttccttttttcttttccttcttttctctcttaatttttcttcatccttcttaactcctttatatcttttttttcctttcttacttttttgatttcttttattccttttttcttttcttccttttttttctttttctttcttctttatcttcattctttttcttcactccttctcctcttctctatcttttttatctatatacctctttccatgtctgttacacctcctcctcatttctttgattatttctctcctttcttccatacatattctcttcctctttctctatcgttactcttttctctttcctttttccactctctcttcctttttcacctttcctttctcttctttacttaccatcttcttcctctttttacttctatctcatcttttcttctctctatctcctgtatttctctttttttcttcctttcctatctcatattctctttt

SEQ ID NO: 9813 - DNA, 812 bp, Emericella nidulans
ttacatgccagcgcagctgtcctactcggctggagggattcaagttcggagcaaagagcggcaaagcgtcattcatttgcctagcgttcaccgtggaaaagggcttatatattcagaggtatcgcccattcgcgcacgattataactttcgaggtgattaggtggctctcggtcgcgtctccatcatgggttttctacgccgtcgctcgatgatgcaagccctcctgctcaccataatattctctgcctatgcctatggtgcaaatgtgaaaacaacagggcaaatggtttctttccaagtcaatctaacttggagcgattatcagcctgctgggattccccgaaagatgatcctggctaacggccagttcccagcgccggcgttgagattgaagcagggagacgatgtcgaattcttggtcaacaatgagatgcctttctccactactgttcactttcatggtaacctcctccttgcacaatccatttgaaagaattgctagggaactgacgcagtgtgccaggcattgagcagcagggtaccccctggtccgacggtgttcccggtctttcgcaacggcccattcctcccggtgaatcgttcctttataaatggcgagcaacgaactatggaagctacttttaccacgctcacagccggggtcagcaggaagatggtctttacggagcgattcatattctggctgatgattcgattgaaagaccatttgctttgatatcagaggatgaacaggagattcagtctatgagaagggctgagagcgaatctatccctatcatgctgtcggatg

SEQ ID NO: 9814 - DNA, 1466 bp, Emericella nidulans
tatcatcttcaagctgcctcgatgtctcccttctccgcttcacgccatatccatccttatcgcgaccgccgcgcgagccgctatcctgccgagactgtgacgccgcatcgtaaacgcagtcggttccatttttcgcgcagttcccgcaaatagggtgtactttgtcgcatttcactttccgtctccgacaggtatgacagctataactggttcggttccgtgtaatctggcgcccgggagcctttttgctagcaggtctgacaacagtcgatgcaggagatgcggcgtcagaggttggatcgtaggcgaagctgattgggatatttggaggcccgcttggggaggtgtcgggggtcggactggaggtcatggtccgttcggaatcgcagtggcggggaaattcggtctccaattcattgatgcaccgaatatctgggagccccttatgaaaagcggggtggcagtgaggatgttaactcatatagaaatctattcttccaaaagcgataacaattaacctgcgtaggtgagtactccaagcctcgcgaggcaaatgcagaaagaggagagaatctgagcagctccgacgataagctgggaaccgtggagaagcccacattaacggtcggccacggcccagccaatagggtacaccccagtacatagcagcagtgcagcacgaggactgcgataagacctcgtgggcgacaaacaaaacttattgtcctggaggctactgggtcatcagcgccagctgaccacaactacggccggtctagagaattatgctttagtcaaatggcatcaagaacacagcgaatatgcctaaacggagaaccaatacaaaagaacgcctttcgccaatgcccatgccaatgcaaaccagacattaagcctgccgcgcgagcgcatagaaaaagcaattgcccagtagccagtctatttcttcttcttatccttcttcttcttttcgctgcctcctgatggctcacctccgcccatcatacctgccaagtttcccattccgggtatttgcggcataccgggcattccctgcatattctgcatctcggccatagcgtcttttagagggttatcgctaaccccaccaccactatatgcggcggagtgtatgggcaggattttaccaattttccagccgcgaggcgcggggggggcatctggtagtttctcaggcattgggagtcctcgaatgcgcaaacggtagggcgattgatccgttgtcgggtgggctttgaggtactgcgcgatgaggatatagaggtggtgctctgggtggggttagcaataagtcgcggggctcaatttgtcgaagaaaccggcgagattgaaggtgcgccataaagtagacatactattcttgatgtgtgaagtaaccggttccccgttctcgtcctgtaattgcacacgaactcgccctggattcgcccagtccttggggtgta

SEQ ID NO: 9815 - DNA, 1569 bp, Emericella nidulans
ccagttcccgtgttagggtaccagcaccagcccaggaaaaggcactacctctcgattccacgaactactgttgatctgccaaaatggtaccaacacctagcttcatcctttactgccccttagggtacccgtaaagtcaatctctccctcggaccgaagaccttgagcgaactgattcaggcgagccgtctaccaagtagtcacgatttggagttcgtggtctgtctggagacaaattgtagttcctcggagtcccacgcagacctgtctctccgtaaccagagtcagacatgttatatctctcgtgcgccaggtgggagtcgtctatttctcgcggcgggtaccgctggctggttggtctcgctgcggcccccgatccgctaaacctggattctggtggagagtcgatatccccacccaggaatgagcgcctagacggtgtataagaggtcgtttcccgatatgactgtccttgctcgcggacggattggcgttgatgagtcacttgacgctcattttctgaccatctgtgaaatttagtagagccgacaagttgccttttgtacgcctgcccttctttatcatatcgcaatccttccatctgagccagggtctcatcatccacggttcgagcggctctcaaatagtcctcgaattcggcaatagtttcgtggactttgcgaaaatgctccgcggttagaatggccggagccctgcggcccttcctgccgttctcaaagaaggccaggcacatggcaatatgaacagcattgcggatctgccgtccattccagggtcctctctcgtgcaacttatagtgctcgtcgaactgctgcaggacaaactcccggatctcactgtccatcacagtgacatggtttgggcctgcagtggctccagggctcaatttgtcgtcccgcggtagtcgctgtaggttgctctctaggatcttcgccatatcagtgcggttcagatgcggatagaacaggctgaggtgcacacgcgaccggaaggcttcgtctagtgcgccaactcggttggtggtcaagaagaggaccccgctgtagtactctaggaccctgagaaacactattgcggtgtgagtgtgaggatgccttcatatttacatatctgcatctgcagcacaactggtccaccagcactgcctgacaaaatggatacgtacctgagaccaacgcattccgctctacatctgtccggtttctctgagtcaggaaaacatctgcttcatctaggagcaagatgcagctccacatgttcgcgtagcggaaaatcgccttcagtgacgtttccacctccgcgggccccgtgcccagatcgccgcaagtaatctggaataagggtttgtcgaattctagcgccactgcttccgctgtggcagtcttgccgacgccgggggcgccatgaagaaggatgacgagaccgcggcctttgccctcgaagatgtcggggacatgagtggcctcgtctcggttcaggacctgtgccgctctgtcaaaatgggacttgaccgcagctctaattatcatgcggtggctatctttgatc

SEQ ID NO: 9816 - DNA, 720 bp, Emericella nidulans
tgaggatccgccagaaggtctgccttatggccatggggatggtcttgcgcgggttacttgcctcgccgaatgtcactccgacgacttcggttcctgtgtatgcaaagcaggcttggatcatacacgcccaccagccgagtaggtagcctttgcggccgccgaggagatactgcccatatgcgccggggctgtgccagtacttgaagccgattttttctccagaaggagagccgccagcggagattatgaaacagcataggatgagggtcgtaataacaatgagcttgatgcagctgaggatgaactcagattcgccaaaattgttgatatgggtgacctggtattgtgagtagttgccatggcagatacgccgcttcagggctggacaaacattgggtagaatgaccattgcaccaaacactgtgatccagatacctacgttgaggtctggtctccagtagtgtacgatcaatcctgccgccgtcaggtttgtgggtatcgcaatggcataactgaagaaatagttccagccagttgcaaacctctgcccgtcagttacaactatctaaagcccatagatagatgaaggagcaccttaccccaaagctggatgtgcgtatctactcgcatatccagagaacccttcttcatgggaatataggctgcaatctctcccagggcagtcatgatgaagaagactgcaaaaccgatgagaaggta

SEQ ID NO: 9817 - DNA, 564 bp, Emericella nidulans
acttcattttgatccgaaagagacgttatcagtccagtactgtgaactcagaggaaactatatattggatagttgacacttgatttaccccaatatcgactgcgcaccggccccgtagcataaacagcggacgtgtttcttctcttgcagagggaagaggtattctacacgctgcccgcgacttcttccggcgggaaagtaaaatggagcattgaccggtcacctccgtactgagagtcttacgtaggcttaatatagaatggtggaagcctctccagtgttcgctatcccttaattagcagactgtcgatcccggtggagacgtagccaacagcaacagcaggagacgctcaattgcacaaacagcatgatgttcttccacattaccctggatagacccactgataggcttacattcttgcagactatggtcaccatgagaaggattacccgaaacattcgttgactggcatgtcttcgatctactaattctgtgttctacttgtaacaaccaaactaaataaccgatcaggaacataacactcggtccaccttaacctcatg

SEQ ID NO: 9818 - DNA, 1928 bp, Emericella nidulans
aagacttcaaggatctcagcagcgttgagatgatggatgtgctcacccgtcatctcctcaaatggcagcaagaatatggcaagttcggcgaaaggtgaccaatttcacccacattacactacgcacctttgacatccttaactccgcattactctgccccactctacatatcgtgactatgaaaccatccatgcctacgataccccaccctacctacgtcactcatttatctcatcaactataccgctcaacggcagacatgtacaatatgctacggctttggctttgcgttacttcgagcacaagcaccataaacacttacacaggacatcgggtttggcgtttatatttttccaagtatggtggtcgctccgtttcgatcgattccattgctattctatcatacctatactcctaggtcaggtgttttatattttccatattatttgaacatgattgcttgattggttgatttccattgatcgacaactcgaccagacatgacccggcgcggcgaggcgttcgtttcgtgtctttggctagatgaatttttggtgctcgcgcgcttgtctgtttgttatctgtgctccattacatgccatatcttcttttgggatactcagctacagtcatctattgatttatctacggtgtatggaatatgcttatatccaattcaatttaccattattcttcctatatcccgggcttagatgtgctgaggatgtaagaaataggtattaagagcagatagcctacctgtggatggctccaggttagacggtgtcacgctgttgctctaaatactgagtacagagataaaatcaacgacaggcatcgggctaggttgaatgcctcaatcaagtgcaaggtttcgacccatacggtgccgagcagcgcgacctgcacaggccctacatgcagccttatcaaaaaagtaaaatgagtatagttcaagtagaaaaacaatctacacttcattacgtttgctacatacaagaagaagcccatgatacaagtataaagttccaacgtttttccaaacagggcattccatcatgcataatataaatttccaacagatacacagcttgctttaggtccttcaagtcatcaatgatcgtactcgtgagaacaaaagaaaatcaaccaaacaaacaaatgcgggtgacttcattgctgatgccgtcccatcattcaagcagactaggtcgttttagagaacccctgtagacagcttatagacgggaagagtggatgatcttgtagtcaacaacgagctcacggccaccgtcgttaataaccagagcgcggacggagccacggccctcgaggaaggcgtccttgatgcgctggtaaaggttgccctgaggaatcacggggataccgctcttgacgtcgccagactcagtgagagcgacaatggtaccctcctgaatgtcaaggatgcggtatgtcttgtagaccgggccgagcatggtctggaccaccaccgagggcttagggttggagacgaagctagactcctcgtggagctcgcgagtgaagaggtcaacaccagtgtagcggcgctggtcagtcatgggggagctggagatgcggatgacctggcaaggacggccttggaggacaagaatgtcgccgacgcggataaagtgggtagggatcggaaccgtctcggaggtagtagcagcagcgccgcggggctcgacgatgcgaacattctccttgacgccgtcacggtaacgaactgggccccgttcgtcagtgacaattacttcttcgcggtggtggtcatggtgatcatggtggtggtgatggaaggggtgcgtaatgcggtcgacagcgcgttccacaccacgacggaaggagtggtagttaccgtcgtcgtcgtagtaacccatcatacgagccctgggtgatctcta

SEQ ID NO: 9819 - DNA, 503 bp, Emericella nidulans
agaggatccccacagcttggatacagagccggatgcagcgttatggaaagggaaatatgactactaccgtaaacaatacagttctcgagagagttagtcacaaattcgcttaccaaaggctgagatgagtggacataaagagatttggtttgctggggcaactccaaggtatgcttttatcacatggttggctgttaaaaacagacttgcgacaggcgaacgaatggcgaactggcaactaaatgcggatacgagttgtgttttctgcaagcaccctatggagacgcgagaacatcttttttccaatgtcctctctctaggagcatatgggagatactggttcgaggtattctattacacaagttctcggaaaagtggctagaagtgatgaaggaactaaccaacaatgatcatgacaacaccaagagattcatccttaggtttgtgtgtcagaacacgatacattccatatggaaggagagaaatgatagtaggcatggagc

SEQ ID NO: 9820 - DNA, 534 bp, Emericella nidulans
gaggatccccaattgatgttttttgctccaccaccttcgagcgcctgatcaaaaaccttggccaggacaggtaatataggagccagattgaccccatcagggatgaaaccgagtttaacaaaatcttttactatggcatcataatctcggtgaattaagtgtgcaatggcttcaatcattccgtacttctgatcatcagtcaacttggtaacaagacctgtcatcgaacagacatggataagatgtcaacaaagttttttctcatatcacatcgaatgcaactgtgctacccgaatctaatttttcactaataactggaactacaatcattaccaaaatcgaggatggctagtttcccgtctggggtacggatcatatttccaggatgagggtcagcatggaaaaacccagtatcgagcaactgaagcacaaaacagtaacagtgttactgtctgcacatcatcttgtttctaaaacaagagaaagtgtgcgagcagaataactagaaaagaggacagagcaagtccatacaga

SEQ ID NO: 9821 - DNA, 1540 bp, Emericella nidulans
tatgtattaatggtttcaagttgcagttaggtgtgaggttttggggagataacgctttgctgaacggttactggagtggtgttcggcgctatcgcatgaactgtccgtcgcgtcggctcgaaaagtggaagaaagacgtttgtaggaacagggacacaaagaaaatcggaaggatagcacagactgaatataggattgacgtttgggaagggatagattaggttgagtggtgagaggggatggcaaggagccacgagcgggaaatggatgacggcgagccggtcggagcggaacaaacgggtaccttatcggcacggggccccaacgtcagtcagcagcataaacggagcttatgtctcattaaacgtagatcatcaatctatcaacaaataatcacaatgctattccagaacgtccgaaaacatccaccagaagaacaccagcattagcccagatgccaccataccaacccgagagcaacaagagaaatattaacacgaaaaaagcgagctgttgccgagtcccactagtcaggctacctcaagtccgccggcgtgagagcctgtacaacacttgtaccttcgctgaatcttgtccggaaaatccgattcgcgttctggaacatgccatccttaagtgagacgacaatgaattgtgaccccttgaagcgagttttgatcaaacggccgatgttctgcgtgtgggacaagtccagcgcagcatcaacctcgtcgagaatgtacattggtgcgggcttgaactgcaggagagccatgatcagagagagggcaatgagcgatcgttgaccaccactcaattccgtcaagctctgcttccacactttacccaaagacaccttgacttcgagaccgtcggtaatatccttgccttcaggagggtccaacttggcgaaactgccgggcaggagctccgagaagatttggccaaaatcagcgttgaccttagtccacgtcttgtggagagcttccttcttatactcgttcaggttgatgatggtctcctcaatcttgctcttgtcacgaatgacagttctcatcatgttcttcaaggccgcttccttcttttcaacactgtcaatcatgttcatgaccttagggttgatcttcttcttcatgccctggaaccgttccgtgacgttgcgcagtgtagccttgcactcggctatgttctggttcttgaagtcgtataccgtgtttgggcgcccaaaattgtccttctcgtccgcaatccactcgtgctctgcctcaaggtgggctactgcctgctcggcggcgttctgctctttctgtaatttttccaactgatgcccaagtttctgcatttccaagccctcctcagtgatctgagagttcttggactgcatcgtttgttcaaggtcccgtagctcgtcgtcaaaacccgttaatttcgccctttcgtcatcgagatgcgcttgggcgatgtcatgtgcgtcctgacaagagttaattaatctcaacgacattgaggaagccacggtaccttgatccgagcctgctct

SEQ ID NO: 9822 - DNA, 542 bp, Emericella nidulans
gaggatccccaccgtctcggatagtcccaagaagcgagctttcgacggtttctgatgagtctgctcgctaggtggtggcggcgtaacgagggtgtagttaccaccaggaggaataatatcaatgcctgtataagacgagaacgggaaccttcgaagccaatctggtatcggtccagcaagatcataattgttggacaagtcaatgtgctgcagactagagagcacactcagatcaggaatatcaccagaaagcgtattgttagcaagatttaacgactgaatccgcttaagacgagacaacgaactcgggattgtcccgttgaacccgttgtttgagagattaacactagtgagattcttccaaacagagaaatccaatggcaaaggaccagacaagttgttatcctgaagataaagaaaggccaaatctttcaactcaacgaaatccttaggaaactcgccggagattagattggctctgagactaagaactctgagagctgagagtctgcttatagtgtttggaggaatctgaccattga

SEQ ID NO: 9823 - DNA, 1753 bp, Emericella nidulans
gcttgtcgcactcgatctgtcatctagacatcgaggtttctgttgtccagctcgataacacgtacatcatgtatggtttcttcaatgggtaccggatttgacagcaccggctgtcgcccggtaaagcatgcgggttcgaggaggatattcacgtgcccttgttcatccgtgggcctggtgtgcctgagaacaaagtgaaggaagccgttaccacgcatattgacctcgcgcccacgatctttgacctagcggagataccactgcgcgaagactttgacggcacgccaatccctcttccaagcgcggaagataatgcctctatacgccatgagcacgtcactgtcgagtattggggaaagtcgtaccttgagggggagaagggccctctgagtaagtgtaccagtttcggttcctgttgtagagctgactcgctgtcgtaggcaacccagagaacctcccattcttcaccaacaacacttacaagtcagtacgaattattggggagggctataacctctactattccgtatggtgtaataacgaacacgagctgtacgacttaactgtaagtactaacccacggtatggcccagtctaatacgacactaacctgccattccaggccgatccttaccagctgaacaacctctacaactccaacgacaagtcagtcatggtcttcggccacagcctctcgcaggtaatcagcaggctagactcaattctgctcgtgctcaaatcctgcaaaggcgctacttgtaccaagccgtgggaagtcctccacccgcgcggccatgtgaagaacctaaaggacgcattgaatccgttatacaatgcattctacgcagaccaggccagggtttcctttgatcactgtgagcatgggtatatccctgaagtagaggggccacaggacgcgctcccgttcacgagatatgggttgaattgggatatctggacgtgattgactagtatattaatcctacgataaaggataaccgagtgaaagaatgaaagatctcattgtgttttctgtagtacatttcatgatccattctcatagaaatctcgttaccgctgaatcaagaacatgtgggatcccctgccaggaaaatgtgaaaactgccgattgtaaacaatccccacagctagtccagattgataaggcgcttcacgagtcaaggtctggcccagaattgcttggaagttggaattcagcgagtggccgatggagaattatgattgcgccatagcgccatctgctgtcgacaacgccaaaacatatggtatacccgctcgcaacgaaatgctgatagccgacgtaaactcctcaaaagaaaatatgaaatattttggaatatataagacccagcggacagccgggataatctaagtatcgtgtcagatttgagctttgatttttctataccctacaatggccgcactcaaagaaccgtttgatgaggacgttgttgacactgagaagaacggccttgctgtttctgactcagatgtctcgcgcatggtaaaagattgggacgatcaggaggagaaaaagcttaagttcaagtgagatgcgccttttcgaatgtcttgtgcgtactgacccgagcagactcgacacaatcctcattcccattctcggcctcgcctttttcgccctccaaatcgaccgcgggaacatcagtgccgcgcttacatcgtccataaccgaagacctgaatatcactacgaaccagatcaataaaggaac

SEQ ID NO: 9824 - DNA, 972 bp, Emericella nidulans
tttatgacctgaaggttggccagacaggcaatccttgcgaagacaaacatcgaaggcttattcgtagccatcgcaccggcatcatgggaccgcgaccttaagcctacccttaagatacgtgcggacctcaacataatcatgtcttatggcctacccaagaccttactgccgaggagaaggatcttgtatggcggtttagatattatttaacccgagaaaaaaaagctctgaccaagtttgtcaaatcagtcaactggcgagatgtcggtgaagcgcaccaagctgtcgaaattttaccaaaatggacggaaattgatgtcgatgatgctctagagctccttggtccaacctttgacaatgctgctgttcgttcctatgctgtcgagcggcttcgtaaggcagatgacgatgagctacttttgtatctactccaactcgtgcaagcgctcaagtacgaggacaaagcacatgaagacgcggatatagctgctcacgactcctccctggccaactttctcatcactcgcgcggctaacaattttaaattaggcagctatttacactggtacctcatggttgagtgcgatgatgccggtccagggacactatcctctcaccgtaggctgttcgcccgggtggaatactacttcatggcagagttggaacggatgcaccccgaacacagaaaaaccttgctgcgccaaggtgaacttgtcgccgtgctctcgaaaataagcaaggatatccgtttcgcccgggagaaccgtcctatcaaaatcgaaaaactgaaaaagtacctcaaagatccaaagaacgatcttctacagtttgaccccccgctgcccctccctttggacccagatgtcatggttacaggctgcttcccggaggaatccaatgtattcaaatcatcattgtcccctctgctcatcaccttcaagaccactgaaggtagaaagtatccgatcttat

SEQ ID NO: 9825 - DNA, 114 bp, Emericella nidulans
taaggagactaaatactgtaagagatataaccgtgagaagaacaaaatagatcacgttgaccgcaaaaattaacatacatgatgccgtgataatggagtgtaagttaggtatgg

SEQ ID NO: 9826 - DNA, 1710 bp, Emericella nidulans
  unsure (1)..(1710): unsure at all n locations
tttgcctccggtaaaggcctgactaatcgctataacggctcgggcgaacaccgagttgctccattgactggccgagtgtacttgcggtctatggaagctgagtgtgttgtcattgcgctggagataatttccacactatccacaacacgccaacaagtcatgaagtctgaaacgaactggccccaatgatgatggaactggaagtaatcgactttgacacatcagtactctccactagaatgttaggaatgttcgaaagtcgatggtgtaccgattgccggtgagtagagctcacgctaccaaacatttgctaaaggatataggtatggggaagtaaagtactcagtggaaaagtccggtagcaattataagcgacgccaaactcgcaacctggtctgctgtatgcagccaacaagattcttagtatcagaccccggccacataccagctgttgagtcttgcgcagcagagtcttgctttcaatatcgacacaagtgttcactcaggactccaactgctgagcaatagctgctgaaccgtcagaaacggcgtctgaactcctgcgcgatgcagagctgaggcaggtgatacccatctcttttgccataatctcaatgatctcattttcgtctgaggaggctatgcatctgcgctgcttgtgctggggttatccctacaatgctattgtcttgcgttatgatctgagcattggttgtggacggcatctatgtagtgggactgacgcgcggcagagactggtggaatacaagggcaggcatcttaccagtcgacttcatggtatgactgctcaatacatgctggcagatgctcccataccttatcagactcctgttctgtatccgcattactagagccgttttataatgtagccaaacagctgtcgaaggatgagaccgataagattgcttcgaagaagcggtcagaacgactctttttacttttgctattcttttctttctaaatataattctcgtctctttgagtgatgccagaaatatggctaccttcagcttgcacgtgcactttcgttctcggcggctgtctattcgtgtcgtagcccatcatcaattttacaacccggtagtacgccaaacatttgatgcagttaagaaacctgcaatcaatgccgtctagccatttcatatatatatggatccagttgagtaatcctctgcgtatgcactcatgatcattctagggctcgcacgactgaaactcatcgtacgactctaaatgatctcactgtgggctaggatggaaacctggattataatactgctggtaagcttcgatatctttatataggttttctccttgtatcagatcgacactattccaccaaccacaggccactcaaacggactacgaaacctgacgaggcaaactccccagagtcatggacaaagagccagttgacaacagttttgcgcacagctcatctactttctacagttcgacaggctcagcgtttggtagacgtaaattgtaccttcccaactcaggcacttctaggaggctctggtgcgacaacctcagagcacattgtcatggggcagaagatgagtctcggctcgacttgtagctgaagcatttgccttttatccttcactccacagagntcagtcggcatgagaggaaagcagcgtaaagctttgcaattcttaatataccacccattctataaccggg

SEQ ID NO: 9827 - DNA, 1227 bp, Emericella nidulans
ctgtcccctgcccacattcacgtgcactcaaaagcagcatagtctgatagtagtatatccacatggccgtctctgagcgagtcatgaagacctgtcaccgcacgatgccagaacacggtccaccttcatattgttccaaaagaggactaatccttggttccgccttacaccaccgtaccgaatgcgacagaattgcgttgagtaaagcgtctgaatagtacgggccgttaagtttcatgtcccctttgtgttggaaaagtcagtgcgcttgtacaaaggtgctggtgacggcgttacgtacgagtgaatacgggcctgtagacgaagttgaagagtggctggatccagcaccagtgagagtcaagaaggtattgaaacggttcctagtacggcagcttggttagtcaacaacagatatcaaaaagtgaatttgcgcaaccatacaggcattgtagccatctgctcaatcgccctctcccgccatgcattattaaccagcctttccttacgaccgcccactcgcgtagcaagctgggggttcggtacagctgggttcaatgcaccgctcggaagttggaataaactcgtgggcccatggaaagaaactcgtccatcatgttcgactttgagcccttcaaagtccctcgataggccctggtcaccgctcatctcatcatctttatgattcgagctcgtggaattcaggctgttttcgtttgttgaggcggcagatgaaggggttcccgcggcagcatctgaggtctgctggctgcgatgttttgccagagcctcttctaactctgcaactcgcctctccaactgttttgtgtaagccaaagtaggagctctaaaacatcaagcgtcagcaagtgatgtaaaagatcggcagccgcccgaggatcggttgcatatattaatgcagagctagccaacgggaatcgggaagataagaacgtcggagtaagattcgggacggactccaactcacaaactatagacgcatggggtccctcgtgcggcgcatcgcgaacaggacggactggctccgttgcattttacctagagcgaattgccggtcagcgacagggaacaccaattcggcatctatccgagcagataaagaggacgggaagaaagaatgaaaacccactttgcgcttgcgacatccttcgcatgaaaaggcactctttctggacggattggacttcgatggcgcgtcgccatggc

SEQ ID NO: 9828 - DNA, 584 bp, Emericella nidulans
cgaggcgatcgagaacgatgtaatcatattcatgaagcagtccatacccgctgcagtatctgcgcacgtctccaacgccgccgcagcaaattactttctccacgaaggccaccggaccgtcatctcacaacgtgccctgcaggcatgcgcagacccatggctcggctggacggagattgacggcgtgggacagctcgttgcagaagtctccccgtatgctgttgatctggactggtccgaaatcaacgaagtgacggagatggctgctgtagtggctgatcttggacgcgcgacggcaatgatgcatgcagcaggggatgacgataaggtacactcggcgctagtaccgttctcgccagagcaggccattgatgctgccatcaccgctgcgggtggtgacgaggtctttgcaaacgctttggtggattttgcccatgaatatggagctcaggccagaagcgatcatcagatctttgtagacctgtttcggaatgggcaaattccgggtttgaaagtcgacgatgaggaatgatgctgagtatgtctagcacctaggtcgcctgaatacattactacagtattga

SEQ ID NO: 9829 - DNA, 1229 bp, Emericella nidulans
aagccctgttcttggctgtggctgccagacaacggtgtcttgttatggtctgctacctcgcgtcaggtttccccgcgcagctggtggacagcatgtaaacggctataaggccaatcactcacttttaatgaagacttgcagtgtcttggcctcaagctgtggagttgtctagctatctctattgctaccgttggtcagttctaaaggcggagcttaacgacaagactattaggacccgggccaagcaactagatagatggagcagggtccttgcactgcctcattcatgaagagtgttgactattgtccacgaggaattattataaatacgtaacgagtcgcagaagaccccagacagtcagcaatatattgtccaacaggattacgcagtcaacatgggatccaacgcgacttccaccgagcagcgaggtgaagagattctccatgtcttctccaaagcatttggcgacctccttgctgcagacccggccgccttccaggtcaagttcaggaagatggccgcctcagcgtttgccttttaccgcggtacggcatgtctcttctaccatgacctcgaggcgcagacgcagaacgacgtttttctggatgagcagtccagtcgcatctggatccatggcgatctgcatgcagagaactttggcacctatatggactcccatggccgactgatcttcaacgtcaacgactttgacgaagcctacgtaggccctttcacctgggatgtcaaacggttcgcggcatcgattgccctgatcgggtatgcaaaagccctcagcgaccagcagatcagccggcttgtgaggacctacgccgtggcgtaccgtgagcgtatccttaccctcgccggcaacgacacccaggaggtccgacggtttactctcgatacggctaagggtcccctgcttgatgcactgcgcaatgccagaatgcagacgcgggttgccctgctagactctcagacagagattcacgactacgaacgccagtttacactcggcggcggcgctatcaagctcgatgatgtaacgagagacaaagtaattgccgcgtttcacaagtacctgcagacacttccgcacgtgaaaccggagtcgagcgcctaccgggtcaaggacgttgtcggccgccgtggggtgggaatcggatcagccggtctccctcctacaatatcctcctggagggtaagagcgaggcgatcgagaacgatg

SEQ ID NO: 9830 - DNA, 508 bp, Emericella nidulans
ggaggatgcccaatgctgatgcttcatgatgatttaatattaaactgcttagcgcgcgtctcaagatcaaaccatccaactctctcattagtatgtaagagatttcactctctccttgcttcagtagagctttaccaaacccgaaccctcttaggccgcaccgagagggtttctacgtgtgcttacgactccgtactgattctaaacaactacattggttcattcttggccagagacaatatagttccagaaagattttggtccaaattttatctcccaattctacctctgcgggtattgcagtggttggtcctaatatcgatgccattggcggaggaataaagagtaatactttgtctagcgttatggtcatggactctcgttctcacacgtggcgtgaagctccaagcatgcgggtgccccgcatgttcccatcagtttgcacccttgatgggaaaatatatgtaatgggaggctgtgataatctagatgccacgaattggatgga

SEQ ID NO: 9831 - DNA, 1287 bp, Emericella nidulans
gcgcatgggcttggaggacattgttgctgaggttgagtgtgtgcaaaactaaggaacaatgtgctctttcactggaatagaaactggaagggaagagggaggagaagctgtatatcaatagaagagctctattgatcaaggtctctgactggtggaagaaatatctacgccaagatggtgaggggtcggtgctggcctgtctccgagaaaagggactctacggaagagaatctacgggataattgcaggattactatggcgccaatacctgttctggaactgccgggcctgaatctatgatcaatacctgcaccgttctgccctagacgggtctggcttcctgtccggcggactatatgtgtattcaactatataatacgaccaatccatagccagtttgaagcccacgtttggatatagtccctccagttattgaagaataccggttgctatgttgggctttagagctttgcctgagccatgccccctctcgccagatttgcccccccgtccagcttcagatcaaccccgttcctagtaccggccaagtcagcatctcaccaccaagtccatgtaacgaaacttacacataattcgccccgggtccaaccaagaacaggatcgccgcgccgatatcatctggcacacccaatcgctgtcgtgggttcgccttcttgagctccttctcaccacccagaatctcgatcaacccgttcgccagcttcgacggaaagaagccgggcgagagactgttcgccgtaatatttcttggaccgagctcaacagcgaggttgcgggccagatgggtcgccgctgctttggaaatggagtacatgatggtcccgttgtcgccgccatgggaaacgacggagccggcgacagagctgacgatgacaacgcgagcgggagacgagtgcgacccggccgcttcaaggagggggaggaatctggatggccgttagctttgactgtgatggtcgggtcccagggacagcgtacaagcgcacgaggttgaagacgccgcggacattcaggtcgacgaccttcttgctcgcccagtccggggacgtctcgaacggaccgccccatgtcgccccggcattggcgaccaggatgtcgagctttggctcgattccttttaccttgtcgaccaaggcctggatttcatcggtctcggcggcgcttcccgggatgccaatcgccttgccctggattccgggcagagcattgagctgagcgaccgcctgctcgacgccgggtgctttgcgcgctgttataataacggtt

SEQ ID NO: 9832 - DNA, 593 bp, Emericella nidulans
agaggatcccaccaatcaattgttatgacagttggatatgtctatgagtaggaataattattcttacctgtgtttaatgaggccagtgccaactcttacaaggaaaggtacaccatcccaacgtgcattatcaatatacaaggctgctgcacaatatgtagggtctacaccgttcaagatcacaccgttcttgtctcgggaactggatttatactggccaaggatgacatcacgcgggtctatcttgcgaattgatcttaaaaccttcacctgcagaagcaggtttgtcaccaagtcacttgacagaacaagagtacacaacttacatatataccataagacgattttgttctttacagtacaggttgaccttttcatttcggatatcttcaccatcgagacttatcggaggttccatggcaagtaatgcgattgtctgaagtatatggctgtgcactatgtcccgtattattccatatccatcagaaaaccttaaaaaaagcagtaggaaattagaaaataacattactgatttgtctaagaatgctgaaacaacacaatttactctcacatgcaaagaaatggtgaaaata

SEQ ID NO: 9833 - DNA, 1245 bp, Emericella nidulans
cctgtcccttcgatactcgccgagacagccctaaagtctgcagcctgcaagtccaactcggctctgtagatccgtatcgcacttgcctggggttgcttgagccgacctttggatggagtcttgatctgctctcgtctttgatgaacatccaacttcaagctgtccaaccgaaccttgatcccagtagcagtaacgatatcgtcgacataatcttcaggatccttgtgtttataaatgtgggcaacaaagagaggagccagaagcaacttatacttgatggtagccaaatgccggttgaatttcttgtttgtcttagtgattccaggccacagtcgtccctggcgaacgggcagcgacataacaccagagaaaagggaccaccagctgtagaaatgcgtaaagaaccgaggagttagatgaacagtattgtagcttgtagttggttgttcagagtccgcattccaattcttgctattgggagcaatgattgcgacggaaaggtgaatgtgattgctccggaaaccgcgataagcatcgtaatcctacaccaattagtgcattgcgacttacaattaggcgtatacacttacctctcgttctgaggggttgatatagtttggattccgcaggacaacatcatagtggggtctaaactccgtcgagcgctcattctcgttgacattgcgttcgaaaaccagaccggctgcccatttcacgtcacccgataacttcataatgaccttcttgaactgagcggcgtttttctgatcactagacattgagctcgtttcaaggtcttccgctgttgcctcggccaaatatctggcttcatggctgtagtcggggattgcaaggacgtattccccgctggttacgctcatgaactctttcggatcatcagttgtatggatattccactggacatccttacgccagcacatcacgaatccgcagccaaaaccggttacgacgtaaggatcacgagagcccttcaaccgcagatggacatcaccatcctccttccacttgactcggatacgcgagtgaaagctcagtctgatcttgtcccagaacccgactctttcagacgggtcaatttcgactttagtgaaaccctcaatgatcttcatcatatcttgaataacgggttgataggacatgccccaagatatgctcgtagggagattcgtgttgatttcaatgaccggatctgagtaagtcttcacaggactgacagaccgccat

SEQ ID NO: 9834 - DNA, 1107 bp, Emericella nidulans
tctaggtacgtatctatcgattaacctcttatatagccagggagcgtactctctaggtataccttccccaacctcgcccgccctgagcgcccggttctagcttgccactccaggttcgtaccaccggcgcttcctacagaagtagatgcgtttagtttcgattccctcttgttcctttttagtctggcttttcttgttctgttttcccagttattgtcatttcgttagcgatacctcgggaaatgggtcggcgtttcggtggtgcataggagcattcggaaacagttcataccgtggatctgagatgaagtgtctattcttgctatgtggcaagcgaaaggacaccttcatttctgaatatctagatggcgtgttggacatggaggactgatttttgtaattgcgctgcgactaagatagtaaacgcttgagtggaggagcgttgtcactagtgtaatatattgcggtcgatagagtcgatttagtgtgattacctgagcactcctacagggcccgccatcctagtaatcaatgagtgattagcatgattttgctcgttcaagcatccgtcttgtaggctgcacttagcatgcgaagagctatagaggataaaatatacccggtatagagctttcacattttacagacgtactaatggagagagcggccggggtagatctgaaaccacctacggctgcggttcggggataaactgtcttggcttatcatcatgctcacaatgcccgctgaggcaggttgtataaatcgagaatccaataatttctccctggagtctcctctcacggaacgccggaatgaactagaacgaacattactggggtgatgctcagcctcatcattgaaacccgcagctatcttggacgatgatgaaacaccgatcgttaaaattggtcttgaggggttgccgggaagaataaaacctgctgagacagcactttcgacgaaggagataacaatcttaagatacatagatgatcatctaggtatcagtagttataaggagacgacacgagtcataggctgtgctgcccgtagaagtatgagcagagtggcccagttctatttctgtttgggcctggtcccggc

SEQ ID NO: 9835 - DNA, 597 bp, Emericella nidulans
aggatcccagcaaagcgcaaggtataagaagatcggaccagagagatctgaatctttgtgaacagtctgattgattcgaaaaggattgagaatcgatctagttttcttccagatttgatctggatggataccgagttcgtcgagtaaaggctcctcatcctcaaacgaagcagagactcctctaccgaaagatgcagatgaagcgattgttccgtcgaatggtcccgccggcattgaaacggcggcggatccgatttcaaatggaatgaaagggattgaagatgaagcggaggattgacgtggtggttggtaaggagctgtgggaactcggcgttgctgaacatttgcggtggccggagatgatccactggtggggaaaacaaccggtggaattggaaaatccttcgtcatcctctagaatccctaattcagatctcgaatttgaagttagtgttttctctcaatcggatttgatttcagaaattgaaaataattccagtaacaggcgactactacgcattcttcgtgttcgtatcttcgtgatatgtgataagggcattttcggtaagtgaattaataatgttttgggccgtataa

SEQ ID NO: 9836 - DNA, 921 bp, Emericella nidulans
  unsure (1)..(921): unsure at all n locations
gggcaccatctggaccaggttcaataatccaacggattatgggatgtcctgcacctcgcaccctctttgctttttccttttgcctttttctgtttcgctgtgccccctgcgtgcttcagtccagaccaggcgagtcctgcagaggcggagtgtacacggcaaacaactgcagatgctgatgttgatgagcagaactgagaagtctaaacgactttctgggggcgctaatttagtctgatcggtagtctcgtttatcactggcacatggcaggactagacgctagtgcagaagtgcgagagggtctaggtcgggtctgggcctagaactcaaccattcgtcgaactgcagtccaagcctccaagccccgaaagccagtggacaggactgactgttgtggttagcgagagtctagagataggacatcgccgtgtgaactgtctaaactaggtcgcaagacaagaagggagacacacctagttagcccctgggcgccttcggctccgagaaaacgcagaagaagcaagaatggggccaggccaagcaagcacttaccccccgtttagagcccgattaatgagacgagatgggatgtgacgagtgaccagttaccaacccgtctggaaggtttttgaaggatcgagatgcgacttctatttttgccaccgtcgggctgagtcttggtgagttgagatcgagcagcctgacaggagaccaaaaaaaagaaaagagaatgtgaggatgatgcaggagagatgggggaatgagagaccaggcctcgagagacagaagggtgagccgggagagtcaagcgtcagagacagagacagacaggtgtggagcccacatggttggcagctggcagctcancagggcaccgactctgtgcttggtgtccgtagtttattctccctcactcttga

SEQ ID NO: 9837 - DNA, 1459 bp, Emericella nidulans
tagctaacgggatacttgcctccaacccgggaaacgcaccgactactccaagacaagcatacaacttaccatcccgggtctatccatcagagatgccagctccacggcaacatgcgaactactatcctgcgtttgatactaagtctcccgccttccaaccccctccagccaatgcaagttccccagccgtcgatacgaagaagatagaggatgatctacggcgaatactgaagcttgatgtcaatccaagtatcccatcgagtgaaatccaaagctcactcgcgtaacagcactacttgcggcttcaacactggtcttaccttcgagcagtccttttcacggcagatatatgggcgcggctgcaacgtgccatcctctccttcacagactcatcagggagtggccactatttccaataatctgtcaactccatccgggtgtcactcgtcctgggttctatgctccttccctattagttacttcctctagcagctagattcgtgacattatttcggtgttttggtatgattcatcttaatagcggctggttttgtgattggtgaggttgattagttcgtcagtgaggaatgcatgtatacccctggtagcatcaggcctggagtccagtttcgttttgagcgttattttaggacacttcgcgaagggacatgttgcagtcgcctttcctacgaagaacacctcagtttgcttgtggtgcctttccttagcactaagtattcttacgtttcctctaccgtcttggctcgacgtctcctgtttgtttatgtgcctggtctttttgacatacgccgctgtccacatacgctatcatctgccgcttccaaaaatcaaagtggcagtagtttgtggtgacctctggtactgtttgtttcaattgtctttgtgtggtgcttctcacattgtctacacacctgcggctaggtcgtttggagttcgatcttttattacgattcctatgtctgatcacatcagtctcttcaatacccatcattctttactcttacttatataatctcccctaaacatacggatattacggataatacttcccaattcagtcattaatgaaagccttcgcgaccttgaatacgttagtataaaacatggcgagctggttaccgcaattggctatatgttgcgggcaggaatgcgcgtgtttcgattgcaaggcagtgactcggtcaatcagtagcaacagtgatacaaaaacaactttggatcgcctcccctggttggttacccagaaatgcgcatcaattataatatcaccctaagagtgaggacattgttatcaagtatgccgtatctaaattctagactgctagtctgctatggagtagtagcacgtagggcgaaacggcggcgaagggctgtggagagatccaatcagtccccgggctccttgccaggggtcgagccgaacgaagagaagaagatt

SEQ ID NO: 9838 - DNA, 1482 bp, Emericella nidulans
  unsure (1)..(1482): unsure at all n locations
gataatatcgactcactatagggatcaagggcttccaggccgatcgcgagtggcttttggccaccccattgttcaacagctgagtcgaaatggcatcggtgtcaatagcggacggcatgatgataatttggattaaagatgaacttcttgtttcagttaccctcaaaccagcaaaggccttttttattgtctctggatgccatgagaattcggaactttcctaatgcggtcagcccgagagggctcggtgggagcagtcggcgatgactccgctgccatcggcgccttgagccccttgtcgcgcggccagtgtctgggtatgtatggaagaggcattgcagcgagtgcaggaatctttcacctcatctcttctcacaatcaatcccatcattcgagtgtccacgttcccgagccgcgaggtcaacgcaaagatgcatcaattcagccccctggacgcaatcatgcccccgatcttcaacgcactgatcgtgggatggtcatgtccagaagagggtcgcgattctctggtctcggtgttacaacgctcgttggcccttgtcgtcgaagaatggcctgatttggcgggcgagatcgtcgctcccccagcagacgccccgccacgaacacagcccaccattcggcccgtgggggagcttggctcgcttctgactattcgcgatttcaccggctccgacagtcctttcccccatagctatggccagcttcaggctcaagggttcccgaccagcaagctcgatggccagctactggccccctggctggcgtcgctacgacccagcgcgtcatggcagcgaagccaacttcatccccggcggctgtcttctctcggttggattctcacatcaatttcaccgatgcttacggtgtctacctgattttcgagaagtgggcccagtattgtcgacaggtccaaggcctcccggcgcagcctgcggcgttccctcacgcaacgtctcagcctcaaacattgccacctcccgtacttcaggtgtcccatgaccatgccgccgagcagtactcgaccttgaagcataggccggagctgtggaagctcatcggtctggactggcgcggatctgccacctccccaccacctgaacctcccttccagctcgcagccgggggcgcgaagacatgcatcttctccctctccgctgcggctcaggcgactctcaagagagcagcatcctctctcccttcttcctctctccccccaatctcaaccaacgatgcgctagtagcctggatctggcgaaccatctccaaagcccgctttcccacaggcaagccagatgcgccgtatcgagacaactcgtacgtctccgtcgccatcgatggtcgcaggcccctctcaatcnccgctgactatgcggnatacgtgttcttctgcagcatgaccaacatgccgattcacgatctcaccaaccccgagaccccgcttggcgagatcgccgcgcgcat

SEQ ID NO: 9839 - DNA, 1576 bp, Emericella nidulans
gaggcagattcccaatctctgtcttccacattcttgtttcatggttatgtgggggaggggatttgcgctggttggggggccatactaacgtggaaagcagtacctctaatcgtgataaacacaataatcatcgtctacgaactcatcctcggatgacctgacctctcgcaagcgacgtctcgccctttctcttcttcacagatgatttgtatttcctccactcgcgccgcgcagaaacagaaggataggcggaacaagaaacaatacagcgtatcgcactgttccagtaaatcactttcaacctacctaccaacgaaacttgtcacgtaccgaaacactgctgcctagccttacttcccgttgcgcatttgtggaaaggccccattgatggagaaggaaggaggcagcatctgcttaaacggtaatactatgccttactgccgggtttacatgaggggtttctcagaagctcccgctgaagccagaaactctacaggctaagctgattttgctacgcgcgatgatttggtggtatactaaagtactctatactatcttgtcttagcgcattattcggatggatgattatatgaacacgaaaatacgtattcattctgttcggcttaaacccagcattccacaagctactcgtaggttggggaagaggtctaagtaaatccacatgatgcagatgccctgggtatgagcattctctcgcgctagaatctcagactgaggaagcgatgactaagtaacgcaaagcgcatatttattcatctagaaaatgctaagaataccctacttgtccctcgacccagataccctagctaagtaaatccataggtaccggactgtagcgacagcctttgcttgaagaaatgaagtcttctgggcatatattgtgtgtcaggataataacagaaagaacattacattcgccccaaacgccctattcgccgagctctgtgacccagacacggatatcacaaatagatggaccaagcgcagagaatagacgtagataaacaaagatctgctagatctgctagatcgatatgcgagtcaaatgccgcatgatgaatacatgcacccatagccaggagaaaacatgcaagtaacacatgaaccggacagtgttcatagcagacgtgttgcatatgttcgagtccagctgtgaagggaaggggatggaggatgagaaatgtgatgatacatcgaggaatatatgtacgttggtggaatgtatgtgcacaagaggtggataggccaggaagaaacggcacaactcatgatgagaggatattaaaggacttctttctgaggctaaagcttcgccacttgccatgactcgaccggtcgtgctttgagtttttaatatgttcctgttctgtaggaaccgcaagggtatcagcgcggggagaacctaaaagatcgtcattaagtggctgtgatgctggtcgcgacaacggcgccggcggtgttggtgacttcggatgcgtttgctcggactcatctgggactttgctcagagtgtgatttccattcggaagcggcgggattcgtgacagagatgtac

SEQ ID NO: 9840 - DNA, 1380 bp, Emericella nidulans
tcccggcgcaaccggccgggtgacgttcgcgaatctcagagtcaataatcattacatgccaagattatgcagaattttttcgatgcattcccgatgaaaagccaggagtcggactcggcggactccgaacgaactctaaggccaaggcttatgcctaaagcggggctacgtacccgagttacctatgagacatcggggttatattcgggcgtggactcgaggggttagaactttgtacaggtgggttaggctccatgttgagagggccaggtggaagtgtcggctctcccagaacatatggatgcggacgggcggatccttggtcgctggcattcgcatcagtatggcgtcatgaccggatccagaagggaaatttattacataggaagttgttcggtgggaatggatggtgtggtttgtggttcaggtgtctagctctatatctttggttctagcagccctgctgaattgtccaacaaataagcaaaacatctctacccgtagaactgaaaatgacataatttttgtccaaattctaagctgtatcgtgccacgtaatataatgaaatgaagaataaaatcgtgatagcctgctagccgggagatcgtgtagcccgcacttcaatcaggacgaatggtatcagtagccaacctgggaaaaacaaaaaaaccatcaacaaaaagcactgtatgcttgtgcgtctaacataagaatgagatgagacatgagatgtcgaccaaacgccaaattgtttttcgccaatcctttaaggtatgattgttctccgtctattcaatagcggaggcgttgttgccgtgcaggacagggttgaccttggggttccacttcaacttgaactcctggcccagctccttgcgcacagcggccttaacggcctcaaggacgttagggaagacgccgaagttggcggggttcgtctcgtcgttgtcgccgccctggaaaacaccggtgcggacaaggcaggtgttccagccatgcatgtttccaccgcaaatgtcggaggctgggttgtcgccgaccatgtagatgttctcagggagtgtgttctcgttgtggatttgctccatccacgatcgcagaacctcatctgcgtacttgtaggtggcttcttcgggcttgccgtagacgacacgctcaagatcgaggccggtcagggccttgtactgcgcttcaatggagatacggtagagaccctgcgtaagacgggtggggcctttgtggtctgtaggcatgatcaagtcaccctgggagaagtagatggggatgcgaccctgggtgaggtcttagcgcgcgtgaggagacgaccgtcctcagagagcagcagatccataatgatctggaagtcagtctggtagtcg

SEQ ID NO: 9841 - DNA, 161 bp, Emericella nidulans
atttgatatttatagataattttacagacctattgcggatactaagtagcagatcacaaatttgtatccatttaacaagaaattatgcatggattagatatatcatggcgaattcttcagagaaaattgtgacaaccacaaagggatctgataagtgagat

SEQ ID NO: 9842 - DNA, 977 bp, Emericella nidulans
gaccaagtagggaatctacgcgaagaggaagcgatttctattgtactatttaaggctctggaacaggttaacaacttgggcatactcttctcagccattctcatcttggagtacactggtgcctaccaagtacatgtacgtcctaaacctccgaacatgccatccccgcatctccacaaaacctccgatctcagctccacagtgcttaatgctcctcaacagaacctattgaggcaactacaaactatggaacacttcacgattagtaccgggtactcttaggatttagttctctgttcttagtataccgtgagcttcatatgattcatccataaaaaaaagaacttatgttggctaaagaacgaggtcgaacgtgggttacaacgctaaacctaaatctagcccgtgtagaagggtggacaaaagcgcctcgccagctaggtgcaagcatactatctgacacatcataaaacaagagaaaagagaacgttgaaggtcattgttacgtggctgatgagtttaccactcgtcgctgagcagcaactgcaaggcaaccaggcacccaataatctgctaggctgagcgacgcttgtttctctatactcaaccgatagtgtcgtccttcctggctaaaacagcatgctggctatctgtgagctaccctgaactcaacagagttgcagggacaagctaccgacggcgaatgcagcatggagttggtgccctggggccgttataggccctttgcgaaacgtcgtgtgttagcgacctgaccaaacggtgaacgcagatctaggactctgcgttgaatctctgacttcttggtgctggacaatatggcatactttggtaaaaagagctgtgaatctgtcaaggtgtgattactctgaagcaaaccaacaacctatattatagatcatagagatcctaggtgatcatacttgcagatgcattgtaacctcgtaagcggccagaat

SEQ ID NO: 9843 - DNA, 766 bp, Emericella nidulans
tggggttgttggcggggttcttttgcagggagggttggagagctgcgatgatgccggactcccagtcgacgagggtgccgtagacgtcgaaggttaggaggcgatatgagcttaatgacattttgagagccgaatctattcaattgtttgtggtgttgttgacaggagagcagagtgtggagttggagatgaattggggaagcgatgtgagatgaggggcacaagataagaggcgggacgccttctgacaacatcaacaacgccttctcaagacattcactgcgccctgcgacatttctggtgcgatatagataacgatatcctgccattttgatttcataaatctccaatcctgctgatattctcgctaaaggtcagtcaaggttgcttggagtggatcgtgtctggtgacctatacctgttagagctgttgttgaccatacctaagcagtaaacataaggcccacagccattctctgacggtccccaggtgcatcgtcacagatctacaaagaagtatcatcatactagcccagatgatgtcgcaatacgccaggaaccctggtggaaacgcgacggggaccttggggctggatgtctccttcaagatggccgctttccgcatcgagagtctcaaaatcctagaaactgcatgacccttcagaagtcagagaagattgccgatattgtgctgactcttccattgtccgggagctctgttctgcaccaatacgatatatccagaaacttgcgttggtggcactga

SEQ ID NO: 9844 - DNA, 1786 bp, Emericella nidulans
aaagaaagggtcagaaaattggactctggtaacattctataaaatttcccccgcccccaaattctgttccgagtccaagggctcagctcaaggcccgcgctcactgtgtcgccaaaccctgcggtccctgaatccctggtcaccaccagatacaaaaggagaaaaaaaaccgcgactcaccttctgaaactcatctgtccgtttgctccagcgcgtacagaaattcctgcagtacccgttgagcccgctgtgctaggagtcgggctgggtctggaagccgacgagtctatgaatttgtcgcctgctgctgcgctcatggccgaaaagcatccatccagagaaggttgcgacaatagaagctgaaaattttcagagaaattggcggaaagttgggtcttgatggatcggagatgggaacgtagtagtaaggtactccgtatgtggtggagaaccgataagaaaagaacgaccgagtcgcaaagtcgaacaaatcgtaagagtggaatacacagagaggaaagatgatcgatggatgcagagaagagatgaaacctcgacagggcagaagcgctgttacaggatggaaaagatgacagtggacagacggacggtggcctatggccaggagaagtacgggggtcggcgggactgccctggatcaacggggacccagctttaggtagacaccgtacagtcgtcgaggcttgatgactggagcttgccacgaaccaaacgccaccaacccgtggacgggccgccagtggtcaagcagtagatctttgttatgaaattattattctcacttatgccttgacgcagacgggggagggggggagaaaaaatccccgggcgaacacggttcttcccacttggctaatttggtggcagtcctgaaggagcggaggtcgatcgaattaaatgataaatgatattaacatcgttattcattagagcaaaaaagcccccagactgcagtagtgggcatcctggcggaagtggcaataattagacaagctcgatatcccagggtttgtgtggggagccgcttcgcccgttataagacaggctataatattctaggcggactctaggagtctggagcttttgcagtaagtttgcagtaagcaggtttctccgctgcaaattctcattcgcagacggtagaggatgcatgctgacaataagacgcgccattgtataccccagactacatcctggacgacatcccccgtacctgcaccagtatctcccctgaacgccattgagaggaaccgctcaattaacgaacacagtatgtttcatctcgtcaaggtcaaaggatacagacaagctttttaaatggtctgtagtcgattccactgaaaagacagtagaaccctaatcgtacgcatactgccagccaatttttcaggttgccacatactctgtaagcacggaggacttactagactggtatacgcctctttgccgtctcaaatgatgtgaagcgctaaagacgcgttctcgggtcttccaaataagcaggaccagcagctgccagcggtataaccagagaccccggtcctaaaaacccgggagtatcacgaggtcgtttagcgacctgtcagaaggatacgacaggtaaaaatatcatatctacattgactcccgagtacgtggcctatccgtgcgcatctcaaacgacggctgcgagatctgcgacgcatcggaaccagactgagagccggaacttgaaacatgtggccggactgccctccgcgtgtccggccatggtcgtgaggatcga

SEQ ID NO: 9845 - DNA, 2568 bp, Emericella nidulans
  unsure (1)..(2568): unsure at all n locations
tttttctgaggaggagcaccgccggtttcgcgaacaacgatgcccaacccttcttggtacctccggcatggcagggtatccttcgtggtagacactgtttccggagcagccgtctcggcggacgaggtagcggttgtagttgtcgctgagtctgcaataggagtgatttcagcggggagggatgacttctccgtgcgtgttccgttggcatgagttccagcccgaccgccacggccaccacggccacgatctccacgagcgcgaccgcggccttcaaatccaccgcgtccacgtcctggccgcacggcagttgtggctgactccgtaggggtgctctgtgcctccttgggcttgggacgacttcggtcggttgtcttcttctttacttccccccactgagagacgttgcctgtcgaagtgccaaattagcgggaagacacgacgacgaaccattcaattgattgacacagggctgacaaaccttcactgatgcgatcaattgcctgctcgaggtcaccatcagcatcctccaaagcgaagaccaaatcctcgtctgtccagtcagggaagagctccttcaacatcggcagagtatccgagtatttcttcttcatttgaccgagttctccttcatcttcgtatgtaggctctgtgacgtcgggctttgtggatctgctgccacctcgaccacctctggagctgtagccgccacggccaccacgggcggataccctgccacgagaggcagaagacctcgattgaacttcagacatgttgcgataaaatctctgattctccaggggaggagaaatgtgatggagctcgaaggagtctaaaagagatgaaaggtagaaaacaggatgcggcgagtgggaggaaaaaagcgggtaaaaagaggttcgttggtagtgttgtcctccgttaacgatcacagatgcagcctctcgcgtgaggcagcaccaaagcacggaagaagagccgcgagggaccgaaatcgagcaaaaggaggaattgaacacgaggaggaagatgctaggacagaaagggtgacaagaatgaacggggaggaatggatattaaggtggaagggaggagtaggagaaagaggtgaggaagaagaaatgaggttttcagtggagagagcggagagcgaccggacgatgaaagaccacagcttgggtcctgcgcctgcgcctgctcctgctccctggcccgatcaatcgagacaaaggcacagcacacttgtgctacggacatatacagcctgaatgcggcttgtgttcttttgttattgttactcccattaacaaactatacatagacaagtacctcatcgccgtcgtgggatttcgtcatcattttggctgcgatctatccatggattctgtgctactacctaggtaattagtagaccccacgaatcacaactggtgagaccttaaatcagcgaactgaggcgagctactcgattatcgctttttaggttatatactgcaagattaggcatcgacaatacagtgatagtcgtctttcaaggggctcagctgaagcaagtccaaactgggaactgtgttcgtggcggttggtggcaggctcccagacggcaaccctttctcaccgcccgccttcttgagacttgagctttcagtgtccgatgtcgagatcacaacggtcatcgtacgatcacagcattggcttgaaaatccccaatgccaatcaccgacacctctgaaatttgacagatttatctcacatcatgaaacttaccgcgcctttcaacttaaatcccctgtcgaagttccatgtcccgttgccgcgaactccccgccagtcccagcagctcctgaatgcccttacgtcctccttccgtcgtgaacttgatcgtgcccaccctcccaccgcattgtcttcggacgagggttctggcactaataatgcttacagcggagaccatctgaacgaagagcatgctcactcggccgctcatgctaccgacaaacatatccgcgcgcttctcgataaccccctcttccgtgtatcgccctctagaaacagtgtccggtctggaccccagtcaagtacggatggatcaaggattcagaaagagcctatggccatttttgacgagcttgtcgcctctggctctgctactgtgggctctgtctctgattgtctcaattggcagttgttattagccagccgtcagagcggcgagcgcttcgtaaaggagctcagggactctcgagcaggctccaggactttctcttggtggtcttcttcagatccgtcgacgagagtctcattcctgaagaataacagagcggtgcgtagcacatgcaagttcatggcggcggaggggttacgggactcaatcctggcttggctgagagttttgaggattcgtgattttggtgacttggaagagaagaggatttggcagagaaatcttcaagattttctggngattatctgaatgagagattgaatgcgcggtggctaatttctgccacgttttacgggatgctgcaaatctcagtaactgcgatgaacacgacattgctttaaaag

SEQ ID NO: 9846 - DNA, 548 bp, Emericella nidulans
cattctttgcgtataaaagtacactaccccgcttgcctgtaaccttctgcttgcttgactacagtcactcctattaggtcacgaacatccttaacttaagagagcaggaagagtttactatcatagcagcacatacagagtgccggaactacaaatggactaatgctttctctgctttccctcttggtttcgttcatggaagatgcggcatagatagaaagagagcattccagactattctctagcatccgagtctgggcatgaatggaagactcctagctccctcctaccacacttaagtatctcttctttagcgggcgcttcataatcaaaagattgttccataccatatgacccaggctttgtcacgagctggattcgaaccagcacttccggatgagttacatccgacgaattcccacaactatagtgatttcccggttcctcattccattcatttcagccggattgtacggcgaaactcgctaatagatagagaaattttctcagggaagaagaacatctatctccggtcttgtggacttctg

SEQ ID NO: 9847 - DNA, 597 bp, Emericella nidulans
gaggatccccgattgaagaaaagctttttggatatgctttcttagaatgtttgatcttaatcaaccagagataaagctaactatttctctaagtatcacaactgtagcaaatctactagcttttggaaccaacctgaaaaaccttcagactcttggaactggaagtgtctcttaaggttgcgttgtttagcagaaaactttgtcaggtgtaagattggagatggaaagactgctagtttctggtttgataactggactccttttggtcccctaatcaagttcattggaacagatggcccctgtagttgagagcccctttgaatgctaaggtagctgatttatataactcagttggttggactctagcggctcctagaactggtttggcgtgtgaccttcttatctacctctctactatagcgttgcctactgactctgacgagttggatgcgtatgattgggtggtggaggacaagttatgcaatgggttctcctcagctaagacgtgggaattctcagaccaaggtcggatgtggttagctgggcaagcacagtgtggtttaaaggtgcaattccaaacatgtcgcttcatatgtg

SEQ ID NO: 9848 - DNA, 1553 bp, Emericella nidulans
cccaccgtggcatacgccaggccagtagcaaaaggaggaacaaacacacgaagcatttaggcattctatggtcttggacttgactaagacaggtataactaaaacagatagaggacttcatatctagatgagctaatggacgccggtccacttacaatatagcctttcttctaccctcgtcctccacaaacggcagtacatatcaagtccctctcgacagctattgggcgtgagcggttccattgccatcggcctggcttttagtgctttcattacgctccagatgcagggatttccgttttatgatccctatccgtgagtctgggtacggtggtgcacagtctcgagcgaaacaagagacctgtcttcggtcccagatccactctaatccaacatccaagcgcataatcatgaaccagcggtactttactgagtatcttaatttacctgagcccagcttcagccattgtcagtcaggctattagtaagactgaccatgggcatatgcgtattgtcgcagtgtaatagtctcttacaatctcgcctcaagcccagctcaaagatcacaatttcgacggcgatagctgatctcgacatcgtacagcgaagtcgtgtattggaacgctgttctgtcggtcagctgtagttggggagacgagagctgctgcatataatggaggtcactcgcggggttagatactgggcttagaggaatcgcaattgaaaagtgatttgaggcaagaaatatctatcattatcagatctgaatacgcattttttattgcggctcaatcgcaaccgtgccatccagggaacctggactgtatagtaaagttggacatccccaagcttgccctaaattagggtaacaactggatcgcttgactgaataccactacccgcaactttacactgctgagctgattaactccatcttgttgctcagccttgtgaatgaccttccaagacaagtaagccttaactcagacctcgggcttggaccgctaggtaccacgtacgagagggccaattggtgcccacctcgtatttcctcttggccgttgactagacacaattcggtcaaggggcaagagttgccctttaaaccttcaactttccccctttgcgctccctgagtaccacagaagccctgtgttccctcgtcagcccatctgaaggccaccatgcccaccgcaaccgccacgctctcctggaaattcacaaactggggcccactgacaaccccctggtccctgccagactcctgcaccagcaacgtcgctatcgcgtctaccgctgacacagatttcgtcctctgggccgagctgtgcccgttttcgtttgattcgtgttatccctctccaactgactcgaatgcgccggaggcactgtcttcagcgttgaacacacacggtaccgacatttatgcacccccgttctattctcctgctccggcatgtccgaatgggtggaaaaccgtcggggtggcggcgagagacggtgatgcgatctgcctcgcgagccggatggttcactacaatatacgagggctt

SEQ ID NO: 9849 - DNA, 1159 bp, Emericella nidulans
tgctttacgtcctttgaatcggactcgccttaatgtgctctttagtgattgtagcgcttttcggcccttccaagctggtcaacgggtgccccagatggcgcttcccaccgtaccccgcatctaccactccagcgttcctatgacccggccatctcgactatctcgactcaatcaaccgcttacacagaccagcaatcatcaaacgttcaattggaagatctgccactactatctgtcttggctgagaacagactgagcctcttcccgttgtccagcgtgttatcgcttccgatcgctcgccgaggtctccacggttggacggcgttctgcaatcccgcggctaggtccagagcatgtggttcctcaggaccctaatggcgatcattggttttcgtgcaattcacgctcatcggtgtcttgcagcgacctgatgatttccttaaagacagctttggccagtaggggaggcactgcattgccgatctgcctctttacctgcgtcctaccgcccaggaaccgaaagcccagaggaaaggtttgcagacaagcaaactccctgagggtaaaaccgcgcaatccagagggatgataattgtccccaccgccgcatgttattgtgcgagcttgtcggtttccgtcgaatggagctcttcgattatgaactccgcgaccccgtgcggcaacgacgtcgtgatcgggacttccagtggggatatcgcgaattgcctggctgattgttgtaagatcacgcagcccggaccctggcaggccatgagtaggccttggcagccgtgggaggctttccccaggcctaaaaaggaccgatgttagtcatgagtcagcatcgaatcttgagcacgcataccctgacgcaatgataatcaatctctttcgagactgtggcaccccataccacatacaattaagaagggcccatcggacggagtaccctgtctctatgaaatcacagataacccggaggaacacttgttgatgccgatcgaacagaccgctcgtttcttccatggtatgaactctcggttttgctttacgaatgaggtccagcatgagaatatagctgctgagttggcatcatcattgggccctgggattgtgtgagcaggcgagaaggtttgacacgggggcgagcatgagagat

SEQ ID NO: 9850 - DNA, 698 bp, Emericella nidulans
ggtgacatatcgttgatcgagaaaaagctcaatctgaggccaaatatttttctatatttcctaataaaggttatctcaaagtctagacttttctgtctgagttcatgattctatttggacttttaaaaatgaatagagatccatgttcaggtcgaaaaccacttctgatgttgattaggcgctaaaccaaatatggcctaggctcctataagcccggtgacctcaactctaaacatcaattgcggactggcgaaacaactggctgttgttttttgtctatcggatcctcaaaccccgtcctatgagcaatggctttatatttctagtattggacagcatgagcactctacaaccatgcaacatcttttccgtttccaatcgagccctgtccgggctgcgctcttcactcggacatgcaagacatacacattacctccacgatcgcgctcgggctgctcctacgcaaccgtgagcacaaccgcaacatctaaatctaggaatcttgatctgccggctctagataagaaatggcaggcaatatggcagaagcatggttcaattcgggcgcccgttggcgtcgttgcggatactactgcgggacgggctggtgagaacccaagtcttatatactttcaatgtttcctatccgtctgggacattgcatatgggacacctacgagtgtatcgatatcggatgt

SEQ ID NO: 9851 - DNA, 1286 bp, Emericella nidulans
  unsure (1)..(1286): unsure at all n locations
tatagtccgccacaatgcctgaaggagaggaagacttctcctctttaccgttccccgatcgtttcgcacataaggttcgctcgcatcatagctatttagactctgtgacgccgtccagctcaaggactaataaactggctgcagaactggaaagtacgaaaaggaggatacgaagatgccaaacagcaattcgagaagacgggcgacgaatccgacccaatttttgcacaatttcaagacgccagtttatggaaaggcgcagttacagactctaacgtcgctgcgcaacaagatgggttagcggcatactgtgcgttcctgcagtatggcggcccggcaggctgcgcaaggtacttatttccagtcttcagtatccgtaactgtcagtgttgcgggcgtgaacatgactgacatcattgaaggacgcgcggagccacagttcctggtatcgttgagaaaggcctaccacaaaccagacccgcggcgaaagcaagcgcgctcgaggcgctactcctctgcgtcgagttggataaaccggaagccgttattgaagaaatcttgcccgttctatcacacaaagtgccaaaggttatcgccgctacactggctggtttgactgccatttatcataattttgggtgcaaagtcgtcgatcccaagccagtgttgaaagctttgcctaaggtgttcgggcacgccgataaaaacgtccgtgcggaagcacaaaacctcacagtggagctgtatcgatggctcaaagaagctatgaagcccgtattttgggctgaactgaaacccgtccaacaacaagatttagagaaattatttgaatcagtgaaacaagagccacctcccaagcaggagagacttacccgagctcagcaagctgaagttgacgcaggtgctggcggaggtagtgaacccggcgaagcccggtgggaggtgattttttggggggnnggnggcaggttgatgccttgatcttgcaagcccttgacgttttcccaaatcccaaaatttccacaacgctgggcatcgaaaggaagatggaggaggctggcgcctgattcacatgaacgtcaaatcaggccgccgttgatgaactgccgcctgcaatgttgaggtgttagtcggttgacgtgcaccattgttatttttgcagggcccaaggttttaaccccctcgatgccttatggagtaaggaaaacctgggatcttcaactgtgcttatgaccttttcttgaaattagtgtgccaaacccttgaaaacaatatattttacattt

SEQ ID NO: 9852 - DNA, 1282 bp, Emericella nidulans
cttgctctccatagatttgtcggatggtatccacaagggatgaacgcgaagacttcttggtctcgaacgctagccgcacccttatcaactctaacgggtacgtgaagaaaacggaggtaatgcctgccaagctccctgagacaaggcgacgaaatggagtctctttgtcccgtgacggtataactattgctcgaaactgctcataagcgaggaacttgatggatgcgtaaggaaaaatcctaagtaatgttgctgagtggcctcggtacaggcctcgggcaccttcgtgccgcttgatatcccgaatagcgaagacaagtccagtccaacttcctgtatatttggcgaactgaggattcgacgcttggaaaaggatcttcactcgatcaagaggcgcaaccactgtcttggccttcaagttcgcttgtcagctatctctgctccgtctgacggtgagatgtcaaacttaccgcacaaccagccagccctccagcgagtccactccttaagacataatcgaggctcctcttgttcttctcctggccaccatttcgactgctctgacccggacgatgtgatgggtcatcagccgtggtcgcgtgaggcccggccaccactgccccgctgctgatgttatgtgatgtcggccgttgtgcgtgtgacgctgattccatctgctgcgaagcggactgatttcgagactgagagtcgcctatgatattgggggaagtaggattcgggattaatgaggtagagtcgtcttgcgcatggccggtagctgctgcagacatgagcgcgctccccatgcaaattcggttgatctgaggtggtgcaggtaagaatctggggccgacggactaccggataaacgcggccatggatttgcgagggttaagaggtggggttacgcgaagcctatccttgaccgtataatcaaacaacgcaaatttgatgctgaacgcaaagttggaacaaagcgggtagtctattaaaaagggctgtaccgtagacaatgaataataatactgtggagagcattggggaaagtcggacggcgtcatagagtggcgccgaacagacctgaccgccctgacatgccgatacctagccgcctcggccccctgcgccaatgttgccgccgcgggacagtttagacagggtcacctatatccgtgtcaggactttacttagcagcgtccacaaagcctttacgtcggcgcagtctaccgctgtgtgcctcttgtacctgcctagtcttattcagaagagccctcgaattact

SEQ ID NO: 9853 - DNA, 1160 bp, Emericella nidulans
aaaggcaaaaggttatcgaggaggagaagaagcggcaggagagaaagaagtcgcaacgcgtttctgttattggaccgtcggtggaccgtgaagttggccgtgtgggccttggtcctagcccaactcatatggattacaatgccttccgagagttcctcgccgcaaccgcaaaatgggctatagctgattctccaggtccctcccgaaagcaatccgactcgggcagcttccgaggactgggaagacctaccatgaacatcacaccgtcgccggccgaccatgaattcatgcagcgcttgtttcgcaagtggtcaactgacccagatgatggcttaagtctgcaggatgttgtcaacggcattgcacgtctgaaagggccgcgagatattatgaacaatatcacttatttttttgacctttatgacgacaacggggatggcaaggttgatagagagggtattcttcgaatgtcagaagcgctgctctttctctcccggcggggattcgacggaaccatcacccccagtcagagcactgaaaatttaatgccaggcaaagaagaagataaactcagcacgggcgagcggtttctgggaagtgtgagctccttcatacggcgctgctttgaatatgccgaccctaccaaaaagacattagaagctgaaaaattagccgaaacaacggacaacctcaactcgttcagtattggagatgatgaggaggatttgatagacgtgggtgacgacgaggtaaaatccgagtcaaccccaagccctgagggtgaaacgcccgggacgccttccttggagccaacagaacgcaagcgtgctcgaagcacatctgaggcggcaaatccggctctcgaccccaacaaccctctgcatatcacccttcccactttccggatggttgttctagcagacgaattactagagcagttcttcgacaattacttcccccagtccttccatctttccgagcaaggcgcggccgccgcgcaactcccgtccctgtcctcaaacctcacaacattctctaacattggagctgccaaacaacagccaacatcttctggccccacagtcgcaggcgcctccggtggcatcgtcccaccaaaccggggactccgtggcgttttggataatattgtcactgacgga

SEQ ID NO: 9854 - DNA, 714 bp, Emericella nidulans
ttgctggctcgacttcggggcgctttttgacaagccctacgcccttcattgctttttcaactctcccaatagtcagtggagtgttaaagcttcttttacttcgagaatcacttgggttgcttgggactctcgagacagcgcgcaatcttataaacttcacatctcatccctttcatcgtctttctgatccgctccccgtccagcgcgccgttctcgcattgcaggttgggatgagttccgcagcacggtaccggcccatttcgccggggagcgcaaatatgatcgatcccttacgtgcctcaacgggcacagttcaactcgcctcctcctacgatccttatgaccctgccggccgcccgatctacacgggctatcgctccgacgtgccttactcgcctacatacgattctcggtatccagtcgcgccacgattagaagcccatccggtttcccaacagacgtaccatgaccccggacagtccacaaggttgagaaccgagtacgcgattaggcccagacaacggagcagcacgacatccgccgcagactcccatggtcgactcggggtgcctccgatctcgtcagtttctagaacgtccgccgtggtgttgtctgactatggtcgatctccaagccctcttacagaccaagatggctaccttgtgcctgcatcttccaggcatcatatgcaccatcgccactcttcttatgatt

SEQ ID NO: 9855 - DNA, 573 bp, Emericella nidulans
actctactcttgtcttcggaggactgtttaagcctattacaactcccttcccctcttctacacccaccaaatctactcacttttcctaaactctaaaccaccatcatataacatatttctttccattaaaatatcttacctaatcatttttctacccgctacgtaaaccccaactaccttattaatcacttccatcttcatctcctctcatacattattctaattcaatccttccacaccaccactatatccctctctcctcttcatacttcctaattcctcattcaacattctttcccatctccccctcctccttcaatcctcttcttactcatcctacctcacaattacccacctctctccttatctcttcacatactctctaacatttccttcctcccctcacactcatacatatcatctatttctttttattcctaaactatcttactcaacatctctttctctatacttttctaatctctctctacaatcacacttctatttactcttatactataccactctctctaacacatctaatacttttactcaacttccctttactccttc

SEQ ID NO: 9856 - DNA, 521 bp, Emericella nidulans
taggcggattttatttaaaaacacgggcccccttactactaccacccacacttatactaccaacctacctacctcacccttacacccctacttactcaaatttacactctcataacactcctctctcaaatcaaaaaacctaattctcacacctataaaaattcccatacatcaccaaactaaatatcccttaacctctcactcatactccaattaccatccaactaaaatcacacactatcccttacaacacacctaatattacattacccactcaccattcctcatttacttcctcaacccactttcttccaaatcatcatcacccttatactcaacctctccctcctagtacccactcccatcactatatccattatcatactaccactcatttatcaaataactaccctaacacattataaatccctctctcctcaacctaacttttcaacttaccacatatctcaataaccaacctctccccacaataaataacccaaactctatacatttatcca

SEQ ID NO: 9857 - DNA, 1839 bp, Emericella nidulans
  unsure (1)..(1839): unsure at all n locations
gcaattaaccctactaaagggatcacagcgacctgggcctgcgctgcatccctccgcctggccagcgttttatagcggggcttctgtcctgctggaagggggactgcctcatcacgtgtctcatagaaccggcgcaaagtcgcgtatccactgaagtaaaactgaagtattgaagcggcctcctcgtctgcatgtgcaatcgctgagaggcacgttttgggttctcggatcagcgtccgcagctgttagtcgaggtcgctcgaggcaggatacgcccgggattggacgaggctgtacgagataagtaggtcgaccactgacttgaccttgcgtcgattgtgcgcgcgagcatagcaaacgagcgccaggccgtattcctccgagttggaaacagtgagatccccatagcgctgaaaagtcagtaccctgcctgcaagacactcattggagcacgtacctcagaaacacgtctaccctccttatttagtcccagctcggagcacaggagaacgaccttgtccatctgttcggccgtgtcgagcggaagcttatctagcagttccgaaacgctcttttgcatcttctgactgtcatctagcctgctcagaacctcgagggctagctcccatccttcgcgaccttcatgctcgtttccgatcgacggtctctcagacagaccagtagcatatgcactcaggacatcgtctctgctaactccggcgggggcgtcgttttggttataagagagaaccataaggtcattatcgcttagaccaggcggtttagcattgctcttcgtctccagccagccaccaaccgaggaaatctctgccacagcagcagccacacagagagaccaggtctggagcagttctaatacacccgcaacgtcaccttcgaaaacagcggccagtccaacctcgattccgcttagtgaattataacggaagcctttctcgtccttctctgtacttgttgcatgcttgaaagccaggcttagacggcggagatatggatcattagaaggcgactgtccacggcgtaggaatggaggcgggctggcttcctcgtcgtcttcgccatcccaccagactgttaggccaatcgtggcttcgacccagctctctgcatagttcatgatagccgccgggtcgccgagtatgattcggtaaaccgaccgcaaattctggtagatggtccacggcacccgactttcggccatacgtgcagattcggtaaacgaaggcccttggaagggatttgatcccaatccgaaattgatggcctggaaagtatttcccgtcgccggcgcgggtgctggctgctcttctccttccgcgaattcttcaagatccgagatagcggtgtgtacacgttttcggtacaatgaccattctgcgtcccgggcatcccagttatcattggggacgctagggcatgcctccagaacctggagcgccctgttgatacatctttggatattttgcaactgcactccacggtatcccggttgcggcaacccgtactcaatgccgagcgagcgtatttgaatcggggagcgcaaaactgagacgccttcgacggttagctgtgaaacagaccatgacaatctccaaaggctgggcacacgtnnggcaggtcaccttgttaaaaagtaatttctctggcccggttgttgcatttacccccttgacaattttgaatgggctccccccccccctacccaattttaaagggttttctccccggggggaaacccccctataaacaggggttgggggagtaaaaccccccaaatttctcttgggatatgtttaacaaaacatatccttctttttt

SEQ ID NO: 9858 - DNA, 932 bp, Emericella nidulans
cttctccatctaaggcatcaactaccatcctctaccctccgtcaccatcttccttgcttctcacatattctcatttgtctcacttgttcttcattcttccgcccccttgcacaccttgtctattcgactgttttcgccattacccgcgatcgttgccaattggggtttaccttaagcggaaacctcaagtatcatacaccgtaactccccagtgtccataccgccctgcttaatcgataagcggctgcgttcgaggtctggtcgcaagtgattataggaaccagtatcaccgcgcgacgtaagggccccaaggcaatctgtctcgtcaacgctagttcccgaatccaagtatattctttggaccgcattcgactctatctcttgtctacaggacttgagtccgaggtggtacgtacgtcaaaacagcctcatggcagctgtactgtccacgcattaactaatgattgcgattcagttgcaggtgattcacacacggacaattcgttctgcagtatagaacatcacttccatgtcgcaaaactccgaaagttgcgggagtcttgccccgcctgtggaaatctcgcgcccggtgaccccagttcaacgtgcaaacctttctgcatctcccgacatgagtgtaccagctgagagccggtctccgcacacggacaatctgaagtttatttccccaccatccttgccttcatcagacatgacgccacctccctcaactcagatccctggagccccgcttcgacgatcgcgatcgcgatctcgatccagctcgtacctggcaccgtcgccagacatccaggagacactgtgtgcggcctacggagcgtccgagaatctcccaacaaacgacgaaattgagaccgccgacgaatggaagctccgcactattgccaaggagcttcttgcagtagcacggg

SEQ ID NO: 9859 - DNA, 619 bp, Emericella nidulans
ggatccccttcacggcgtttcttgcccctccagctcagaatcttcagatcaccgaccccaattcttcatcgacatgcacactagcaaacctacaataagggaggtttatgagaggaagaggcttgccgcaaaggagaagcgtgtcgcgaaagagaaacatgctgccgagagtgtgaatgtcgatcccgatacagccagggattgggaagttactcttgaggttgttttgcctgccgcgtcggagcctgctgaggtgggtgataccggcttatctctgacagatccgccggttgaagtagctagtcaagcgatcgtcgcgattccgaccggcgacaaggcctcgggaaaacgtccacaggttgacgactccaaggagaagaaaaggaagaagaagaagaagaagaagaaggcagcgaaaagggaggacaagcctcctatttttgaggataaggctgcttcggcgaatctcctcagaaagtgcgcgagtagcctacttccggcttcagatactctactggagtctagaaagtacgctgagacggcgtcacattttctaagggtaagtgcttaatcattttagctacttggcgcgttctccgagctattatgaacgtggatg

SEQ ID NO: 9860 - DNA, 1063 bp, Emericella nidulans
atagtggtcaaggaggtatgtttcaagtcccctgggtgcaagagcaaaccctaactggtcaggcacttgtacaagcaaagcttgggcatacttaccaatccatccaaatggcaacttatggtatagccttttttggcactccacatcgtggcagtcagttggcaaagcttggggagacagttgcgaaggctgtgagggcatttcttagaaccccaaacaacaccttcatcaatgccttgaaagagaatgatctatacgccaatgagctctcggcgaacttcagtcagttgttggaggattacaagtacataaacttctacgaaactctacctttgagaagcctcggaatcgtatgtcggcgcaccaatcctttattactattattattcacttcactaataaaccaatctttccgcatagattgtagagaaaaagtcagcaacactcggtttgcctgactcgcgagaaataacggttgccttgcttggagaccacgaaagtatttgccggttcgcaagcgaagaggacgataattacaaacacgtctctgggctcattactaggtttgctgccatagcaatgagggagtgcgaggaggcatcactctttggagaattgggtacagaatcgactctggccggattgagtctggttgaccagttgggttccagaacatgtaggctgactggagatgcccttaagatctaagctgatgatcaaaataggcatgattccattcccgcggaatcaagcgttcgtgggcagggcttctatccttgaacaagtcaagagtcaaatcttgcctattggaacaacttctcgactggtgctgtttggcctcgggggtgtagggtaagttccctgtgatccaactcgaattatgttctaaaggaccagaaaatcgcatatcgcaatcgaatttgcccaccaaatctatacagagctccaagcgtcagtattttgggtcagtgcaagcagcattgatcgctttcgtgaagggtacagtgcgatcttcgacgaacacatctcagactcggacgtaaaatgcgacaaagccgttcgc

SEQ ID NO: 9861 - DNA, 818 bp, Emericella nidulans
actttaacctcaataaggccttcttcttctgccttcagcatgcggagaaatagctcagggctgcgggcgatatcgctgagttgctggtctcgaaggtacttgaattcgtagtacgggtgttgctcatcaatgcgccgcaagcccttctcagtgcggaaacaatctaccgcgccgttcatgtaatatgcctggcggatgactttgcgcattttgggactcatcacaatttcctctgcaaacatacccttagctgccttgagtacttgagatgagttgttgaagtcgttatcaacgagcccatccgccatatcctccgggcgctccgatgcatcttccgtgtactgacgacggccctctttaagagcgttttgcgcgaatgcatctgctgtaattccaaatgcacgcacaagaccataagccttgctattgcgaacacgctcaaagaagtttcttgtgagggccttccgcctttggacttctccgttggtatcaccgtttgtaagcgtcaaatcccttatctgcgaggcatactggaagtgaaggtagtcttggatatcttgcagctcttccatagtagtggctatgggtaacatttcctccacaatagggtcctcgacagagaaaaccgaccgtatgttatcataagtcttttggatagtgttgcgtttctccaccagggctttgaacttgaggtcataatcaaatatgtcccacaaatcagtcatgttcagcaacttctccgctttgatagtgtactgcgagctcgagtcatctgctgaagccccgttcacgggtaccttgactgtgtgaatcatgta

SEQ ID NO: 9862 - DNA, 1859 bp, Emericella nidulans
aagggccgcacgcgcttcagtgacggctgcatggcggaacgatttccacatcctgcaggttctcattgcgcggggtgcggccgtcaatgcaacggataacagggggcgcaatgtgctgcataaccttgcggcggacaagatgtgcgattggggtgaggatgtggtgagcttactgctgggtacggtttgcgcggttgatgccgttgatgagcttgggcggacgcgctgcattgggcttgtgcgacgggaaaggagagacttgccgagatgctgctcgtgaggccgttacatgtgagtggtagtgggagggccacgggcgggcgggtgagtggaccggtgatgacgggcgcggatgtgaacgctgttgaagggcggaataaaacggcgctgcatttggctgttgcgcatgggcatgaacgtattgtggcgttgttattgaggcatggcgcggatattaatgcgaggagtgatggtgggtggacacgttgcataatgcatgcgatagaggcagtgaaagtatcgcgaggagactgttagctgccggagcaaagatcaatgcacagctgctgaatgggatttcgcccctgcatctggcggcgcagggtgggcatcgtgaggtggttgagtgtttgctcgagcggagtgatttgaaacagcgattgagggataacttcggaagcacggcctttctgcgcgcggcgcagttcaagcggaaggatatcgttgcgctgttggcgccgtacaacaatgtcgaggcgctcagtgaggatgcgcgcggtgcttgcgaaggctttgaagcgacggtcgtggatttcgggaattttcacaatgagaaccgtgtcaagcggacatctgtgttcaacctgctgtatgggcgggatcctgagaacccccggaaacaagcgttcaacgcgatgccgttgaatagcaaggcaacggagttccgatggattcatctgcccgcaaataatatggcttgggtggaggcgttgctaacaaaggcattcatcgaggagggggcgcatgatgttgatagcttcaaggggctggagaggtcgttcaattaccagcaccgcgggcagaagatgcattcgaatttcatgaggccgttgtgtcagagcacgcatagggcaccgaaggttcatgatgatgttcatcgtgaacctgcggaggagagggcggaagtacagtcaccaaaaatattaatcaatgggctctctcgagagctgctatcctcaccagtgccaccgtctccgaagctagacgggaacaaaaagaagcagaagatcggcgcaaagatggagcgggtggattcgcaggatgatactcagagcgcgtcgggaaagaaaggaaagaaagggtcagcaggaacccccaaagggcctaagtcgccccctatcagacgagaaaagtccccacatcccactctttgcaaggaaaagccgccaccgctggaaagcaacatctgttacttcatgccgtacttgcattttgagacagcagagcgacgagagaggatgcaggaggcgattcgcaacgctcaacaggccccgacgccccaaccggggcttgatcggacaccaacacgcgatgaattgctcctgcgcgctcacctcacagggtcgtcgacttcgctccacatccggcgtacactggaccagtttttctatcccaatatcgatacgcagtcacgcgatcaggaccaggtagtgtataggtatcagaagaagagatctcgtgtgccggacgcccaagagtcttcatggttgtccagctgtgcgatgtggatactcggcccaagcttgattgtaacagcaacctcacgatgggaccagccaaaatgatccgctagggtgtgc

SEQ ID NO: 9863 - DNA, 787 bp, Emericella nidulans
tgtggctgcgattgtgactttttcgaatggtagatcttttccggataggtttgcggtcgctatagataacggccgtggggttgtcggttcctttaccctgcgctggtaggtgtccaatatcatacagtgctgcaatgtgaaaggggtctatgtctgtggacgtcggttgcgctataggcaggctgtctctgctgtcaataggcggccctggctcaccaagatcggactcattgagcgctgtgcctattcggaccctggtcaacggttgggacagtggtgcccgtatagtggatgaatcccaggacgcagtgtcgtcatcttcgtcgtcgttgtcttcttcgagtcgctgggaaatagatggaattgggtgctgtgcagagtcaccgacgaggtcgtgatgaactctttcttcggtcacgggaatctcacaagatgtatcgtatatgtgtggttcttcgttgatgtgagaactgtcactgccattggtataaaaatcgcgtatgcgggtgccagccgattggcaatccttgtcttcaatgtaggaaacgatccgcgcaaagtccaaagattcgtgcgggttgagaatctcaaaacacgttccctgatgtaccaccgtggccgttgcaggtgattttctaacccgcgaggtcctccataaaactgaatctgatcgtgctctgttgtgaccgtggaactcgatggtatctgggctatcaacgtccgggaatctgtcgagtcgatcgcggaaagtatcctgctatggacaatatcaaaacgcgcctgaact

SEQ ID NO: 9864 - DNA, 621 bp, Emericella nidulans
ggatccccgtgattaatatatatatcaccttcgtaatcaatattttgtggcaataattatcattattttccaattttggattttgcttctaaagccgttccacatctctttgattttgaggcacgtctactacgttgtttttggaatataaatatttattttacaaaatgtaatgtataaatttcacatatataagaaagaaagtgtagatatgagttatttgatgatggatagtgtcgcactgataaatccacatgaaggctgcaagatacaggcaggcatgcacatgtttatgctcagccactttcccaatattattatatagtattaaaaagtattctaactaaaatatttatataaatctcaacttgaacaaaatcaccgttagatggattgcactttatcatccaacggtgtgtatcacaagactttatcacgcgtacgtggtcccgcgtgcatgggatcattgatctgagtgatgtttttattacagtacaaaaattgacgcgtgacgtgtccagcgattttgttccttaaagtctgaaaatccgttataaacgctgttgattggtcgtggcgtatgaacgtgacagcgaatgatacggattcccgttattttga

SEQ ID NO: 9865 - DNA, 2069 bp, Emericella nidulans
cgatcgagacatcctcgtgggtattctcggatcgcatccccgtctaggccagccgaaagggaccgcggcagagcatctgagcgagctgagcaaaagggaacaggcgaatctcaataccggtgcggaggagcaagcagagaagttgcggttgttgaacgctgaatatgaggcaaagttcccagggctacgatttgtgtatgtgatgttggttgtgaaattggtctgaactgagctaaacattctactataggactttcgtgaatggccggagtcgggatgtgattatggaggagatgcgcgcaaggatcgatcgaggcgataccgagcgagagattgaagatattatccaggtgagtcatgcacaataactgcggcggcgagagaaatcttatcttgtcggcagggcatggtcgatatcgcgaaagatcgggcgaagaagttgtcagactgaaggctcaagctgctgataaaccggcctgacagcttgagtacagtctcgattggaggaaaatcgccggcgcctccgaaaaatgaaaaatggctgtcaagataatgcaaggaatatggctttctttgatggagtactcgtagtagtataataattggccgaactgagttctggagacggagtcgccggagtaactatgatttcatagagggcctttatccgcatgccagggtccagaacgggcgcgttttctctctgaaataagacaagagaggcaagattgacttgactgtcagccacaagaggaatctcccagtatcctctccattgctccaataataataaacctgttcagccccagactgagatagtacaaccactaactactccagtaccacgaactaataattaattgcgccgcgctcgatcccgacccttccactccttcaccttttctcccttttattccttatcgtcgcaactcgcccatcaaccatcgcataggcgatgaataaaagccacccatggcgcaggcggaggctcagaaagcgcctggagacggcccaaggtcttaggtctcagtctcacgggcttccaccattcccgcgaacgtcaccagtgaccccttgggttaaccaccaaccactacagttttccgacgaacccaccccataactccagtttgatctggactacccggaattcaactccttttccaatggtttgttttgaacaaaagccggaattgacctgtccaatccttgggcttggtcccgaaccccggaatcccgggtgaaattcgcagggacactttcgttaacgtttatgttttttttcccggtcccgttatccaagtttttcgttgaggggtatttaattaatatagtcatactggaagactttgaccggcccttttatggttatctaagtttaacctccttgggaataaaacacttacccttaggaagactattacttaaatcctttaaaagatgcgtttttatttattgtgtcaagattttatgtgatattatttttaatacgacacaattaatatggggtttcacgagaggccgttcgcatcagtcggacaactcccaccaaaaattttcttgtaaaagttataatgagcgcattaaccgtaagttcaccttgtattccattactatttattgtaagatatagatctctctcaatttatttcaatatttatcttttttagtaattaatcattatcatagtatttctaatattgatatcacttgattatgtaagttttttatattttgttattaatttgttgtaaatattgtctttaacttattatacgaccttagatatttttgggaaacaagccaatctcgttgaattatacacttaatttaaatcagttatgtatatctggaaaggatagactgaaaagttaacatgctgttttatttcatgttccactatgagttttagtaagattatttcagaccttgctcattatactttatgttacctcagtctcttcacagtagtcttacctgttatattaacatgttccatgatacttagttaccgtactatactttattatttttaaagacttatactttttctttcgcgtattattaga

SEQ ID NO: 9866 - DNA, 1087 bp, Emericella nidulans
tagccttattatccgcatgattttacgagactcctgtgcaagatgatggcctaccaatagtctttatttgctatatggccaatgcaaacaaaatccggctaaattacaaagtaaacatcatgtggacaagtgtaccgctcttatactcgcttccctcctccgcaagcgtagagagaagataatgaaacaagcactctatgcaaagaactagtagtagaaagtctcgtcaacagtgcgacccctcatccatcgaggctcgctgccgcggacgtagatgtcttcgaacaggatgcgagagttgttctcgggcagaggcatcttctcggcaatggcaacctcctcgtcgacgtgagcacgggcgctcttgtcgagacccttaaggtcctcctcgctcatgacgccccagtcaaggatcttctgcttgagaccctggataggatcctgggtgctgcgcatgcgctggatctcctcacggctacggtaggtggtaccggggtcggacatggagtgaccaccgtagcggtaggtgacgtactcgtagaccagaggaccgttgccagagatggcatagtccttaccgtacttgacggcagccttggtggcgagaacatccataccgttaaccttgataccagggatgtactgaccacgcttgtagtagtcggtcaaggcagaggaacgagcggcggaggtacccataccgtacttgttgtctgcgatcattagccagtggaaattaaaatgaatatgccatgcgaaacttactctcgcaaccgaaaagaacgggaaggttccagagcttggccatgttgaaagcctcaaagacctgaccctggttggaagcaccatcaccgtacagaaccacactggtggacttctcctcgttgtactgctgagcaaaggcaagaccggcaccaacaggaacctgggcaccgacaataccgttaccgccatagaagttgggggcgaacatgtgcatagaaccacccttgccgtaagcaataccctcgcgacgaccgagcaactctccaataatcgagcggatagtaccaccgcgcatcatcgcgtaaccgtggcatcggtaagc

SEQ ID NO: 9867 - DNA, 2254 bp, Emericella nidulans
caaccaatggtaatcttcaagcaccagtttactgtagttatcttattttggtgttcaaagttcgtggcttgcgtagggctttcgagcactcggtccatagttccaggataaggccgcggctgctagggaagactacaatgccgaaggcagttctacatgtttacaagatagctagcaccatcgatgccaacggcacaagcttcggaacctagcctgacactacgtaaaccacgagtcgtgataagaaaagagaactcaaacctcaatgagatcgagtctcacggccagcgaaacaggcatggacccgaagaggatacgcatgcacagcatcatatcatacttttcatcaatggttatgcggaaatcatcacccttcgtgaagccttcattgagaaaagtggatgcgttttaaacagtttggtagtttgatattctagcacgcctatatctcatgccgtggtagaagacagagcgaatatcattcgagagaacgcccgccagaaaaatttttcccttgattgattcataacagtccaccgcttgacgaaatcccggaattaattgacataatttaccggatgataccatcgaagcgctgcttgaaccaccgcatagtctcggtctggttgatacggtggctggcaccgatggtggacttgcagcggcgacgcttggcaacgcgctcaccagggcgggtcctgtttccttgtatcagtcctgatagccttgctaagaagagagctcatggcccgaaaagtgtccaactcacatgcagcagtagaagtccatgccgtagataccaatgttggggtcgtacttgataccaagatcaatgtgctcgctgataccgaagccgaagttaccggtctcggagaagttgcgcttcctcaactcgtactccttgaccttgaggccgcgctcgaggatctcctcagccttggggccacggacggtaacgtgaacagcgatcttttcgttacggcggataccgaaggtacggacggtgtagcgagccttgcctattgtgcaattcaacctcggtcagccaaatagtccttttcccataaaagtttccctcttcggtctcctccttcggtttcgatcggggcttagcgaaaatcgggcgtccttactgtagacaggagtctgaccgctcagctgctcgagcaccttagcagcacgggtaagtctgtcaccggactctccgacactgatgttgagcacgagcttctggacgcgcagctcgcgcatggggttggcgctcttgtccttggcttccgactgcatttggcgttcaatattagttttcggactgatattacaaaatcgaagagctgttggattgagtgatcgaacataccatggcgactgatttggcgtggactggtcgacgttgaatggaagaatctcagggaatctcgaatcggaggaaagttgtgtgaagttactgtgggtggatatgtgggaagcgagagcccttagcggcttggcaatatcggctggcgcttaaccgcggagccgcgcgctaaaatcacgggtcacggtacccgcagacccaaacttggagttcagcgacgcaagtctcaacacccaagctcctcgcctggctaaactcctccggagcgtgcaggtatcgaagtgattactagctagagttctccttctactgaattggatatacacattctttggttctactctaaagtcgcattcgtgcgcactcttcagcaaacatggcggccaacaagcagggcaagatggtgagttttccctattacagagactttcttctacaaccggatttttctgtatcgtgaagtgaaaattgtcgctaacatttatattctttcagcaaaacccttgatgttgggatgggtggggttggtaatacgtgtgaaccatttaactcgggcctaaaacaactaccggatgaagggcacccttaatgatggaccacggaatgcgggtcaaaagctttctttttgccaaaggcgtctattacccattttatgccgctgttactcgtaaccttaataatgacctttctagccatgaacctatgcctggccgtttggaaaatttccttccctttaacgaagggtatttggccccggtaacccccctttccgaccctaaataactaacccttttttaacattgcccggtattacgctctttttttttttttaggtctcccgggcgatcctattaggattgaagggtcctgttctcccctttcactttcccttgctga

SEQ ID NO: 9868 - DNA, 860 bp, Emericella nidulans
  unsure (1)..(860): unsure at all n locations
atcaaaacccttctagccgtagatatatgccgtccatgtataacgaaaacccgaattcttgtccatccaaatatccatcaaacgcctctagccctctctaaccatcacgcccgagtacgtcaggtatttaagacgtaggcgtacaagccccgctcattctttccttccacgctttatccattgcacaagtcgcaagtctacacagttcattcacaaaatccgcaaccagcttgacatgcatgagctcgttgaccgagtacgcctgccgtaagaaaacccgttcaagcatgcccgttgcactctttagcagggccaaatccttggatgcttgcgggtctgccgggttctggagaatattgcagaaaatggcgaggagggcagacatggggtagaaaataagggtcctggtgctgttagttcgagcttaaattcaggagagagaaaggtaaaatgaacagaaagaggaaaacgtaccaaaacacaccatcgacaagaacgtggcctgatgtctcgaggtagagtaatgtagagcggcttgcctcaacagacagagcgagactggagctcacaccgtccatgacgcagccttgtgtcgcccatgatttgcagcgactgctcgcttggtggattattgtcatgcaaaggtggtaattcagacggagaatgacagagtgcatgttacaatttggatctggtttctcctgaaagaatgaaagagtaggtctccatcttacaggcaaagaaagacgccaccgttctagttcgtcatctaattcacgaatatccttgagtatctcagcgtccgtctttttcatagcctngaggaatagagcgcgctgnatgctcgtgctttaatgacc

SEQ ID NO: 9869 - DNA, 830 bp, Emericella nidulans
catgtggcagccacggccggtgataattgaccccacgggacgctggtcccctggggctgactctcggttactccggacggcagttgaggggaaaggcagagcccttgggttgttgtgtcccctggggctcagatacatccttcaaagttgttgatgctgaagggttacggaggcgaattccttcgtatcatggagtaccaccagaattggcgactccggtgggaatctatttttcgggctctagcttcagaaggcatcaagagtgtgatgattgaaggtggaggaagggttctaagtgagcttctgaatcccgaatatgccgagtttattgactccctggtggttacactagcacccacatatctgggttctggaggcgtcggggtaagcccagattccaagtctgacgctcaaggcaagcccaacgcggcactgaacccaagagatgtgaaatgggtaccactaggacagaatgtcataatgtgtgggaagatcaaatctgattccaccagcacggtttcatcctaagaccgcacctggggccaggtccggaaggacaaagagcacagccaaaacccaatgcagaactcaacccatgaggtgtgaacggttgccaatgccatagtgcgtggaagaccaagcccaattccaccgacacagcaccatccaagaccacacgtgggccagggcttggccgataaggaggacagcacgaagtattatctttggctgaaattacaaggatggaaagagactcggtcgctagccactgatgtagactgggagaggcgacaaaaagttgaccaagctttgctctgcgatagatatat

SEQ ID NO: 9870 - DNA, 1912 bp, Emericella nidulans
agcatgtctgttccttaaaaaatcttgctcttatgagccttagaatctcagtttctaagttggcgcagctctatgacatacatttcgcaccgggtgagaatggggagcttttcgagactaggacactggatacatttaccactacactgccgccattgcacgttcagtttttaagtcgatgattgagctgagaaatcatcctcctggttggggacatgccaatggacagacagcgagtgttgcttggaccgtgaagtccgcacctcgctcaagtgactgatgagcgaggttctcggggcggtcgtcgctggctcataccagttatacccaccctctctcaccgctgaggaatgtcgttttgaaagccagactaactggccaaggagaataacggcccctgtgtagtataaccgcaagactggtgtcatgaaacctcgcgcccgttattaccttaaccgacaagccgggacaaccactaggcaccaggactgccattttcattcaaatacaatagagggaatcacaaatattcgctgatgactgttagagccaagtagaaaaccctgcagttgagtcgacttcgtccttgcaacccatcaggcagacgcttcttgggccatctcccagcttgtattgaaaacactctctcagaacgagacaaataggccaaggaacctgccctttctttttccatggggagtgcatagtggcagtgaaggaagataattccctggaaaggagtacgagacggtatggacgatggctaaaactcacaaaacaacgaaccctgtagtttcagactcgaagttacttgcctgatataccataccgacgctagaggctaagagaaatgggcaatagctgaggactgcagggacagtctttgggcgggttttgagtcgtattctcgtaaacccgtattttcgtactttcgtattctcgtattgtcgcatcagccctaacagctggcaggaacagtttttttcaatctcggttttgagtaaactgctccccacaagcttccaagaactgactcgccacccggttggaaacagcaataggctagaacaagagctcgttttcttttatgatcgccgtaaaccatgatgcatactatgttccttgtgctgcaggtctaattttccgaaacttgtagctcactggcaagccggaacgccggcagtattggggccgccttgtgtatcccagacctgtccttcagctcacggctttcgactattcatcattagtctcttcacgggagtaattcgtcaccgcaccctgtattgtagagcgctgaggattagtttctgttggcagagaccaggggtacgagttccaaccgcgaggcatgatctgaatactcagccagtggtctaggtcgaacccaaaatgcctcacgtttcatgactgcagtccttgatccattccattctcacatccaatgatttcattgtgctttgcggtgctctggcatatctaggagcctgcctggagaagtggtgaggtgcttcgctgtggacacactagcagttaaactgagtggatgaaggtttcacagctgttttcgtccttaagcgatacccaggcctggtgaaagcagtaccagtttgttcttggaaaaatcgagttcgcttcgcactgcgatgtaccgacgggaacttgtatgctaagcaacctctgaggcggccgttgaagcggccagggtagattcgatgacagaagagatagtaaagacgtgaaggtggcggcgaattgctgagaatgacgggcggaaaggcggcggtatagggatataatggcattgaccacagggtcctctcatagctcctcattgttcttaaatgctcctcgcattccggtggtaagctgtaaactgcgcttcgcaggagagccagtcccatcaaagatc

SEQ ID NO: 9871 - DNA, 1288 bp, Emericella nidulans
ggatggagatggcgaggatggagatggcgaggatggagatggcgaggatggagatggtaagggtggagatagcaaggatggagatggtgagggtggagatcaattttcgctgaccccaaggtgattttctacccatgggtggaattcttttgtacgtgatacccctgtagagtattctctttagtttttccactgccctgatttattaaattcttttatctttgtgagaacaccattagtcttctctgattctctgcaggtgaatatcaagatgtcatatcttgaacagagctctagtgttaggcttggtacacctctactcgagtcacagcagtctttacattcatcttctatttatccttcttctcctgcaatcgattctgctttactgcaaggggatcatggcaaagtttgtcatcgcagtcaatgtttaaacattcattcacgtagtagaacaatatcaagctgcagtctaatgagcaagcctgaaagccaaacgcttattaccctcgtccgtagtcgtactcaggtactccagctgctgcatctcactcatcgtgttccactttttctcgcgccgcttgttcttccagacatagcagaccttcgtcaggcagtagatggtaatgttcgctgttacaagggccacaagtgcgcggttgccacgccggtatcgcgggctatcgtcctcgcggtagatgttggaggcgatgatgccggaggattggacgcacatgttatacatggtagcggagacggtgcgggaacgcgcagtattcgagtttcgcgagttccagccaacttggattgggtgtgctgtactcatgttagtttgatgttctcctgggcttgatggttgaatagagggacggaccgtttggatagccgagtagcaaagtcatcactaccataccaccacccacttattcacggtattaatgtcgacaacgtatatatatataaggaagggcaacgcccatatctgaccgagcacggatataagcgtcaactcgttcgccctttcgccgtatacgccaggaggaccatcgttgtgatgtgaagaatctcttttgggatgataagcaaattggttgtgaaggtgtcaaaccctagcccgcgtagtgtgagcgtcagatactgctgtggtggcatcatcggggtctggaatgtcagtccaatgatataaattggccagaggtcgtagttgcagagactcttccagagcagcttgggagtgatgggctcgcggttgtgcatggttcctttgctgggatcatcgcggataacg

SEQ ID NO: 9872 - DNA, 1008 bp, Emericella nidulans
tgcccgctcctacagaggaggacttcccaacatacttgaagacgttgcgcgccgacccgttcgctctaggtcctgtggtgtatgaactgttggatcttcctgctactgctccggtgccgaatgagcggatgcccaagaagtactaccagtcgcccccaagtaaaatggcttctccggaatacgtgaccagcggacccccaataacgcacccttcagctggtttgtcttatgcaaggtcgcatgcttcgatctacaaccacccgcagtatggtcctcaggcccatccacgcccagttgaggcacgtattttgcggcccaggggcagagtcaggggtaagagcggcaaaccgattctcggtgttggtggtattgcggtcgaggacacgagcactattgccttctcggagcaaggaggacccgcgggtctatcggcctttgacccatccatccccggtggtgccagatatcatgtcacccctatccgggcttttgtcggctcaaccgggcggatcagcctcataactaaccgcgctaccacaaatgctaaggccccatacggcatcaaagaccacaaggcggccaagtcttctccccaacgttacacttccttcgatttgcgcgccagcgacagaagagtccccaggctagaccgagctcgcactttctcaaaacccgctaccggcttcgagcagccggagaagtcgaccgaggacgttgcgaagaacctcctgaggacgatcaagtcccaataaacgaatttgttgtcgcaattcttgtactttaaatccgaaccctgttttccgtttctcaattactgtacgaatagtttgggcttctgctgtaggactctacatcaagctcatcatgggcagcaccgaatacatatggcaataatcctattaactaagtaactacatacaagtgataagcattgagttgaaccccaaaacaacccgctggaagctgtaagtgatgactcagcaagcaccagccccaatcacgtggggc

SEQ ID NO: 9873 - DNA, 613 bp, Emericella nidulans
gataggatccctacctgaatagtagagccaagacgaatgtgatagaggggatggcgttggtggtggctgccgcgaaggtggcggtggtgttctcgatggccacatagtagagattaagactcagcgtgagtctagatttttagaacaatatttagttaataaattaactcaatgaatcagaatttccaatttttagaaacattagtcatatatacccgcataaggagataaagaatattttgagcagcaagataaacgatagaggagaggacttggagctgcaaaacaacgttaagaatttgagagcttatcgcagtttttttgtttatagagttatagaagagaagaacctttcaaggaagaatgcgaaaggggacaaggcaagagccgcgaaggcttgtctataaaaaacaaagacaaaagggttggttccttgagagatggctactttagagagcaatggcatgcctgcgtatacaatctgtacaaacaccattgccatgttggctttgtgctccatcatcatcgtgtaatagtgatgtgtgttttgtcttttgatgtgatgaagctcactttgcttctctcccgctatttatgcatttgtgttggtggc

SEQ ID NO: 9874 - DNA, 607 bp, Emericella nidulans
ggtggcctttaaaataccaaccagaatcatttgactcgttgttcctttttccttttttcccttctatctctcaactcctttcttctctccctttctccttctcctcccctcttttcccttctctcacctttccttctccatctcctcttcttcttctttctttctcacttctttcctcttttctcctttcttcttctccactctcccccctcctcttattctccctttactttctctaccactctctccttcattccctacacttctattccaactttctatctcttcctccctctttttatccccccactctcttcctactcttcctttcccctccacaatctctctttcttttcctctctttacctcttctctttctcttctttcctactactccttcttcctctctctacttctctattctcccctacttatactcaccatctaccctcccccctccctacctttctctccttactcctccccctacttataatcacacacttttaccccctcatccactctcactccttcagctccctactcattttctacctctctattctactcttcctcacattttccttaccttttcctactcttcccc

SEQ ID NO: 9875 - DNA, 577 bp, Emericella nidulans
taggatcgccatctctacaataagcttatccatcatagcatagcatctagcatcatctagctcctgtttggacttcctaggactcttgggaaaagaaaccttgggttttgttacattttctgcaacagatatcgggttttggagaatttgcatgtttggacttggttagtgtcgatcgacacccagttcgagtcggtcgacactgtcgggttctgtagtgtctgcgttggctggtgtcaatcgacacccagcagtgacggtcgacactggtgtctggtttgcaaaaactgcatcatcattttcattcaaattgacgattttggctgtaggaagttccctttgaagtactggatttagttgtaatccacatccttaactggataacactaatatctgctatatttgtagtcagatgctcggtccgattgttcaataattgaatcatcccattcatatcctcggataatgcaaccagtttgtgatcaaaatctgatgtctggatcttttgacttttgagaatctgtttgaacattgattcaatcatcctagtggtctcgggtggagggtgtgcatgtag

SEQ ID NO: 9876 - DNA, 622 bp, Emericella nidulans
aggatcccgatattgtatctaactccaaaccacaaaacttatgaagactacctgaataattagatttatatctttttatactctgattcaatcttttgttttgttttttcagtcttttgtttttgttcatcacttagattcaatatgtttgctaaagcatatttgtatgatgaacgaaagatttatatgtatggattctatttttttttagaaattttaatgtttgtttgtgaatttttaaagcctacaaattatacatttttttatttggtttttaaggtgatttaagaatttcgtgtcttcatcaacgccgacagagtttctccaattgatcttgctactagttggagagcttatagggagaacctccagccttctactgtacgtggaattcctgatgtcagcattaatcctgatccaaaatctgttgaggtactttgttcttctacttttttgtttctaccgccattctatctatctgtaatgtgttagttatgtgaactaaaacaacaggaatgattttctatgcctcccgtaatttcaaagttttgactgcaacttccatatcaatctagaattcccatggggagaaataaatcttatggactttgatgtccatata

SEQ ID NO: 9877 - DNA, 1704 bp, Emericella nidulans
gggagcaaaggcaggtcgatcggcctgtttcccatctcatttctccaccgtggacagccctaagacatccactcagctaccaccctgccaattgttctacgttcgaatgatactgtcacatacctgaggataaacaccaatatattgataattctcactactctcaacgcagctgtgtgcagtgcccgctggaaggacaatcacgtccccagcctgaactgagagctcgaggccggcggctgtatcgccgccacccgcgccaaggaggagtttggaggagccgcggaatatgcctaggcttttttagaagctttaagaatgttaaatagaaggctgtaagtaccatagcactcgtggctattgggatgaaagtggcggatggggatgtgaccccaagttccctgtagttatacgtaagggcctgtctactgcaaaccctcacaccaagcgatcgcttactctcttttcccactgatttgccgtcagaaaccgagttacagtttcctcagttagaggagaaggaaggacgttccggtagtggaggactggaagctgactgttcggtgcatagggagtaggcaggagaaagtaggtatcaacgggccggcatgacgtataaagataccgaattcgagcagatcgattctgagcctcgagggtctctgcggaaaactgctattcgtgagttcatgaaggtgagagtggagaataacctcggaagtctcggtctccggaagctccccgcttgcatcggctggctccccggccctaatacgatgccgactgttaggaagccaggaagggagtaaatctgcctatctgccatgccactatcttgatagagaagcagagtgtgcggggaagataggtcagaagctcatgtttgattacagacatcatggatggatgttaaattacccagaggggccaccatgcgtactaatcgtgctgcactacatcatacatctactcattgcataacctgagcctgacaacttaacatggcggaaccttttgaagacaagaagcccgacaacatggaaacctgccagcccgtgtgtagcatggctcaaggtaccgtggatgtctcggtcagtaataagctggtggtcgaccaagctattgacgccatcggcatgggccgatatcagtggcagttgtccctttccgtgcaggttcggctttctcgttgaccaggtacaccggctctactatatatctcggcttggtcaaggaagcagagctgatagatgcgagaatcccctgtagatgcttctgatatccataacaatcatcatgcccaatgccgcaaaagagttcaattctcagtaccaaaccctcctctcaggttcactatatgccggtttccttgtaggcgctaacgcctgcggcttactcgccgatatcctgggccgcaagacggtgtggcagttgtccatcttcggagtgtctactgtgaccctgctggcggcatcgttcccaaactggaaagcggttaatgtctggacggtgctttgtgggttgtttggcggaggaaactgtatgtatattctgcttgaagggctcactgggggaggctgacaggctacagtggccatcgatctcaccgcgctgactgagttctctgcgtaagaaatggtcgttcctccttacaggatcgcgtgtatatgggggctgggtaacccccttacagcactgatatgt

SEQ ID NO: 9878 - DNA, 610 bp, Emericella nidulans
tttgaggttctggccacgagaaaggttaactaccatcacccttagcttccttcctacacaatccattaatactaattaataaactaaacacataaaccaccaatatacaaacaccacacaccctcatatcacataaattcatccctcccaactctacaaatctctcaatacatacctttcacaatctaatatacacaacaacccatctacctcatccaataaactacatccacactcaacccctcaccacacaaacataacatacatctacaaaaaccacctcattaccaaccaacacaccactcattcatatcaattacccatcacctacacacactcttcaaaaatcatatctacacaatacaatatcactatcacaaatcctctccatttactcacaaaacaatcccctactaaccaacactataacaaaccataaacatacaacataacacacatctaatcctataccattacacacaacatcaatacataacactattctaagcaccccaataataatacacacattatcacatattcaccattccacaacctaccactaactactaatccacctatacatacatatcattcaaactactctcaa

SEQ ID NO: 9879 - DNA, 632 bp, Emericella nidulans
aggatccctagtttttttttatgtttgatgtcaaatagaaaagtactagtaatttagctgtctttgtattctcttttgcaaatgaaattagtcaattttggttggttttcttgtttagtctgttataaagggattataaaatccaattacatgctgttttccttgttatcaaataatagtactacatgatatcagtgttttttggatagatgagttaatatctcccttagtgatacaatgatatatttttatttcatttaaggaaaaaggctaaaacacagggttgcacatgtaatcatgatgttcttggatcaagaaattagacagataatgatgcaggtttgaatatttaaagattacttaacaaaactaaaataaaaactttcgaccataaataaaaaaagagagggaaaagaaagccaaacctagctggaaaagttaatccaaatggtccagtctcagaaaccggccttaaccgccaccggagattctccaccggccattaccttcacacaccccagaaaataaataaatggaaaaatatgtaactttctataagatttgacaaagtctacacttttaaggtgatgacttcaagtttaagcccacacattggtgaaaggcttttgggg

SEQ ID NO: 9880 - DNA, 1494 bp, Emericella nidulans
gatgtcctatctttgtcgagtcctccttcagttatctcatggctaacaatttcttgatatctacaggttctagcgtcgaagaagaggaagaagtaggctgggacgactattcggacgacgacaccgactctccctccacgccgtaagtctcggacaagaataaggcaaacaatgtcgctcccgcacaatcctgcgccgactcaaaaacactaaaaccaaacgaaccgcgccgatcaaacgaccagggttcccagccggacagcgagtcgagttatgacctctgtagcggcaccacgagtcgaactccggctagtcccaaggagaaatccaaagacgatgacagtgatgatgactgggagtagaaagtcctccatacctccttgctgcatatcaggcaggactgtgtgcacagacaaatatggatattttcgccaccattcagttccatctacttcgaccactggatgattgaagagatgcgactaggcgagacagaaggagttgggtcggtgttgtttcttctctcttttgctgttgttttccagtgggcgtccattattggtctttactttattttcttacccctagcgataatcctcggcactaagtacacagtctatattccccaaatgctcgctttgagtatgcatataatgcttctctggaatctatatatcaaacccaccctacgtatatgttcagtatattgcaagcgcacgcacgggttgaagctactcaaaacttatctttacattggcgaatgtcgtttagtacgccatgaaatgtcctctccaatgattcaatagttttgtatcatcttaataagttagtgagcaagcggcgaacctctcctctgtcgctcgtgagtatgcgctgaagagccccgtgtcccactatcacgcctcagatcagccgctcgtgaaacagaccgtcgcatttgcgagggggtctccggtgtattttcccttgagcgaagctgataaccccttgtcctttcactaggcgtgtaaggtatttcacttgactccctggtatacccaatagacattccctccggagtcccactgtactgatagtcttcacctcgtcgcttgacaggactctcatcgtacggatcccatcccacccttcgtcttgcgtcagcgcggagtcgttgacggtattgctcgtctcccccggcgccagttgtcgaagattcctccaagaaaaagttgagtagttcgtcgctgatggaaaggtgggactgttgttggaattgttggagagacatcaggcggaggagagtctcaaggagtgaaagtgaagtccggatgttgttgaaaagagggtttgagattgttgttggctgagactgggattttccaggctgtggtgaagctgtgcggcgcgattccctgtctgcatttatggagaaatgcgccattttctcggtaggatcaggcgtcttggtagaatcaacgtctgacacggtgtctgacatgtcgttcacgttga

SEQ ID NO: 9881 - DNA, 614 bp, Emericella nidulans
ataggatcggctaaaaacattactaatattgattcaattgtttattatctgatagctaaaaagtctttggccttactatttctgttttggtgtatatatgtatatagcaactctactgatgttacaacgcctgaggaagatggtgatgcaaacgccgaagaggaggaaaaagagttcattggaatgctcgggagctcgacgatcagcaccagacgaagcctaagaggtaaaggcaagggaaaatggagtaagctaaagggaccttgtaccgcaagtaaccccatagataaatgttggcgttgcgatcggattgggctaagcgtcggaagaagcttacacgttgtgtccgagggtttggtcacaggacgaccggatgaaaacgaggacgcatctatgtggttacaagcaacctcgacgaagacatggtgaaccctaaaccggggacattgcgtcatgccgtgattcagaaggaacctctgtggatcattttcaagaacgatatgagcattcggttaaccaagagcttctgattaatagccacaagactatcgatgcacgaggagctaatgtccatgtagcccatgcggcagggatcacaatgcagtttgtgaaaa

SEQ ID NO: 9882 - DNA, 572 bp, Emericella nidulans
cttcgactactgtccgaagaggttcttctctactttcacgatctgatcacatctcttttcgcacactacctcttcattaactttctcctctattctttttactccacttcctaccttaccaccaccttttccatccccactactccttatcccttactccttctcataccacttcctccacttatcccatctcctcttcccctcatttatctttcactcatccatcactatactattactctccctaacactctccactccccccatctccatcccttccttcttcatttttacaccaccttaatcctccttctccatctttctcactctcttttcttcaacttccttatcctcttccctttctttcatccctcttcttcctctatctcactcctccccctcaccccctctccttctcttccttccttctcttcctctactccttaactctacaccccccattcttctccttctaccttctcacctctcacattcttactctctctcattcttcacctatctaccttattgctactcctcctctctctctctcatcttataccttattcacc

SEQ ID NO: 9883 - DNA, 2179 bp, Emericella nidulans
acggccttgggacgttccgttagacccagtggtttcatggtcaactgtgccttgacgttctcctgaatagatctgacctcccgagctgtatcaagacgttgtggtccaactattctcagtcttcgaccacaagcatcctaacccccggcgaacagtcctcttgaactggatactgacaacagtgctctctggtagaatattgagaaacaatcaacccatcactaagcattccacaaactgcaaggtgaaaggacagttgctcttcctttacgatatgaagctgattgcattgatgacgatattacagatccggccacctagcaatcagcatgagaacaagtgacatcccccaaaagtagggggttattagatgtccaagcgggggcaacggccaggacattcaatctcagatgagctttgctgtcctctttcgactgtacaaccccttggtcggtcacctaaactactagagacgatcagagcgaggttgatgaacgcacaagacatccccattgcttatctagctcatccagcttagtgctaaaacagctcgcgattacagttgacactgctcgctaacaagttgtggagggaggggaatggcttaagcgcctgcaagtactataaccttttctgatgaaaacgccctaagacctatggcgaaaagtgtatgggaaaagagacggtaagaagcctgattgatcatttcatagtaagcataatagaaacatgaacccgctagccggcaaaaaactgctgcacgatcacatgactatgttaatcatctcggggagttgaagtaattctagactaggtgcggcgtgccatgggtaattaacggatttacagtatagagtctgtgctcaatgctctgcactattttggaagtaggaggctgtgaataaacactcaagccatgcggcgagtgagcgtgttcagcttcatcgtgttgctgtagtcatcgttcccgctctgcgatgtatcaacgggctgttcggaggatgagatctacgcgaatgaggcctctaaatatagactccttgtctgcgagccagaaggaaaatacaaaagcattgaggctcattgtactcatcttctccattaaaataccaatcatttgagagttacatcattcaagttacaacagaagcacgcaatcttattcggaacatgtcttattttcatgaatggtatcaacacgcgacaggcggacattggttatgtaggcagagtataccggcatctgctcaatccgccggagccctctcgaagggccgccaagccttgcagagaaagaagtctatcactattaatcacaggaagtagtctggggtacgtctcgagaccataggctctcctgcgcgcgggcaagggtcgaattgtaagctggcagagtcagtgctgtcatgtcaaggctgaatgggggacacatacaacgtatactcagggtgttcatcgaattcccataatggcggcttggttccccgcagcggtagcagtaattaggggctcacaccgttagtcatcatcagacacaaacccagggaacgtaccaaagaagatcgtaacgacattccggtcctgtgaccagttatatccctccataaccaactggtgtgctcgtgcaacaagtgtcaggccgttattatgattgaaagcctctgagatatcttgtccaaatgtgtatccagcaccacggggagatattccccagccgcaacgatcatctgggtcactccagagcagatcgcacatgggaccttcgtggggaacctcctggattcggtctagagatcggatgttatccagagtgtcaatggacggactcagaccaccgtgcagacagaagatctggttctcgatgagggcggtaaggggaaggtagtcgaagaggtcggtgaagtatttccagacattggcattgccgtattttcgcaggcattcgtcgtagaaaccgtacacctgtgtgatctggcgggactcgtggtttccgcggaggatggtgatacgctggggatagcggattttcaagcaaacatggagtgttacagtctcgacagaagtagtagccacgggtcgacataatcaccttaatcggtcagagctcaggaggccagatgcgagtggttgtgggggaacaatacccatgaaggaaggtaattttgtgtcttgggttttg

SEQ ID NO: 9884 - DNA, 1846 bp, Emericella nidulans
cccaccattacaaagtagcatcattccaaacaagttattccatcatgcaaggttagggacaggtcttcccccaaaatcgtacaagtcgctcccccttcaatctagccggaaagtgcccacacccgccaacacccggatagttgacagactatcccacctggacaacttcgaccagtcgtcatattcatcagacctccgacagaaacaagaatggaattcctttcttccgtcacagggggagtttgatcgttattcgctcatcattatgggcgatgagctgctcacgaaaccaaaaatcctaagaagagtcaacggcattgacggcgatcacgataagatgctggccaacctggagctctcaatgaaactcggtgatttcgcccgggcctcgaacctgatcaatcggcttcgtgatgaatttcaccctgtgggatcgaaggcgtatcttgattatcacagcaagctgctccagtatatggtctcgcatgccatccagaaacgagacctagatttagcccgccaagcacagcggtggttcgaggtggacatgccttacggcggtgttgaagcggatccaactacttttgccactatgattcgcatggctctgcgtttgttttacgggccaaagcgggatcgagctgttcgccggtattggggcctggcgaaaggaaaggaatgtgaggagcttgtgctgtgctgttcctgtgctctctgaggtcgagctcggtgaactttctgaggttcgttcgccattgcatagttttctgattttctcgctaacctattcgctctagatttgctcagcagatcttcaatgactcgccatcaacagcatgcaacctgaatccgcgaaggttgatgagccggtaccaaacaatgtccccgaagttaaggcggttgaacaaaaagggcttgggctttcatcgttaaaggattctatgtcttcagttttcgcagatgatgcgaaaaagattcccgccatggatgaggaaagcagggaggtttaccaacagcgacgacagcagcaacttgaagctgatgtcatgaagtctgccgtcaaccgctggcgacaagaaaacaaaatacagcaacagtttcagcccgatgtgtttgagaacggcaaacaactagggcccttgcttcgccaatggaatgcggaccttgtcgtgcggattgaagaggaattcaaggaaatagaaaaagccagaaccgcttctatgattacggatgaagttagggagcgcgttgactatggcccttatcttcgtatggtgaaaccggaggagctagcgtccttgacgatactcacgaccataaataacttgactcgcaacggactggacaaaggtatcaagctcgctccgcttgcggtagcaataggaaatgatgtttacgaggaagtggcattgcagagaatggtcgagcggaggaagaaagagatgaacagtgctcatcgagttaagctcatcaagcagattttcctcgggcgcaaggatcgggacaagctgaagggcatcaactggaaaaatgctcttaaatccatggagcaggaagagcctgatattgtttgggcaactgctataaaggcgaaggttggcgctgtattgatgagtctcctttacgatgttgccaaggtccctgttcctgttaacgaggccgcggcagccaaaaagatcaagagaagagacgaggtagtcatgcagcccgtcttccaacattcgtaccagatcacctggggacggcggactggttatattcatgtgaatccggagatgatcaaacttcttaccagggagccggccgaggatttgctgggtcgccagttgcctatgctttgcaaaca

SEQ ID NO: 9885 - DNA, 1416 bp, Emericella nidulans
gaaaacgagtaagaaaaggggaaggggaaacgttcgaacacgttagtggagagaagaaatatcaagcaggtcgaaggcccctaatatggaggacgggaccgaaaacggaagtgcgtcaacagcgggttcgaacgcgacagaagtctcagaagtcaagcagatgtcaaagagaattggggggattggctgcttcgataaactataacacaaggccgagtcaatcgtcagggagtccctcaggcagttcgtcagggaagaatggacgctctaagctctaacaatccggctagagacagcaggaggatcatatgaagaggaacaagaacaaggtgcgatcctgtgtagcatcacagctggtcctcgatcgagggctatctgtactcgtcccttttctattgtaccttctggtttctgactgggttctagaaactggatttcgaacggtttgaggacgcgaggggcgatgcgggagttttcgcactcggcggacgttttgccacgagcaaaaccaaaggacagcagaggtgagaacgtcaggaccaggaaggaactggagaaaaaccagagacggtagctcggaaccaggagagcctgatgagcaacggtatcagaagaggaacgggactaacaatggcccaaaggcgattgtctaggcctttctagagcagagaccgtcagagaaggccagggaaggccagagacacagaggcccagctagagattttcctggggatactgactgattgactgatagactgattgacagaaagtgttgacatgacagctggcttagtgactgtcgacgggctcgactgagctcatccagaggagctcccgatgggttccacggattgtgggtggtggcaccattggagaagtggacagagtctattctattctgacacaacgctcgcttacgaattgcatacggtccctggcgatcgaacccgatagttggttttagctatctcaaagtatgccatcttgagcccactagcagagactcgctaggcggcatcattgttgacttggatgaaacatgtgactcgatcgacagcgagctgtcaaaggactggccaaaggtggcccacaggaaacgtctgctactataggagtagagtatacaaatcacgacagataggtcaccattatggaattacaagaatttacaacaattacaagaattacaagaatccacaggagtccacatgaacttacatcatgaatgacccgcgtcctgatcgccctgcacatgcgatatggtgtcggtcgtctcctaacaggagccaagacgcagtctcacagagtcgcacagatcactcccttctagtatccggggaatcctgcactctgctcttgcatctgcgatgcgcagtccagcctaagttcatctggggcttttgctcgactcctgtt

SEQ ID NO: 9886 - DNA, 595 bp, Emericella nidulans
ataggatccctgacagatcgtatgtttggttagaatgaggaaacggatggccaggatttaacggtggctcatgtttatccgttaaggctaaaccttatccatattccggtcatccttattcttttagggtcgtgcttatccatttttggatgatgtttattcgaaaaagggaaggaaccaatcggaggccgattagtgtcccggagcggctgttggtcgacaattttaacgttttgattggtctgggccacctcgtgcttgccttggccgacctaatcaccaaccttggaccatatagtctaaaggaatgttatgtctcttatagactttgtgtctaagagtatggaggcatgtccttgggagatcatggattcgtagaaggccttacctaggttgatagaagcatgcttgcattagttgtccgctgcatattaggaaattcgagtctgcatgcattctgcatggtgcattatattttgcttgtgttgtatgttgcgtgttatctttgtttatgtcttgcttgttaggtagtattattgttacgtgttgttgctgcttagggggtaaggaagggtattacgataacactatatag

SEQ ID NO: 9887 - DNA, 225 bp, Emericella nidulans
gaggctccccctctagctctgcgctattcgtgagtgctgctgtcgcagatactttaattgctgttggtgctaatacggataagttccgtgcatttatcccagctcgggccgtagagacttattctgtggactccgctggaagcttttggtcacgcgtctatggggttacttattcccgtatgcgatggaatcattacattatgaaatatgtaccggtcgctggtt

SEQ ID NO: 9888 - DNA, 456 bp, Emericella nidulans
gaggatcccccttcacacaaacaacaacactcacatttaattacatgatcataaaaatcaaatctttcagatacaaaaccaataaaaatccaaactttggggaccagaagataactaaaacagtgagaaagagaccaaatgaatcagaaccgtccgatcaaaaactcaggagacagagtaaaggtgaagttttctttttctcaccttctaatagcttcagcaataacgggtggatgatgaagccattgacaatctcctacgggccttaaaagtgcgatgagacgtctcgctgaagatataatatcacctccaattctcacggcgtcaacttctgagatctcactgagactccgcgccgctacatcgtcgacgaactccgaccgatctaaagacataagttctcgaagagagactcagatagtagttcaagacaagacatagacatcagattagagg

SEQ ID NO: 9889 - DNA, 469 bp, Emericella nidulans
cccccatactactaataacagtaacaactaaagaaagtcacaaaaattaaagaatcaaatttgcagagatggcccaaaagcaatatatataagacaccatctttgtggtgtgtttacaccacagtctgctccttctctctgtacatttgctcagcccacgacattatccgaaccctctcattcattccaaagcttctctcagacaccacagtactgtctttaactaaagagttaacccatgacacatctggctcgtccctgtagtctctagctgcgttattgttgttgtttccatggattccaaaggaaacacttcttctcatcttattcagctcttcatccattcattccccattccagcttcccgattggagatcccaatccgagagattcgactgtggtgctgcatgagtagctggtttgaagctcaagctacgtttcgcaaaggcggttgatctcgctttcatca

SEQ ID NO: 9890 - DNA, 582 bp, Emericella nidulans
ccacgatctcagaggccatatatgcctactactctgcctgctcatatcacagtacaagaacatcagttggtcttgttacgagccagttccgaatgcttccactaagacaggtgattcttcacagcgattgactgggataagaacgcttctttcttctctcttctagcttgtatgccatctagacaccttcatgagtcactgacgcgcaagttcgtcgtgttgtgtttcgttcctgttcttgctgctcgtgtcgggttgcctgtcagccttcacaatctcccattatcacggcttctttctgtcgaagcatcctataccagaagaagaaagggatacagtcagaggccagagatgctaaaagaagggctaggatatccatgggccaagggaaactgacacccgaaaccgtctggtatgagaaaggctcaagcagatccgttcgggacgctctctaaacgggctgccgttgtgtcgagtggtgcgcccgtggccttgggactctcagacaatggtcgcagttctaagtccgactacggtttcatgatcgcccatccacctgtgctatgcggtctctcgtcctga

SEQ ID NO: 9891 - DNA, 1561 bp, Emericella nidulans
aatcttcgggtattgaggtctttgcgggggcttctatcggacctgatcccacgatcctcatttgagtgcgtgtcattcaagttcaatcaacagacttgagtggaggcgcaaaaaagcccggccggcgaattgcaaaagaagccggcagcttcagcgggccagattgacgcaatgagagcttaagaaatggcatgaagatcagggggcaggcggagagggtctcctgtagactgcggtgcgagttgattcaagtgacaagaggggaaaggcagagtcgagttagaagaggaacagtccggtcacatgtcttcatgtctcccccgcctctactttcacttctggcataaaacttaacttgatcctatttgaatttcacagcaggttctaagcgttggaggcgagatttcgatcgagcgatcgcgtaccattcggcagtctaggcaaattcctgagtaagatctctcatcccagccagtgtttaggagcgcaaagacatcaattgatcgcagtgtacagcatcgggtttgaatcttcgcagaatgggcaacccgacctgactctactgctctatgccgtgacgacttccagtctcgatcctatttaattacaaacaactgccttttctggagctctcgtaaacgacttctcgaggtggacccagaggtgaacctcatgctgttactgatcgtacctttgggaggaaaagagggtctttaatccccgccttttggccccaatcgcaggccctgaaatattgttatttgttgatgggtcaggaatctaaagcgttctattagaacgctaagctttaggcccgtcgatcactgtagacacactgatgaccgctttgcagaatactgtatatttctggcctcccatccttgtgcctagataggcccggaactgtcaggactaaagtggagaaccaaaaagcaaccgttcagctcgcagctgcagtctgcagcccgcaggtcatacccgtctgcatggacgtggcgtccgccattgacgaattaccgaccagcaatatcctgaggcttcttcacctagaggagtgatattgaaggacacttgtcccgcatcttgactttatttagggtaccagcagagttcacatgcttgggctatactctacggaacattgtggcagtgtacttggtatgcgacctgccaggtggggttgtctcaggtccctttgcttcatcgcgcttgcagctagtggtgctacatggcacagcatatgctgcccatctcagtcatccgagaatgtaccggggtcaaaaactaattgccttttaacagccagtgtacgtttcaattcccattgattctggtcacctaggttcggattcagatttggacggacttgaggggacccgaattcaactcgatttcaacctgcatcaagtggtggcacgtccaattcgctatggtagtagcaggtgggccagagaggagaatactctctccgaagtaggcaccttttgattagggtaaattaaggctcctatatagtggactgtttaaaggcgagtatccgagatgtcaggtcatgagcaaa

SEQ ID NO: 9892 - DNA, 856 bp, Emericella nidulans
cttaggatcgtcggtcgacaacgcgcattttctgaaccgcatcatcgatgttttgcgggaacacatttgcaccacggacgccctcgaactccaaccccgtcttctcgcgcttcacctctatccggcggtgctgcagctcaaccattgaaatatgcagccagccgttctggcgcagcgcgctgatagttcgttgaacttgttccatgcatggagaaaacgtgcagatatggacaggcgtatttgggtcaaggggtgattcggcgccagacggcgagttacggacgagatgtttgagcgcgagccagggggcgggcaggtcgaggaaaatagcgtttgccttaggggatgtggatggtttgccgtcagggtcattgaggaggaatccgtcttggtagacgtcgcggtgggttacttcaacgaggccgtcaagaccgtggtcgtggatctcgtcgcgaatctttcccgcacgttgcgcgtggaactcaaagctgcatactttgcctagacggcggcggcgctttgtcggtggtggtgtaatgtccgggtatccgttgaagacggcgcggacagcggcgtgtgtgaaagaaccacttccagcgccggcttcgatgagcgtggagcctggccgcacgccgagccggtgcaggacgtagctgtagtcgggggtatagacaacttgcgtgcggtggggaagagacgccgtccagagttcgggggttgggcagaggatgtggaggaagccgcttgctgcagcgacgggcgcctcgcgtgttagcttgctgctttcagtgccatcttcatcgccgccagtgccgctggcggaatcaagctggtttgctttgcgcttcttgagttg

SEQ ID NO: 9893 - DNA, 595 bp, Emericella nidulans
  unsure (1)..(595): unsure at all n locations
gcctcggtgtcaatgtcgagggctccacccaatttgtctcctctcctctccactcctatctctccttcctactaccactcttcttccactcactctccccctctctcctctcttctcttctcccctctttcttcccttccccaccctactttttccaccctcccctcatccatcatctctccttccttcctctactctacactcacttttcatcccctacctccctctaactctcactcctcatcactcccttctcactttacttcttccatacccttattctctcccatctatccttcctattcctcatccctctactctcctctcacagcctcactcattttcctccattctaattcnttccttctctcatcctcatgaccatctcccttacccatctttccccttcccacatcctctctattttctctcccacctcccttcactacagtcttcctactctccctcactacacctcttctccctcccctctttccttctacctttttcactactactctttatctctcttacctcccatcatctcccttctcctcctttcttctccttctcaccctccttcctccatctcctt

SEQ ID NO: 9894 - DNA, 630 bp, Emericella nidulans
gcaggagcttgttacacacatttgcccgccttcataattgattattattaatcttttcttcactactcttactccctctctccatccctcacatccatcattccctttatttacatacttcctcattctttactcatctctttacctccacacctcttactcatattcactctactctatacacttaccattacaccatattctttttctccataccttacactatttatcatactcttttttctttccttcaatcttttctaatatcttcctattctcccactccctaccaactattactctctatatccatccctccctcatactatttcccaaccctattccacttcattactccacttctatcaatactattaactatctccatacccttcacacaatccttccaatactctttcatctcttcatactctccttcaatcatcactttctttatatctctactatacaatctctctacatcataccataatcatcttcaaatcttcccttctaccattttcatcttttacctcaattcttacctctctcttattcttcatcccctcttcttcaccctcatctcctcttctttcattatatcttttctattctctctcttaatcctct

SEQ ID NO: 9895 - DNA, 269 bp, Emericella nidulans
ctggagaccgcccatgccgccaatctgcttgagcatctgaggtgggaggaccttgctcatctgctgtgcgttcatgtttctcgagagtgcactcatatctccattctttgggatcttgagtcccttcatcttgctccatatcttcgctagcctgttgtattctaccaacatttccattactgctcgaacatgccttgctgatcctcttgctaaccgtatcatacgtgactcgttaaatacgtttgggtctgagctgtcgagttctgcat

SEQ ID NO: 9896 - DNA, 2639 bp, Emericella nidulans
aggatcaaatggctcatgaaatggtccacgcctatgaccacctaaggttcaaagttgattggacaaacaacccttaggcatgcagcttgcacagaggtagcaatggcgtccctttgtggatgtcctatacttgcagacgtggaaggactaatggcaaacagattcgagccagttcactcagtggagaatgtcgatgggctcgagagttcttccgacgcggtcagtggaagcttacacagcaacaccaagagtgtgttcgacgaagggctgttctgtcagtaatggcaaggccgggatgtcaggataaaggccatgccgagaaggttgtgaatgaagtctgggatagctgctttagggacactcgaccgttcgacgaaatcttccggtagtggcatttaattattatggcacactcctctccccttctgctattcatttgcggcgtgaggcgctttagatgtattatagtgtatcataatttaggacgctgataagattatagatcctgtcctaagtagcctatgctaataagaaacttcatggctggaataaactcgacgcagaccacgaaactccatgcactgaaattgaactccaggaaacaagcaatcgcaccagacaacaaaacaccttaaccccttgctatgcaaatgcacatcatactttgccatccttcgacgcacccgaacctcgtttgatggtccgatcatctttgacgcagtgtttaagaatccagggatgcctctggatctcatcaagcgaaatgcgtttttcgggatcaagcacaagcagctaaggaaggttagtcacccaatgaaaagcatataatgacgacagtggtatacccttttgattaaatccttagcctcggggctaacaaaagaaggaacttgcatatctcctcgctgaatcctcctttgtgtcataaccggagtgtcttcgaatggcgcctctccgaccaggaactcataagtcagaacacccaaactccacaagtcgaccttctcattatagaagttgccctgggggtttgaagtgagcatctcgggaggcaaataatccagtgtcccgcacattgtttgccgacggttgttcggggcatggacgctccagccaaagtcgctgatcttgatctctccgtgaatccctaccaggatattctcgggtttgatgtcacggtgcatgacatgtttcttgtggaggtacttcaatgcggatgccatctgcgcgatataatgcgcagccttccattcagggaatcggtgctctttgcgtaggtgcttgtacagctctcctcgaccggcaaattccaaaataaggaagattcgcttactgtcctggaagtgtccgaacagtcgaaggacattcgggtgccgtaggttgctttgaatttcgatctcccttctgacctgcttctgaaccccgccctgctgcaattcggatttgtgcaacactttgagtgcacatacgaacccagatgagcgttctttggcgaggtacaccctgccaaacttcccttttcccagtggctttccgatttcaaacattccaagatgtagtttcctaggtgccggttgctcgtattcaccattctcgtctagattccgtagcgatgccggattttgagtgcctttgcccggggactgggaagcgttcgcgttcatggcattgaccttattgtcattggtattctgcaaggccagcttaagcagattcgaccggttggcaccacttgttagctgtcctgctaccccaaggccggaaagggatacagcggttgacagagagctctgcgacgccagtattagcaggggagctccttgctttcaatgagatatagccgctataccttgtgcttagggtagctggtgcccttattcccatttccggaatcatccttaacggaaaggtgctcgaagcgagcttccaaggtcttggtggccatgagtgcaaatgagagataatttatcagagcgcaaaggaaaaaaaattgagtacagcagggtggtctatggttctcttttaagcaagcattattgagtgtccatataggagtataattgaggttggagtcgagaagcgtcggtggtcgatggaaaggtatttgaagttcgagagaacaggtcggggtgtttgtagccgcagctagaaccgtcaccacagcaacctgtcggactagacctttctccgggaaccgcggggtattgaatgccgcctccgcagcgacccctccattaagctattgttactgtcatctgaacgatacgttgaagacgtggcaaagacacgaggggaaaccgcgaatcgcttccagacctggctattccggctatagaggagagacaacatggcgtccaatagccgcacggcttctgtacctatcgcggggaacacggccgcaatgtcgcctacctcgcagcggccagacaccattactgtcaagggcttcaagatttcaacccaaaagcttccaattctcaaggcagggcccattgaagcaatggcgaaaaagcttggtatcgccccaccagaaatgatctttggggataactttgtttctattgaacatgagaagagtggatggagcattcacttcacgctttggacgcttaaccgcgttgataaacggagaatcatgc

SEQ ID NO: 9897 - DNA, 1212 bp, Emericella nidulans
agggtgaaagcatacctgtagcaacattcacccgtttgaacatgggccagctggtgaagagactcttgtaaccggcagcttcaagcttcaaataactccagagactggacctctccagatgaggaaacctttccttctcagtacgtttttcgaagacgctctgggctttgatctctaggaactctagctgcaacacggggtcgtccgcctccaatccacgaaggctagtaagaaccttgagagcctcttcttctctgccatggtgtacaagccagcgaggagagaatggcataaagatcatgccgactcctaagatgacagctgggacgagttgaagagccaagggtaagagccacgcagtatctttttgagtctcaccagtgccaccgatgtggtttgttccgtagtttatcctggggttgttaggttgcgagagaataaatcgagacgaggacctaccagaaggagacctacccatacggttagcgatatgtcacaaaggggataagcctgttctaggcgtgagaaaactgaccatgatcccgaacgtgattgcgagctgctgcatggcaaccaaagagcctcttacctcaggcggtgctatcttcaagaagttagatcgaagctgacatccatcttcggaaagaaaatacttcagcgttgtacatgggaacactcattgagaggctaagagacacgggttagtgactggcagctctaatatatgcgcagccatgggtaaatgtaccttcccacacccatacccgtgacgaatcgacctcccaaaatattcgatgagcttccgctgccggcagccgcggtaagctgaatcacgacgccgatacagaaaatgcatacgtgcgcaaggatcgtgtattttcgggagaatctttcacagagtacaccggaatataaagcgccaagccaagcaccaagttcgaggatagctgcactcgcttagcctaggctgatagaataataagtgagatggtcatacatgtaagccatcctttctttgtctcgtttgtgaccgcatctcccatctgaaggctgttagtaccgtaaagcggcttgctggtgagaagcgaaagcttacatgctcctcaaaagagtgcataaccactaggataatagtgcgttagctcagtccaagtaatcatatagtacttgactcacggacgccagagaacacgcccttgggagagagaagtt

SEQ ID NO: 9898 - DNA, 569 bp, Emericella nidulans
gagaggatccctgtggaatctgcaacatcggaggcaacgatggagggtttgggatgggacagataccaccaggcaaagtaacgttgcctccacaattagacatatcagagacacccttcatcaaggcatcaagcacttgttgaatcgccagcagaattaaacagaggaagagtggaaccaggatgagtcgaacattcgtccatatgtgtttcctctgccatttcagggttcaggcaattagatcgttataaaaaaaaatattctaagtaacttgccggaaacggaagtatgaaaacatacctggtaggttaagttcttcctaagtaacgcattggcttgcgtccaaaaacttgctgggctaggattcaccattgatgaagaaagaaagaagcttaggtagtcgcactttgtcgtctcttttttttttcccttgccaatttaagtaatcgtttcttcctttaaacttgcgcttgttttaagtgccaaatatatatatgtggtcccaattaaatgcgaaaaatatgcgaggtctcaattttacacatttttcaagatggggatgacatgta

SEQ ID NO: 9899 - DNA, 534 bp, Emericella nidulans
gatcccctagattatgatcatatggtgaaagattttatcaagaccgaagtaaggaagatcgtgtcttagtgttttgtttgtttcttatttcttttatttttaaactttatcgtttggaattttcttacatttattttatttaaaagttttgttacaaaaaaaaattttggcccccaataaccctgggcacgacactgctcctgaatcacgtcatgcatttttactcttcttaccaaacaccatccatcaataaatgtgcatgaactaatgaactaattatatcatggcttggtttatcagctccatcatcgtatcctctataaatctttcacatatctaaaatctatcaactcatctttccttatttcgtaatctcccaaaaatagagagcaatataggaagcacgattatactctttcatcgttcaaattatcatacaaaacttcagaatatgaagaatcttatcttacgtacttggaaactgaacttaaaacttcgattcctcgaccccattcttctatcgtctttttatat

SEQ ID NO: 9900 - DNA, 1308 bp, Emericella nidulans
tgatcagggctgcgacggtgtgcgagatgaacgtggcaatcaccaggattagtgccgaaaacacaatcaacactccatataggctgaagtgctcgacccgtgaccgaatgtcctctgcaatggtatgcagcagcccagaagatgtcacagcctttccaaggcaaagtccaccagcggcgagaattatgatggtccaaagaaagttgttgaagtcctccttgtttaggattccagtgccaaaaaataggacaatagggatgatggcaattacacccatgtccccgaatatatgctccagctgatgactggcacaccacaagccaatcgtagtcaatgtgacgatactaataaagtactgaatgccggtaaatttatcctttagcggccggatgggtacaatggtggtatctcgaccaggttggaaggtgaccagaagcagcacccaaatcaacaagatcgagattatgcagaccggaagtgagatgaagaaccaagtgccccagctgatgctggggtacatgttttgaagagcaatgatgttctgcggggaggcgatcggcgatgctgcgccgccgacatttgcagcaagagcaattccaagaaccaaagctttggcaaagctggaatcaggcgaaagattccgtaacaaaggctgtatacgtcagccagtcatcagtaaaccgtcgaaataggaaccactaacctggatgatcgaatagcagagaaccggagaggcgacattgctaatccacatactaaggaacatgctcacgaacatattggtaagtagtacaatgcgatggttagagccggctttgctcaatacaaacaacgccattcgccgagcaatgtcgtacttagacagtgctgcagctatagtgaaaccgcctagaagcagcataatcacaggggtccacatggcgccaaaggcaacgctagtggcttctttaggtcctaaccgtttatatggcttctcgtctgatttcatgataccgagcagtacgacaaggaatggaataaagagagacgtcacaaagagtgggatcacctctgtagcccataataagctcacaaaaacgagcatcgccaggcaattctgctgctccggcttctccatgatcggaacagagagtaacacagaaaagacaactaggacgacgataagggtcgcaaagtttgcgctccatagccatgtcggagcactaatgaccccgaaaggtgtccgaagctgcttgctctgagccacctgttcgtcacctgtcggcgcgccaatgccgggtctgcgtctcctccaaggagtgtctggcg

SEQ ID NO: 9901 - DNA, 1612 bp, Emericella nidulans
gtaacagcgacattgaaaaattgagataaaagggaatttggcgccatggctgaccacttatacgagctcctgtgccctcatttatcgtcgacgaacgcaaacctgtcccaagatcagaccacgattcaatacctcaaccgattgcctacgctctcgctcgaggccttgcagacaacagaaccccagtcgttggcacaatcagcccattcgactcttctctcgctacaagccttgtctaaccggtctcacaagtccttcattacctccgcagacagcctatcgaacctccattcatccatccccaaattaaccagccaggcacgggagttacgcgatggaattccaaaactcgacgagaaagcagtctggttctcttcaaaatacagcagggcagcggagaatgctaccctcgagcatcgaaaaaagatcatgcgactgtcgcggaatgttgaccgcatctcggatatcctagaactacctactctacttgcgacacgcgtgtcttctgccgctgccaacccgggaaacgcagggacttcattctccacgacttattccgcagcattggatctatacgctcacatcaagcgcttgcagacgctgtacccggactcgcctctcgtgaaggacgtggctgtccaggccgaggacgcaatgaaagatatggcctcgaatcttattacatcccttcgtgtacagaatctccgccttgcgcagcccatgcgaactgtaggttggctacggagagtggcccctgaacttgatgcggccactggagacggcggagctagtaacggcggaggtgcccttggcgcattgttcctgatatgccgtctagcgaatctggtctccacgctagaggcactggctcctcttcgggagctcgcagaccaggagtcacagcgcaagactcgagatgccgaccagaaaaatggcactggttcatgggcggacggccatcagacagaaaagtacctaaaaaggtacattgagattttccgcgagcaaagcttcgcaatcgtttctttatataagaatatattcacgcccggtcagtcagagaccgatacgaccatcccagccttacaagggatcggcgcgcggatcaggactgcacaatcgtcccaggaagactgcaagcacgatcctttccaaagcctacaagcccctcttgcaacatttccttcgcacttggttcaattgttgacagagacgctgcgcacctacctacctaatattagcggacaagacggcccgggaaagtcttctgacccaggtgctctactgcgctgctagtttaggtcgattgggaggtgacttcagcatggtcttgaccgaactcagtgatactgaagaggaaggaaccgagagccttgctcttgagtgggaggaggttatgcggaaacaccgagcattagctggacgccttgaacagcttacgggatcgaacccaacaaactctacagggtcttcgagaggaaccttgcaagcaacttcgccggctgcagcgtaatattgagaacccggttcgattagaccagacgactttttcaagcactctataatatggccaggagcgtagtcttcgcgcgctagcgcgtacgctagggaa

SEQ ID NO: 9902 - DNA, 794 bp, Emericella nidulans
atcgaagaaaatcgaatgggatctgataaaggctgggagggagcgattgaagagggctggacctcgaggcgaggcggaggggtgggcgtagtacagtagtaggtaggccccgtcttgcaggtgattatgacgaaggaggggcagcgatcactgatactcaggcagttcagtcagatctagaaagtctttcctacagtaaataattcttggtcgttgctcaccggcacaccggacagtgctcaacgagtcctcgtttctttttctctttggtccggcctgttctcctccgccatgagcgcatgctggttcgattattgcctatattttgtactccgcagtctcgcacacctccctcatgtgtttgtatctcaacagcctacaataaccgagcatctcgggttcttcaggaacttcagcttctttgcacgtctctctacctcgggccctcgggttaatattctccattcccttcccatgcctgtaaatgatcataagaatgtcaaacggcctctaagcctctagcagtcacgctgtcctcacgctgtcctgaagaggaaaccggatgggtctcccaccacttagaaactggttaaaaaggcccgagtaggagtgctatgctccgggcctggggcctccaggccggaacccttggatggctgcattggggcccatttttattgagtcccgctagaagaaaccacgatgcatccagcctggtttgtacctaatgaacaggtctcgggatcctgtccttactctggttgggcctccatatcacaggtgccttcctttca

SEQ ID NO: 9903 - DNA, 742 bp, Emericella nidulans
catggcaaagccaagtttatcaaagtgggtggatctatcagtgtgggcggactgatcgagaatcttataactcgtcgattgtgaattaagcttaccgctccgagcaattgcgttgtatatggtccatgataaagagggatatacagaaatagtctactacgtacggtgttctacaatcgatgtatgggttgagctaattgagggcgggtataggtcatccttcaagccttttggagattcgtatatctcaggaatataacaatcatgtcctagactacattatagtacataagggtcttctatatacaatatacaagtgaagcactcgttgctcaatccaacaacactaccaaggcacttcgcgctatcgcgtggaaaatcctcagacttttgtgcggctctcacccgggtgagattcactctgggcttgctgcacatctggggcctcgtgcagccgctcatgtgcctcctcagacggagtttgcgactccgattctagtgcagcttcgtctgcttgctttgccaagacagcatctagaagctcacgatccaacatatcgctgggtatcgactcatcatccaggggttcatcagtcgttaactgctcgcgcctagagaacaacgccgattccgcttgaagatcgaactgatcctcataatttatcgttgaccaacttggctctagggtctggtgagggtcggagttttcggtactcgcgctcgaatcgggctcagcattcag

SEQ ID NO: 9904 - DNA, 426 bp, Emericella nidulans
aggatcccctgatgaataaaaagcccagtaaatattttccctctcttaataggacggactataaaaactgtaacttcctctgcaacggcttttctctgaaaccaaacgaaaaaaaaagctcgaagaacgcatcaatggcgtcgaagcttctaacgaccttcttcctcatatttttcgttctcgatatcgatctcgtcgcaacttctatgacatctgtttcatccgccgtggaagttcttttcgattccggctacttatccatgggactcacactaaagctcgcgaatcaagatctaaacctcgaagattggcaagaactcaccctcttcgcaccttctgatcaatctttctctaagtttggtcaaccttcgcttctcgatatgaagtatcagctctctccgacgagactcccaggagaaaccttaa

SEQ ID NO: 9905 - DNA, 545 bp, Emericella nidulans
ataggatcccagtcaatgccacacaactctttgaatttgctgcaaggacaggggcaagggagtcgaagaaagcaaataggttctctatcgcaactctgctctttactttagataaagaggattctgcgcggaaagacagatcagcttctcaacgttctcttccagctatcaaggagacgaaaagctatgtgaagtcaaatcaacgttcaaagtcatgtgtgattagggaatgaatgtagagtgagaaagtttcgctaaggcgccgtctaacttgagctctctccctatgtatggtcgatatcttccctctgaaaatgctgttcgggcgtcaagtgggaattctctttcaagtcaagttcacttaccgcttccactctctcttctctcttctgtcgatgcagctcactccggggcaagtcaacggatagatggcctgctttctcactttcatttggcttattcgatactgctgaaaggaacgaaccgaacctgacctgcaccttattttcgtaagcaaactcccattgactggcgagttattttta

SEQ ID NO: 9906 - DNA, 1120 bp, Emericella nidulans
gaatgactcccgcgatctctcctcgtatatcgccgttaggatccggcggatttaatcgatggacttcgtcgcgtaatatttgccgtattcgctctccccgctctccaccccatcccgctatccctccagactccgatgcgctcgagacacccacgccagacatagtgcggccactaagttccaagctacagaccccaacgatggccagccagaggagatcgttgtcttcacggcccaattctgatgcaagggagtacatgatggaggatataggttcggagtaggaagttccggaggaatagtactggtgtaagatgctttcgtgcttgtgcttcagtcggagcaaccgtcgtctcaacgaacgcgcggacggctcttttggctgcgcgggcgaaggagaatctgatacgggtgtaacagagcgcgatgagttggaggaatcatgtctggtgcgcgctcgtgtccgggtcggtgatgaagctatagatgatccctataccaatatcagcagtcaacgagtatagcagccaggatgagaacgtacagaattactccgcctccgctgtcgaggcggtccatcgtcttcatcgaactcctcgtcctcatcatcctcccgggaccaggacttgcgcttctttgagtcggtgctcgacggcggctcatcatcctcgtcttcatcatcgccatcatcatccacctccggcatatccaacaacgcacaataagcctctctctctctctccatctcttcctcgatatccccatcatcataaacaacaactccgccccttccactcccaaacttatacgagacagtaatacatcctttatccacaccaggcgtcctccgcatggagtcttgctgctgcgtcccctctccgccgccgaagacattcgccaaattccacggccgcctcgcgtcaaacacccaaacttccacgccacccatatcgtccgccccttcttgatcttcccccacattcaaccctaatatctcggcgagatccacgagtccaccaacacctagacaaacaaccacgcctccactgcctccgttgcttgtctgcattggccggactagctcctcgcccgcgcgcgcgagatcaccatacccagatac

SEQ ID NO: 9907 - DNA, 516 bp, Emericella nidulans
agaaaatggtatgttgtataagagactgagactcagacttcagcaccatattggtgcagcaggcttcgccattaccataatagtgaatataaacataacccaacttctgactgaccaactgagctacaggttgagcttctgttcttacatgtatgacggattcgttactaggaagactggcctctcacgtaaattaaccactgtgtaactacatcgacataaagacggagcctcacactataaaaacagcggcgtggaagaactaatagaattctgacgacgccacaatctgactaacttaactaccacaaagtgaaagctgaatacacacatatgttacacatagagaatacggctagtactgagacagacatacttgactaggaagcgatactatatgaaacccaatactggacgccaggcagacagtctagagtcttgaaccttcaatctactcggagtcgtaagcacgagttctaactcaccaaccaggagcaactgggatagatagtcttg

SEQ ID NO: 9908 - DNA, 1295 bp, Emericella nidulans
tttcacgctcgacacgtctaacttcggaagcaatttgtggcacctggtcttcataagcctgcagttgacggcgcagtccttcgctcagcgccagtatcaaggctgcgaagagccgcatgaggatgagtatcgatatcgtcctgcacacgtcgaatcctatccattagactctcggcctcacgacggtcccgcctgtcaagcgcgtcctcttcctccgcacggttctcatcctcaaaatcaaccgcatccaacatgatctgcgtttcacgaattttcttcttcagttgttcgacagacaattcctcctcagaagcttgcgaagccgcaggtgagggtgtacggccgctgtttccgacgcgccgacgcgcacttgagcgataaccagcagctgcctcgtcattgtttttgaacagtgtagcatccttacggccagcaccaggggatactgctccgccccggaaagaatgttctttcagataactgacacctgtcttctggggctgcaaaaatgcacctgtagcctttcgatgctctgcatcttgagaaagcatagacttgatagtgccgattgaatcattcagattccttgtggatggagggatgagttcaggggggagacggttgggaacaggatacccattgagttttctgtaaattaaatgcatggccacggcaaactcgtccatattgagccgtccacgattatgagggtcagctaatgtccaaattgcttctaaatcattcctagccaacccgctctggcccatgatttcaatggcggtatcaccaccaatgaaccccttgtgaagaccatcccaggctctaaaaaggtcatcgtagatctttttctcttccttcgtgatagcccaagggatactcgcatttccagaaagcccggcggcagaaaagccgccctcgcgacctggctgaggcatcagctgctgtttcagcgcctcaatgttcggcagtcctgaggcgggacgattgacaaagccccattgaccaggaattccggtcggttgtgctaccagtccaccggtctgagagggacttagattcgaaccgaaaccagttggcataggaggcattggtggccggggacctgtatagcctgttggctgcggattattcagaatacccatttggggaggttgaagattttgtgatgaggcctgtccgggaaatacggtggcctgcgggacaaggccctgattttgaccttgaactgcaacattggcttgatatccggaagaaggtggaaagccggtgggctgtgcagtgagtttttacaggag

SEQ ID NO: 9909 - DNA, 1118 bp, Emericella nidulans
agtcgacgagaataagtgcttatgagggtcctcgaggtgatccaaccttatcaacacctgtcgtcaattttcggtgaggtcattgcgatggagtggcgcaagacaccgagaaatagcactgcatatttgatccatctagcttgtccagtaatctcaatctctgcacttcacttgcatcttggcatagccaatctcaagtacagatagagcaatcgttgttagagcacactctgctagcatctatcgcaactgatgacgacacgtgcatgaactactcctagtttcctgcccaatacttctagtgctcattaacgttgctgataactacagtgtgtgatgcatgtgactccgtgactcgaggtcgaacatcataggtattttcgcggcaaaactcgtttccttgtaggtctactggtcctttcagctgtcacatctaggcacacctaaggcatcatgattggctctttttctgtcagaaaactcggaacaatttcacgatcttgtcttcgcttatagcaccagagacgggactctgacttcggtacgcccaacatcggcctccatatgcggttcgagacataactgctgcgaagaatagaaagcgaggagttgcagtattgcaggcgtctgtactgtgatggagttatattctcttccgtgcgttgaatgttaccgctagttacttcgcaatctgttgacatagtgatagctagttatttctactcaggacaatctcatgagctatagctcctctctagatccaggcctcgagggcagttcagtgctaatgttgtctaagaatcagtcaccacgcaatgaatgactcgatttctccactcgaaaagaaaagatcttgtttctcacaatcctatgaagggagctaagggcacaggaatagtggcagtgcgggaatgttggatcatagcgttcctgacttcctgtcattacagtcgtccttgcgcttcttctctggatagctccaagtatgtgaagtagataaagcgtgtcctgccataaatgccagagtacgagcatcgagaactagtaggaaccgatttttgatggtcagttcgtgtattgttcaacaatttgcttgcgtgatcagcctaataactaag

SEQ ID NO: 9910 - DNA, 1718 bp, Emericella nidulans
tacaggtctgcatacattgatccgtctacatatcctcgctgcattcgtgactgtccaacactaccatactcatcatccaatgtcccgttaaaatcaaatcactccagaggaaactaacccatatctgaatttaaaaataggatgatgctgaccgttgaacatgttccgaaacaggggggtatatcgcagtaacgccggggtagacataaggggccaaagtattaatataagagattgaagagaacgaaagtggggaatggatagaaaagcaatcgtgaaaacatcaattttaggacgtgcgagccgtctctggaagcaaagacgacggaccggtgtcaagctcgcccagttggttaggaaggttgatatcgcccacgtcaactggagactcaacttgctcaatgtcaagaccttggatcattaaaccagccccctcatcctttgcggcggcatcttcgaccagggcatcttcaacggaggcatcttcgactaaggcgtcttctgtcggtgtctgaccttcgggcatcaaggccggaggtcgctggttactcatctgggcctccttaagactgatagttctctgcttgtttgttgtctcaaccggaagatggatgtctcgctcgatcgtcgccttcatcaacgcggccatccacttgcgaccttcttgaacactatcaacctggaagtaatggaccgcgggtttcgtaaattgcaccgtacgagttgtctttggcgggataagcttgaagaagaacgggccctccttgtccgagcgcgatccgcgcctggattccgatgtcgagccgttctctgaaaccgagccattaccggccggaacgctacctgcaggtgatgtaggggagactgttgcgcccgtgatcgtggcatgtaacgcaacgattgggtcattgtctgctcggagaactcgatgagctgtgatatcgattaagcctcgctcctcaatatcgctttccgagtagtagtatgaaaggcgacggccacgcaacacaaacagccggggcttccaagttgccatcaggtttgaggaccgcttcttcatccatccggaaaaatcgcagccatccatttgttcctgcggtgtctttttctccagaccccgtacataagcactggtatctttcttggatttcaccccagccttgacagagggccgagcccgtggcaccaatatgcctccttccgcggtctttccggagccgtcggtactgtgtcgctcggagctcttcgacgtcgaaggggttgtcgaccccgttcgaacagaggccgggtcagtatcattcacaggggatgctgggactgcactggcatcggcacccttccccgctgtatcggacattcgaagcccaacagcacgtcgaaatcgaggcgcggcctttttgaactgctgcaagggctgtgctgaagagcgtgactcggaatcttgcttccccgccctaggagcaaacgaagagaggaatccaccagctgatgctttggacccagagctgtgaggcggttgctgggaagagatgcgggtgcttaaactccgcaatcgacctttggaggaagggagggggtatgtagaacctccattcaaggcatggggaggcgcatccgcgactgagtcgacgctgctgatccgcgaacgcctccgattggctctgaactgctcgtcaggattgctcgactgtaatgagtgagcactaccggccaccgat

SEQ ID NO: 9911 - DNA, 1006 bp, Emericella nidulans
aagtctaagtcagttgacatctgccggccactggtcgttaatgggtctggtgtcggaggaaggaccgccgtcgcgatctgatacattgccatttcgctagaagtttacggtccatgccctaccccgttttttttattatttatctcttcacttatgtctcaggtgatcacttctgaattgctccttggttcttgtctttaagcttttttgtcatacagcgttattacttcatataggtgggttgaccttgaccatgttcagtagtttaggcgtatagatattgtcatatatatcaaaccacactctttccctacggcatgctcatatcggtctcatcatgcacctcaacgcaacaaatcattcatttcattcatcagtcatcgaatgttacttagcgtagaatacatcgtgtcaatcatttcccttcttttcctggactcaaggttttcctcgatggggcctgcgctataaacaaggttatgccgttccgctgtgcttataccagcacccgctcgggccccgagaacctgaacttgaccagtttcaccgtatcagtcattcaatgggtcaatcatcttatcatcaaaaatccctccataagctgaatcagatgcagaaaacaaacgcaacgaaaaacagcgatgccatgcataagacgtacgagttttagtcagcatgcaacagacacccgaacaggccgggatgaggaaaactaaacaaaaaggtcaataaaaagaataaataatacaagaaccgaaggttgcatgtacagcattcgctagactccgagatgcaggcgaaatgggtcgcgtccgaagcctggccggctgggtatgaaataagtgggaagtattattaatccatcccagtgcagcccgggggactggagccgaatctgaatttggattacatacagcatctaaattctgatgcgtggtagtgtatgcgtgtagttgagctgtggagaatagtgcaggagtgcgaattatttagcatgatctatcag

SEQ ID NO: 9912 - DNA, 565 bp, Emericella nidulans
  unsure (1)..(565): unsure at all n locations
ggagccttttaactaaggggggcggcgataacccagccaaacaaaatgctggcttgaccgtcaagagtccaatgacccctgtttcacgccaggcgcccctctacctaaagttataccactgtcctctggctgtatgcataatgtgtgcaagcactcttgacacaccataagggatgcctctttctctaataacatcaccaccagcctaatacccgctctccgcatgtcatcattcttccatatctaatatanctcaacctatcctcctcctctcttccagtcctaggcccaacaaacaactcattcaccgttcctggctcacaaaactctctaccactcctatctcactttaccacagtctcctcacacccgccctaataagtaaatctttcctacctatatcaccttagttcaaaatatatagcacatcgcctcttcctttgatatccacaacaccaccctatctcatatataatcccccacccctccataaagttcaattcccttttgccacctatacaccacttccccctattactcctcatcactatatcctttatacaca

SEQ ID NO: 9913 - DNA, 517 bp, Emericella nidulans
ttgcagtgcgtattcctgtcctgcagcagcgtcttgaatcccttctccaccacatcttccagtttaattttatccgtaatcatggactccggtttcagtaggcccttcgagatagcgtcgatagtgtcttgaaatgacttctcatcgtataatgccgagccaagatatttcacctcgtggtacatcatctcgttgaccttgatctgcggtttcttctcccacacagcgacattaacgatcgtaccatggacgcggcaggcaccaatggctccgtcaagcgccttctccacgcccgctgtgtcgaagaccacatccgcgccgacgccgtcggtcaacccgtggacattgtctgggatgtctacttcctaggatcgaggatatgcttgagcccaagtttttgcagacttttttggtcttttttcatccctctctttcctgctgttgcatctcttctccccccctcgctgctctcatcccaatacctcctctcttctcccaccctgttccttcctcaccg

SEQ ID NO: 9914 - DNA, 565 bp, Emericella nidulans
ttctgcaagctgatcccgaccgcctacctcgaggggtagctcacaagctcaggcccgcctcccaccggaccggaccagccctagctagacgaacaaaacgccagccacgaggcacagggaatcacattgagaccatacgcttacagagcaagaatagcaaccgccagccaagagcaacaaaagaggaaaataaaagagactagaggttgaccgcaagcgcctaaggtcgaagggcgggcacatacccatctagaggccgagcccgactttgtgagggggacccacagtctacgtggacgctgagaaccaccactacccaatagataacaggaagggctaacccaaccaattcctatgcttgagaaaacgcccggagctgaaccccaccgtaagaagccacaaagcctagcttttccgttccccgaaaagcatatggttacccaagcccaaacgttagcatagccacctaggtcgcctaggtagcattacgttttcttgcctacccgaatggaacagggcctcgtgggtcccaaaaactcggaacttcaacttcgggaaccaaccc

SEQ ID NO: 9915 - DNA, 1823 bp, Emericella nidulans
acctccagtttacctacacctaccaccatggcgcccttgaaacccctcctgccgcctctgcccattccagaggggcaaaggaagaacccacccctgcccatccgcccaccatctcccaccgtgatcctgcgcgacggcctctccctttcgacctggctcctccttggcggcgtccttcaaggcgccgcagtcgcagccttcggctacagatccctcctcccgacaaccctgatcctgggctacagagctctcgacacgctcctcatgacactcaacctcaaacgcaacagatacatggacggcgtcattatgccgaaatacagcgcccagtatcccaataccgacggttccttcgccagtactttgaacccgactacgggctcgcaggacggcgacccagccgccaagccgctgatcgtcttccaccttggcgcaagatgcaatcacccactgggcctgctcgcgccgggttataaagagctgggggactgggccgagaagatgtatgagtccctacgcgtgaatccggacaaatatggcctcctaggcatgacgcggtttgtgggccagtcggatgccgcgggaaacgaaacgcttgttattatgtacatgcgtgactacgaggggctgcatcgctttgcgcatgaccagctccatgcggatggtgtgcgctggtggactgggattgttaaggcgcatccgcatctggctatctggcacgagacgtatgtagtgccgaaagggtgctgggagaatatctatgcgcagtcccaggttacggggatgggcgataccttttttcctgtaattgatgaaaataatggggcgacggagtgggcgaggggtattgtggatgccaaaggggcgcattgaggactgggtcgagaagactaagaatgaagcatctggaagagaacgagagcgaattggaagcctactatgatctaaccgacggggggaggactactctatagacatgggatatctttggcctaacgctgagagtcaaagacagctctcttcaacaaggtacacctctcttgttggatatgctaaaactatcgctaaaactatcgtctgtcagtttctctccaatcaaaaagcaggatgccgactcctagactggaccaacaatgccagacaaaatgcgattaacccctatttccaaaaatagttagttactatagtgggtcaggtaccgagctaaaaagaaaaaaagaccgtcccggccggcaaccagtgcgaccttcgacgacgacctctgataagaaccacatgacgatatgttcacgaacccctttttccgttcagcaaaagccgatgcagcctggcaccgcgttgggttgctctccgacttccctgagatctctccagattccgactgccaggtcacatcatcatgcaagacgttccgaatccccactggcacaaccgagaaaccggttgagacggatattggcctaccgggtgacctgaaagaccaagtcttagtgtttcggtataaagggaatgttcatgctattgatcatgtaagcctaaataccttcttcccaatccagatgtatggtagttagagcgaagtgtctgatgagtgcagcaatgcccgcactcttcctaccccctctcgcaagggagtctatttgatatagaagactttggcatcacgctcagtgcggggataacatgccctaagcatgggtgggggtttgatatcttctctggcaaggcggatcgagggaactacaagttgaagatctgggaggcgcaagtgagagatgggccggatggcaagcctgatgagaaggaggtctgggtgaggagga

SEQ ID NO: 9916 - DNA, 1855 bp, Emericella nidulans
  unsure (1)..(1855): unsure at all n locations
gcttcccatgttggtaataacgagttcaattgatgaancggatgtagggaggaaggccaatgggaatcacatattagatagatctatatatatccatgtccatgcatgtggtgtgacctggaaggctgagtccggactttggattctcctctggagatgtgattccatcccctccacgcggagtcctgcatgcaatttgaaatttaatccaaaatccatgggatatgcagcagggcagggagtgacaccgcatcaaggtagatcagtgccgtttccacgtgcttgacaggctcgccaccatatcgtctgccttaaacgttcacccccggcctagcatgttcagccttcagtatctatgtgtttaggctgatgctaagcctgtttggggtgtgttcgctgatattttgtcccgggtcgagtgtcagcttccttctgcgcgaaagatattgcgtagataagctctaagtatctgcacaatatttaaaacaagaaatgaacgggatcttctctgtacttaattacataccattatatttatttccttccttaagactagtatagcgggtcctacaatctcagtaacaagcaacatgaagccttcatcaaacatttgtcaagcaacaagcttcatctttggaggacacatcggcccacagaccaagaattcactggaaaaagaaatccgggaggttgccaacggcccaaatggaggatggatactcgataccctggccggcatgccacggtactgggaggccgtgacagagaagattcctgaagtggccagcacgatgcagggcgttcaattgctgagcgaccttgaatcgtggtttcgaatcggttctgactcagttgactcgctcgctccagacgcggagctcccagatctatggctcgggattctgatggtcatcattcagctgaatcagtattggcgctacctggaaagtcgattcgctgacagagccgtcgacgacctgcagggagagctaatcaaggaggaaaaggtcgaggcagttgggttttgtgctggcatgatcgccgccgtcgttattgccagtttccacactcgacaagaatgcaaaaagtaccgcgctgtggccttgcgcatagcggccctgatggcaatccttgtaggtgctaccgaggagtggaccaaagcgatgggcaaaggcaggtcggtcttgctcgtcacagcgtggagaaccctcaagcagggcgatgatatggcgcgcattatacaaaggtgtttctgatgcttaatatctggttccttgacgacttcgagctaccgggcagtttagaacgcttgactcaagttggtccggagttctaagcgatggttaacggtttcagttgttttaggggaggttacctcccacggagagagcaacctcttccatgcctggtaactcgtccaccttaccctctcttggatctgttttgcagtttcatggcataaccaatttgttagagacgcatgttgggggtcgcttattgtggaccttaatggccacctatcttcttttacaggtgtttctctgttttttgtaccattctctcggtgctttttcttttttagggttctcatttttttcttgagtcctttcttttttatttttttactttttttcaattctcttttcctttattcattttctttttttcactcctaccttctttcctttttgtatctcttaattttgttgtggtcagttctctctatcttaattggaacaccctctcttttctttagattactcaatactttaccatnggttagtatttttttatttatcttctggtcttttattactcagttaatttattctatgttctattttcttcttcattc

SEQ ID NO: 9917 - DNA, 1060 bp, Emericella nidulans
aagggcacatgcgtcacaggtgaggtcatgaaagcgcttttggagtaaacgtgtgccacataggagaaagggtcaccaggacggtataaagatatgaagtcaaaggtcgtcaatgattcgcatcgtgattgtttcaggacatcggggagtgcggatgaaaagaggaaaggacatgtttggtggaaggatataacggatataacaggtggcgaagtgagatgtttgatagagggaggcgagtaggcacggtgcaaataccctcatgctttgagaaggataggattagccgaggagataccctcaaaagcaggtgcgtcatgctttttttttattttgtcaattcagttggaatccaggttcatggagaaggaccaacgctcccgtagccacatgacaggcatccctcggcacatctggtagagcagggaaactgcacgatagaagacatgttaaagaagaaacataagaggtaacaggcagagttattaggaaaggtgaaattcaagcgactctggtattcaggtagagaaacaaagcctttctggaatggcgcgatcggtcgactgtggacattcgttcatgcgagcagcaaatcactcttgcagctgactgcggcgagttttctcggcctcaaggttctcgtacagaagatacagggccttttcgtttgcctgggcgcttcccatgatggtgaacatgcgttctccggtttcatcgtgaggagccttggcaatagaaatacgggccccggagctccggcggatctccgtgatcttggttccacctctgccgatgatacatccaaccatgtcagcgggaatactgatgttctgcgtctggatctcctcgccatcctcggtgacgagagggtagccgcggttgctggtatcagggttggaccgtctgccatacccgccggactggtcactgaagtcagcgccgttaccggtacggttgtaaggccggctgttgtagctgtcgctattgccacaattatgctggatcgaaccgctaccgactgacgaacgcacggcggggttgtaccggtctacttccgttg

SEQ ID NO: 9918 - DNA, 505 bp, Emericella nidulans
tactctaaagctgtctctcctgctgctcgcccgtgctcttgttcagtttgagcgtcgaatagctccccgggctgtcaacgactaggaggattgtgccccgttctaggaggtccgttgtccggagaagaaaagatgtagctttcgacatggaggttgagaagagctcgtttagtgtgaacataagtgtgactatgtttgtccgttgggattggaatagggaagcgaggtctgggtccgagagagtcagaacatcgaagcgcttgaagtcgacggtgaaatggctagggtgaattcgatctcctgagggagttgaaattgggaggagaggcgcaggatgagattttgagcctatgactgtagttgataagatagttgaggataggcgcttcacgacagttgaccaatcggcgatatcgacagccgtgatggacagactggaagatgtatctgattgttggaccgtttgtcctgactcggcatgttccttgtacctccgccaccttga

SEQ ID NO: 9919 - DNA, 2533 bp, Emericella nidulans
taggcgccgcggccgccggggtttccaagatcgtcaacctcgctttggtgaagcagcgcatagtcttcatcacgatctcggacggatgaccccattccggctcgcgagcggaagtcgtcctcttcgtcgaagtcttgggcagggttcgaagagaacgcggccttgctctgcgctgcaaaagtggggtcggagaagcatctggtagagtgccagttcggcggaagtgcatgacattgcggaaagacatccatgccgttatgagaaagaggatgctagagatcagcagtgtcagcaggtactccagcagtagaagggtggggaacaaacaagatagccactcccatgatgcacgtggcggtgctaacatggcatttactggcgctgccatatttccagttatcgcaaccacttttcttttcatccgagttgttatccttatccgagctgttgtcgtctttgccctcgctcttgccctgtgccacatagctggcaatgcagacccaggcgataaaccataggaggacgtagagacagtcgacggtcgcaaaggcgtagacgtttccaaaccgtcgagcgcgaggccacatgggcacagcgactagataaataagacctgggatgctaaaccaacactgataaaccgaaattattagactggtgttcagaccatcagacaatccgagagacagctcaccaaagcgaaataataggccgttcgcccatcgatgccacctccttttgtaaatacagcaatagtgagagcccatcccaggaagatcaggaagccttggaggccatggatgagattcttcgtccgaccgggattaaatgacggccgcctcatcgtggagggtaaatttggagatctgtgttgatgctttcggagaaagagccagaaaacggagcgatgtgcagcaaaaaggcaaattggatctggataaaagttcggcaagatcgggcgtgagttgtgagaatactgaagttgggcgaggcgtgagattcggtccccgctggtgtttacggcgtcgctgacagctggtggaacggggcaacgcgcggacactactgagtaaccgttggcgctcgtcagacaaaacacgcgaaacgaaatttcaatcggatcgacaaactcggtcacaggaatggttgaggagatgagaagaaggaagggataaggtttacttttaagtgaaattaggttggaggcagtgcattcgaatattgttgcataacttacaatgctggaatctaccatgtacagtcgaaaaacatctgccttacgtcattcaccactttatgcttcatctttggaatattttttctttgctgctctcggttctcctgtatactaaactcgcgagatttcccctttcatcctttgtccttcgcgacgctggcaataaaaaacatgtaaagctgttgctgccttgctgaaacgactaagcgcacaggattgaatgcttctatttaaggaaaacttgcctgatccgcagttcagctcgcagcgccttccccccataagtctcctacgataaagttgctacctagcagcacaataattcagaatatgtcaatctcgaatcttaggatttgcgactcctaagctcgcttggaaaaccctaacatcaactcgagctccgtcaatggccggtaaacatggatatgccaccaccaaggcagaggatcgatgatcgagaatcgccagtttgcccagaacagcatgaactttcctgctctatccaaagtccaattgatttgcttagcaatttgatttaatgcggtaagtgccttgcgagcgtcatggtttgtaatcgcctgatatacagtcgacggtcgcgacagcatctttggaccgacttcagggtgggtgaagccattttctgaagtctttaaggcatcttctaatactgccaagtatcgatcgaccaaggtgtgtgctggcgtttgttgcaggagatctgcgatagtagctgcgccttgcgtacagcctgcaatgtacacctcgtagcgcactgagttaagatgcaactgttcatctactaccaacctcatttggaaatgtccggtcactcgagaaccaccctcagatgcgaacttgtccacaacctgatgcgctgccgccgcaatcccttcattcaggcgtgaactaccccattccgaacctcgactggctgagcggagcacgagaacagcgacatggccgcgtattgtcaacacgtctgcaataaactctcctagccgcacatgttgttgcataatccagggactgtccttagtgacctgaattctgctgacttccgaatatgttgagctcagggtctttttcggtaggacaataatagtttccgtgttggccacaggcgttgttttgcgtagatgatacactttggtaggcgaccgatgcaggatcttgtgtatagagtctcgggaatggacctcatgggtttcgactattgggtggccatgatcgatgagatactggacgaacgactcggaccggctccattgagacgccaactcgggatcgagagtt

SEQ ID NO: 9920 - DNA, 592 bp, Emericella nidulans
agaggatcccaattcgtttttttttttaatcttgcacatcaggttatgcagaagagatctaggcatggaatcagctcaggccttgtttctagaggatcatcatctgctgaagcgtggcccacatctgtttgctacaagaagcaaaatacgtctccatttgcacttctttttactgctcggccacctacactgttactcagtttacacttgaacatgataagggagctgggtcatgattcagcagacttcctaggaatagaacgcgatttggtaacacatagaggttgtgatatggcagattttacaaatgagcattctgaactgtctctcaagagtaagagccaaactgatgaaccaattatcacttcttccagagcgcaagagtcaaaagaccttcatactccgtctcaaagtcagcagctggggtctgattctgaaaactggatgtcatacagttcttctgttgtcagacataagcatgaaaccaggtctaatgtttcggtgaatgggattagtattcaagttccaatatctgatgattgtgaggatggtactcgcagtcaagtaatctggccttgaatatcaaggtagt

SEQ ID NO: 9921 - DNA, 1984 bp, Emericella nidulans
aaaatttcaatgaaagtttcaaaaataactcaagcctgtcatcaaagaataatcgttacgtatgttgtacaccctcactgactgcaaatctagtcgttagtattatgaacgccagcctcgcaagcttatgtaaataggtgtgatagcactcacctcgttttgcccatttacgccacctgcagcaacctacaggcaagctcggtctggacgaacttccctcttcctcgtcatagggtgcccctgcataaggcctgcctgcgtcggtgagttaaatatctatttcactattaagaagctgcaagtgccatacacagttgcttattatcgtttgtttatgcaccaagtccacaagtccatctgttggctccttcatcaagcgtccataactctaccctcggtcaacttccttagtggcgtgtacccccgttatgagtgacaaattagactgcgcttcggtagtgacaggaacgaggcatttagattgctggtcttttttttataaaaccctgtattatggacatctgctcgaccattggctgcgagaaaagtggccagcatgatccctgccacctgcacatagcatcagctaaacgtcgatggacattcagtgaggttgaacagcctatggtcgtacttcaatgtttcgcggctcgggaagagcgtagcctgtttacaaccatctgtcggtcagaagagtactgtgtaccaatgactcaaagactcaacgttgccgagaggaataatccatacttctggcagcatattttaagtggttgagtaacggcagttaccgggcaactctgaaatgttttcaggtaatccacataactgaataagacttaaagccagaaaaagtttccgggacggcaaagactatggaaaataccaaatggcgactgaataaattgcactaacttattagtataacaatggacgccaaattttgaggggctgattgaggactatgcttcagcatgaagggtccgcaggtctactctgtaaacgtgcaaagtatttcctatcactgagcgtgctgccgttggcagctgtcgatctgtcttagcaaccagtcatatctagctactcgcttagtggtggagacatgtcgcattgtatagcctgccaagggctctgccgtgtctgctatcttatattaagtctacttcattcccaccagccggtccctcagagcgggcaggttgaatgggctgcgcagcggtcaaaaatggcaatgtctttttcctattccccggcggacatcttctggccgtgcgtcaagctcggtgtctttctagcgctagtatatatcacttcgctcattgtgtacaatcgctacttccaccctctgagacacttcccaggccccgcttgggccgccattagcccactctggtatttcaagaggatccgctccggcaatccccaggacgtccagcactccctgcacgaacggtttggcgatatcgcccgcattggcccgaatatcctcgccgtgcgtcacccggacgctatcgagacggtctctgtgtcatagaatcggtaaggcctgtcgcttggccccattttaccctatgctctgagccccaatattcccaatgacctccactgaccgtttctctgcgcttcctttatccctatctttgctcccattactttatctgtcttgcgttctcaattttccatatcctttacattacgttcccacacctgtgttcattgactcttgctctatcttcaaattcttctcctttatcacccttctctctccctccccatttcactctttctactttcctatctacgtctttcaccacctattttctgtaagtgtgtgtccacattactccgtgtgtgtattgcatttctctcctcttcccccctgacattccacattctttctctctctcctttcgcccattcttagtcctccactacgtccttcctttctttgtccacttcctctctatctctttccatcccctcc

SEQ ID NO: 9922 - DNA, 1403 bp, Emericella nidulans
atcttgcccgcagtcagatcttgaaaggaacgggatgctcatcactgctgattctttatccttatggaaaccgtcctgcgaaaatggggtggccggcgtcatggcccctgtcatggaggccgatgccttcagaggggggagtgtcaggctaggatccggttgcgggtgttctttcactggatggagaccacgtggcgcctgcattccaaggctatggctgatgctgagtccccggggcgcgttcaagctatctgttcgaccggcatgaggggacattgagtagggtgaatttggtggactcttgtcgcggtggaagtccgtcctgtatggcacatgagagtcagggtttgttcggcgtcgcttcgagtctggggaaacagatccgttttcctcccattgccgtgcacgagaaggacgatgttctgcatgaccatgcccatgacttctgtgctttacgcctcttgatccttggtccacactatagttccgactcgacccctgctccgcaagtgaatgcctcctactacttacggagccgccaggaaaaatagtatctggtgaaactggtgggttcatgatcctgcctccacacctgttacagatggtggaacctgggggattatggctcagccccgagcccaggctctttgaagacccatcgcggccgtatcgacggggttgataacggtactcgggatattgctgctggtgtcgagctttctctttcctgctttcgcattagtggcctgaacaatagcgcggcattaccgcttccttggattttggtacctctgccagagccttccactcatctttcgttgcttgtgggagcttcctccattgctcgccaataattttagagatgtcgggattagccaagcccgggttctgagccaccactactccttggtaatgctggcggtatagaatgaaagctgaaagtaatgagactcagtatccatctggttctggtttcatcatttcaagcaagcagttaacggttatcaacataccattgcgtggtcgaggaatcttggggtccggctggcaaagacagaactgtgtgacggattctctctggccttgcgctgttgacttcactggactggacgatactgagcgatctgctggtgatgggcgttcccgcatcgggatcgtcttgatggagtgggttgacgtcggcttggtaggttcgagggcagtcgagggactggatagatccttttccgcgctaaccctagaccgatgaagagacaagagatcgacctttggcaggctttcagagtagcgataggagggaactcgaaggtcggccatggttgaatcgttgttcattatcttatgttcgagaaggttgctggtcggtctaggcagagaagagtcatgatgcagagcaggaggct

SEQ ID NO: 9923 - DNA, 2055 bp, Emericella nidulans
gtaattaaaataaaacaaaattgattatagggaacacaaaacggagagtatttggaaaataacaaataaagccgatttaaaaatccagaaggaaccttcgttaaaacgggcatctcaagctggaccatcgtgcggaaagcgtcggaggaacaaaccagcgtgggacgatggcataccaagtcagacgtgaaagtcatacctaacatcgtggcagcctgcactacccttccggagacatcttaaatgctcaatgggcgtctaagctcagcttactcgatcgccgatagaacaccccgtatggaaacaagcatttattgcacgcattcgcccattagcagaggcacaaggcacacttcagcgagcaaatggaggagacccggcgtacgttcccacagtgactctttattcgagatttcgcagccacagagtggtaataatgctttgatatcgacagatgcgcgcaaagtctttgcatgtagcggcttcatggtaacattttactgcacaaaagttcttgatattatcctctcacggggatattaggcgtggacttctctgccatgatggagccatatatgtccccggactgacaccgaaaaggtgtgtgcggaccttgatagtgtctgcttggtgtggatgatttgctaggatcgaggggcttttgctggtcgccgtcgcagaacgatggattttcagcaaagacctgcacgagagagaccaattgcaggctaagcccataatcagtgacaagcagtttgggtctttttggatgagtggacgatgtggatacgatatctgtgtaattataattgatagtcaaaaaatacaacaaataactaatgtgacaaccagtcagcaatggcctaaccagatccctggtgcctagaattgagcttgaatgagatatgctcaaagagtggatcacttcgccatgtagggctgtgatgtcgcaatcttgtgatcttcgtgtcgggattttaaataccacttcttctcaagactcaacccgaggtctggtgttgagagtttatcacgtggcagaacctggcatcctcgtcaaaactcctactcattcctcgcagtgtcgtaactaggaacagatcctgaaacagctgaatgtctgattacctgatgatcaaggctaacctgaatagtcttttaaccccgagcacaggaagcggccctgatcgctccctagacgatcgggcctgactcacaatgtgagtagcggaaaaactcgtcagactgtccgaccggtcatcccctacaatctatacgtactcaaagctccggagcgtcttgagttagaaatccgcaacaaacgatgatccgatcgccacgttattttaaagaattacacccctgatccggagggctgattgcaagtctgtcatttgccaatgggacaacaggccggacggtacggttcgcctcgtataatgtggacacttccacgaggccttcgagaccatccagaggaaggcttaactcgagccatgcgtgcagaccataaaatcaagttccagatctgggataacgagaccaattatctgactccgatggctccgaattcgcagacgagtctcaatggtggagatcgcgcacgctactactcaagagtacgtatgctcggcacaatgtcggttttccgtcatctttgcctacttgtttttcattttcttgatgccaaccaggcgagctggcgagaaccgccacattttgcctctatcgggttgctgggcgaatgaagttgcgcctgcaaaacatcaatcactgcaaactgaatacgagattcaatagaggtgcctcgtttaagttgtcagcttgtcagctccacctggggcggtgccaagagcgtccgccccgttcgatcgtcagctcccatatcagcgcttgcgttgtcactggccgtttttttttccatgcggagattggcgctgcgactcttgcgactgcggaggcttactccgtagtcatttctcctttcccgacttcttcgctctcatgattccttcttcagaagcagtattctgtcctttttgaagaactcagcta

SEQ ID NO: 9924 - DNA, 588 bp, Emericella nidulans
gaggatcccgcttatttacttgaggagaatttcgagcttccccatctttgagttcacgatcaaactccttaaccaacctaacgtgaagcgcagagatttaaaaatcgttgatcaccaaaaaaaactctttcctactcatgattacacatctcatccatctcaaataatacattttcccacaatgcaaaaacataatcaccaatagacttacaacattttagttctcatgaaaaattcaatccctcatctaacaccggaaagttcgagtagtaaaaaaactgatatcttggagaaagtgaataccttttacagtctctcatcttctcagcaagttcttcgagttgcttgctttgtctactagaatccttgatcttatccaacctctggaagccattcctgcatatcaatgttgaatctcacttttaaagaaaaaaatcataagacttgtgcctcagattcactatcccaactcttattttctcgtctgtgaaactcaaattcaatctcctaacaaatctagtcccaaaaaatctatagtcttgtcgataacgtacactcgaatgacaaattgaagagatagttaagaga

SEQ ID NO: 9925 - DNA, 1856 bp, Emericella nidulans
cttaacgtccagtcttacaaggaaataacaccgcagatggttacaaccatgtttcgtcagatgttagaaccatgtttcaggctgcacagaacaaaggctctcaggaacgggtccagagcgattgcggtttttgagccgccaggttcttgagcactgccaaatgctgcctcgccttttcatccatagcccattctcacccatgtaccaggttctttctttcgcaccgttaggcacagtttcaactgaaattttctccacttcgtccatagaagcatcgcattccgcagtgccatttcccagctccgcagctacgccatgttcaagttgactcatgaacagaaaaaagaagatacgggcaaactatacggcgtaacgaccacgacgatcacgaacgtcctgaagttggagcccggtgcttctgctgatggatttcttctacgtttgcgagacaaatgcatacccatgagctcgtcaccgaaggagcactcaaagggcagacaaacttcaacgccaaggtcgaagtggtcgatagtgacgcctacgaggctggtgtcgaatctacccagaaacgaatcaaaatggggaccctgaacccagtctgcgtgatgaactcgggtaacccaaaccattatagacggaggctggagttggggtgcgtcggccaggactgaagcctctgctgccgcaacaacctaagcgtaactttcaagatgttctattccttgcggctgcgcgaagacattaattccccgacggcggtcatgttccgcacaagaggagaggagaacaattgagttcgatgatggaatccagttggccacaagtcttcccggtaatgtgcgtcgtcagtgtggcggttctctacggaccagctattatcaatgcgaactacctacccgagaggtcatgaggggggaaatgcggtacacccgtacacccatcacatttgcatgcacaactggcgctgtagcgttgtgctcagagctttgggatgcggcacctttgggagcccaagtgagatataacggttcgctgctgcgaaattttacaaaagtcggaattccaaggacggtttaacagcatcgtattcgctctgataagcggtagaaacaaaaacttcgatatgctccgcgaagtgttgcaggacacccaagtccaatattctcagatatttatttcccctcttcaaaactccggccaattgccggtctgagcagatgttgaaaatgcgcttaatgttcctgtacaatcgacgtcacttcctgagccgcgttgagcgccggtttgtttggcgtgtgtccttgtcttcgagtgcgtactcgtcttccagtttgacggactgtttgctttcctttctcgagtctatcttgtctgttttggacgtgtctttcttagttgttgtccgctttcgcttggtctggcgctcatcactgctttcgtcctcttgctttacatcgcccgccacagggccagtcttcttctgtacactagggaccacggcactggttctgccaccgacggtgaggaatgtgattttctccccgttcggcaggctggattgtttattctttttccccttgctccatcgatgcttgaaaagccaatgttcagggaatttgtcagagtctgccaatacctccgtggaggtggaacagacataatgaatagatgagtggagttcttttacttgatcgtctgtcaatgtgttgctgtattgttcggggtgtatttttgcgtggtataagatctcatcgctgaagtagacgtcagttcaccatcgaaaaatttcgtgcagtaaacctaccccatccaatttccaattccgcttataacggcttggtcaaggagaagcgcct

SEQ ID NO: 9926 - DNA, 573 bp, Emericella nidulans
gagattcaaggttaggattccgaaagagaggagtttctggtgaataagcttgacctgagagatggttttgcatttgtgaataaacggcggtgttatctccggcgccgatgtcgagaagagagagactttaatgtactggtgagattttgcggcggcgttggggatgagaaggcggcggatcatactactgtaactagagtggcgggtgatttctgcgtttaaactaaacaaatcaattcggttatatcccggttttagattggaaatttgaagaaagtaatgaaaccggatgtgaaaagaagaagaaagtataatagaccgattaaaatttaaagcgaatttcggttcggtttatgtgctaagcgacctgcgtttgcggttgagtggacgctttggatagcgtttgtagctcagctttgaattgttttgaaattttcaaaatcgcagtttatagtttcgagaacccagaagacctttaatctcccgcctctttcacaccatcagactccattatcgaagcgtcgtcactcttctctctctccaaattcgagagaaaggaggaggaaggtgtaa

SEQ ID NO: 9927 - DNA, 165 bp, Emericella nidulans
aggccggtatctcttccggcctctgagaggacattgtgcaagttccgttaacacgcaggcactgcagctaagcggctgcatgttacctcgtggggtgttcgcatatacatccatgccatctgatcctatcttagagccgcttggaccttcacgtcgtctccggtc

SEQ ID NO: 9928 - DNA, 165 bp, Emericella nidulans
gcagaaaccaaacctggaaggcggcagcctgaccgtagcatctgccacagtcattagcacatgtggggatctacctcgccctccgctatcctatcttgcccaactgcctcgcttattcgtgtcgctacttccctagacccaatgatccctgtctatcctgcccca

SEQ ID NO: 9929 - DNA, 1688 bp, Emericella nidulans
gaaattcaagttgccatctctcactatcatactctgtactctgatattaataatctttactctcggtagctcccctcccggccccattcccacctaactaacccaccgcagccctcttcgcaacccgcagaccagatcccatcatgtctgcagaccaggcggaagaatgcgtggactgcgtgcactacgtcttacgtgtagagggtcggatagaaaagatgaagactgtcagcgaaaatccgcagttcttccggtacgcgctggacaagtcctgtcgcgggcagatgtatctcgcggggcattgtcagaaatttcgaagggagttccgcaaggatgtgcagcactatatgcggggatttcaggaggaggagccgtatgaagcttgtgtttctattaagtcttgtcgatgaaggcattccttaggagggttttccttgctggcgaggagcgtcccttatgaaaatttgacgatgcttatatatagtgtatcattggtgtatcattgcctgtctctagtgcttgcttgttgtgacggattgttttataccttcatcctgtatatacggcgctgactgtacatgtttgtctgtggatatacttcttatgctctacagtctcgcgttgactatatatttcactttaatatattgtctacccagagcgactgcaatataatcgataatcattatatagaagccccttttgatatttcacggaattacaaaccggggggattctccaatgagcaagagcactttagaccttttccatttgctatatagtccgttccccaactcttttttctttttggctattgaattcagacaaacaaattcaggcgcgccgtttcagaatggctagacccatttataactcaagctgccgacctcttctcatctcttattcccaaatttgaaggagaagagccccagatttgccaagattctcaccgttcactgccaagcagcggtgcagtgaggggccgcgtagatattgcggaggtgggtatttatgcacatggttatctacaagattaggtttctcgttcactcttcaggttccatttctagaagctcattacctacttatcaacccaagcacatcactaaaggctcaatgcagctcccctcaccggcagtcaggaggcaattcgagacattctcagtcttttcctcgccgccaagcacatcctagttctccgtgctcatcaagtcatccctccgtccggggtccccgcgtggagaaaaggaaggtatctacttccaagccggaggaatgccttttttaaaactgccaattatcttggaagccgccacaaactaccacaagcccagtgttgatgatgatgacgccaaaatccttccgacgctgtcattgcggcgtcgagtaaacgttgaggaatagtgcgctgccaagcgccaagagcttctagagcatctggtgtaattgtgattggacggggcgacgcaccgtggcttatctgcattgtaggagggatacagcccaggctggattcagctgtctggccgagacgcagaatctgtggcacggtacaatccaaggggtaaattagcttggcggttcggtttggggaaagagaagttcgaatcgttgatgagcaattggcgaggaggattccgtcggctggggcttggggtgctacggcgaagaatattatacagaaaaga

SEQ ID NO: 9930 - DNA, 1746 bp, Emericella nidulans
cgcgacccggcccaagagtgttagtttcgacggacaaaagatgttcgcctttcccacgcctttcgtcgccgcgccttgatggttgttatcccagtccctggctaaaggcaggtcggcccaccacggaccacatttaaacgacttctactcatgaaaaggctagttcgcctaattaatcggcactggcacaggagccagaattcccagtgcttgaaaccgcgaccctttcggtatggctacggcgtttgacctaatgaacgggcatctgctcagtcttcaaacccgcccacgccgtagcaaagacgcgaaactcgatgccgacacgaaaaactcccaaaacagtccagctgaactagcaattcgctcagaaagcactaactgtggagctgacacgtctgtaccctcaccacgatctaagaccacgcctacaaagctccccatactcaagcttaacacggataaggatcgcagggagcaaaaggacactgccgcgcaaggcaaccagaaaggaagtgaaggttcacctggatacgagtcgcccaagtcccttaatgaagaccgcaaacggtattggcgaaaagtaagggatagggttgataaagataccctgtcgccgcatgatacgggaaacagaagacatctcataaaggagcatatcgaaagattatctcattagcaactccctcacggcaagaattggcgaagcataggtggaagtattctggcggctcttcgggcgagaaattatgcacaccagagactagttctgaagtgaaggtggacaattcccaggctgaacagaaagatggctccagagacagccctttgaccgaaggaggtcaatgtgcggagtggaaaggccgaatgaacagcagccactcagcaagctcgaatggaagcggcgcatccagtgaaaagtacaagacaggcagtactactaccgactcatcttacaattcgaattcatctgtatctccaatatccggtccgtcctcctcgataagggactgggaagatagatttgtcgtccatatgccgtcggcacgggagcccaatcctccaaccctaaacgtgcgccaaattgcccaatatcaaaggagcatcgagaaagtacagaaggaaggcggatcaatggttgatcccgacaccctgcctagtccacgtgaagggtcaccagaggagcaacaaaaacttcctggacattcccgcaaacgcccagcgatgctggatggtcaggattcgaggacatcttcctcggaccaggacgccgatagtgaattggtattcaatcctaatcacccccgttattattgtccagatgaaattggcaagagattcagcacaatctgggaagaatcatcctccagccccaaacagaagccaccgcatacaaatccggatggttcttttttagggtgcaaagagatcaatggaccgcacgaccggaatcccgacgaaatcctatacttctcgacaccagaacgccccaaagtcgtgaatatccctccttcacgcatgccccgggtgtcgaaagagtcgaggccggccgtgatgcgccgcgggaagatatcaaaaggggagtcaaaactcgttctagaagagtgggaaccaatttctcggaatttgaagcatgcccaatgctcgaagccatccccaagccttctgtgtcgggaggcacagtgtcagcgattgatgacaaagaagtctactgccctggaagggaaagacgaaccagattctaccgag

SEQ ID NO: 9931 - DNA, 1240 bp, Emericella nidulans
tcccgcatcccaaagtgtgtctcaaatgtcccaaatccccgatcctacacaagatgccggattcgttctctcaccttttgaccctagcaagaggtttttgggcaccccaacatctaccatcgagactgtccttgtggagcagaaccattctccagctgcagcgagaatgatgaggaacttaaaacgtggaaaagcgccccagctttctgccgttgaggaccaagaggaaggtgactttgagatcgatgcgagtgcattcgatgtgatgaagaaggcatcgaagaaagcaaagaaacaggctgaactttttgatcgcaagaagagcaaggcgagggatgttgtggaagaggctgctgaggaatctgacgatgaatatgctggtctgggaggcgcaagcgacgacgaaaccgacgacgaagagaatgcgtatgacagggaaatgatcaatgataacagcggggaaaaagttgacgcgaagcagctggctgcacctaatggcttttgttccaccaattcattttcttacaaaacatcctaactcgcatatagcctccaccaaagaaacgcggacgagagggacgtagcaaagctgctcaaggacatcacaacaggggcgcttcggcggcgacgcaacaacgacgatgagttcgacctagacgactcagacgatgaactattggcccgccgacgccagaagcaaagagaatttgcccgcatgcgaaacgccctcctcgccgatggaaaggtcggcgaactagccgagaaccccaagaaagcagccttcttcaaggccattgaagaccgcgaagacgatgacgacgttggtctcgatttcctaggttacgagcaagagagcgctacgcaggatgaatctcaagatggagctgcacagacgccagaaggcgaaagcaacagcaacagaaggaagaggcctctagaaccagctgcggacgatgtaaataacagacctccgccctacctccgccgcaaacccgccagcgcaatgtcgaagaagcctgctacccttgctgagattcgcgaagcggtatctttccttaccgagcgtcctgagtacgactctttccatgaagacgcttcgatggatgacgacgaaggcgagcagcaggccaacgccgacaatgaagacaccgacgggcacgggtcagacgaacccaccgcaaccagccgacaacgcgacgtatccccagccgtcggcttcagacatccccgtcgcacccgc

SEQ ID NO: 9932 - DNA, 198 bp, Emericella nidulans
tatacttaacgaggatggcgacccgatctggaaaatcttggtgtttgacaacctcggtcgggacgttatcagcagcgtgctacgggtcaatgatcttagagcttggggggtcaccatccatctgtacacgcctctctcctttcgacgtcaccgcagctgaccaagtctccataggaatatcaattctactagataccc

SEQ ID NO: 9933 - DNA, 1212 bp, Emericella nidulans
ctcgctggcgcttcccatacgggactgacctgtttcacaacgcttcttcccccccttttggccacgggaacaagtcatttttgtgacatggaacatagtgtggttatgaagtggagtcaccttatggtatctgcttccgcatcttctgggttatcagctgaatgttatggttctgaagtttagacccagctagacctgaaatatatatagtctccttcaggcaatagaataagactacacaaagaatttcttacccagactcggacaccaatgttaagctgagttgatattaaagataaatccaaccatcaagcttccaatctttaaggagcttatcctaagatctatgatttatcgaagttggcttgtcaacaatagacggggacctgctggacccacacgaggctcgacgaaggcggggaaaagtgaatgccttaggccatgtgttgctgataggcccgagagctccagttcagtgtttccgaacagcaactgagcccttatcaatatagccaggctacatttctattcagatcaacaggcggggccctggaaattatcgacagctgattataacgttatctcttaccactcaagactgccgcacataatgtcagacgacgatgatttcatgcacgactccgctgatgaagagtaagtaccaacacctttagagctctgcccaaagagtccgggctcacatttgcggacgttaggtatgactttgaatatgaagatgcagacgacgacgagacaggagatatcggaatcgaaaataaatactacaatgcaaaacagatcaaggtcgacaatccagaggaagcgattgacgaattcctaggggtacctgctctggaacaggacaagggggattggtaaacaattgatatttccggattctggtggtggatgctgacaacgggttaggggcttcaaagggctgaaacaggcaatcaagctggagtttaaactcgggagatacagcgatgtaggctaagcctggagatgagaatgcttgaatatggctaatcagctaggccgttgaacactacagggaactcttaacatacgtcaaatccgcggtcacccgaaactactccgaaaaatcgattaacaacatgcttgactatctcgagaagcgatcggatgacgagaaggcgtaaaagtgcatagaagagttctattctctaacgctcaactccttccagggct

SEQ ID NO: 9934 - DNA, 1750 bp, Emericella nidulans
aagcttcactggggacacatcgaagaagttgaatgctttccactgttttagagcgcattagtaagtcgcatagtaagtcagttgaagccaccaagtacatacagatgtcagagccattttgacgtgactcacgccataggcaaagatgtggtcgacagcgaggttagacaggcggctcctttgcggaggtattatcgcagctccgctgcgccaagacgaagctcagaccatctccaacgtcatatttcagttcgagcaatcaagcaggtcataggagtttttactacagagtgatatatcctggtagtaaaattatgatactattaatccgcacccaaacaagctatgagaaaaataaaaaaaatcgctatgctatatcaaatggcgaggcaagaggacatgacaacaaaacctcttaggtatcgctaagaacgccacatagtctctagggaaatgcgagaaatgcgagatacggttatgatgaatgtcattccagttcaatgtgttgggtttgcagaataagactgaggaagcgcagtagtcctgcaatgagtgatgtccttattgatctcgaaactttgttgcaaccagctgccggcctccgcaatcgcctggcttaaatcaaagctctccgcgtttcgagcttcctgagccgtcggtggcgttgtgccggtcaaagtcattgggaaagcgctccgttgcgatccggaaggcgaagactcggtccctgcgggctgatcctgcattgcgtttttagcaccctcttcgtcggatgtcaaatgatccgatggagctccagatggtgacgaaactgcgaagctagtcgttcttcgtttcttggtctttgatttatccatgccagacgatagcgtgcggaatccagccttcttctccgtactgaacgtgaaaggtgtcgcggcgtcgatgatgtattgcgtactgatcagcggtactccattctctcggttaccgactccgtcgacagtatccaggccaggatcattcagcttgtggaatggagtgatgttgactggatttggggattgtttacttgatgattgagatgcccgtcttttttttgccgacgtctgtgaagtatctctcggacttcggaggtcattttggaaagacttctgtgccatcatgacggccgcttgggttgaatagtgttgatcattggtttgatcttcagtacgatttgaagtggccttagacactgcaatcgaataaagggacgtaaggttatcaggaggcggcggattgccaggtgcatgttgcgcggatggtaggttgttttcacttgtggtacttatttttgtctgactagcctgcgcttcgtccagtaattctgctgaaggattctcaatggtattaggagtgtttgtccatgttagcgagtcccccgcttttcgcctagcagtaggttcaggatgtagctctagaggcgactttcgcggaggctgttcggccccatcctcaacagccgcagcttcgccaactttatcctctgtccgctggggaagaggcggattctttacctttgcatatgattctcggcgttgtttcagccggtattcaaatttcggtaactgagatgatgatgataccacataaaccgatccaccgccgtttccagattgcgagtcatcatttcgtgaattagcttcaggtgcacggccatctgaaagagcagaatatgtctccgatctagacgtagggcttgacttatgatgtgccgatggtttgggtc

SEQ ID NO: 9935 - DNA, 288 bp, Emericella nidulans
  unsure (1)..(288): unsure at all n locations
tcaccaaaatagttcgtgcgttgaaacacgatggagtttgagaatgacctcaatgcattgtcgactgatgaggcttcatgaaattcaagcccctttatttctagttgctagtccgacctgtgacaagaattagtcaagttccagcttgcggaagggacatcaaacattaaaaactcaccgttcaaagtcaatgaccgcgatgtgtaaaggaggccgcttctcacgagtccggccatcagtacgaggcctaagccagcgcgnntccttgatttcgtattctcgtgcccc

SEQ ID NO: 9936 - DNA, 562 bp, Emericella nidulans
cgggggggtatacttaaagggattgggcggatagtagcccgacaaaatcaccggcgcactggaacgggtcaaagacgtgcacaccaagctcgacggccagaccctaagacaggacgtcaagacagccacgtgtggttaacggggggacgccggatacacccgaagaaccctccgaaggacagggatgtgacgataacaaacgacacgcaacgcgtagaaggacgcaagactgatccttaggggatggcaaatcacaccccacccaaatcactagagctccaacacctagcctccaaaccataggcctgctgtttaaggaaacgaatgcgtttctaacagtcagccccacgctatctgaactcaccatggctaacccccagctgcaacacataccaacattctctcaaattccaacctattattcaacctataattaaacacccaccaaattcccaccagttcactaaatcctctacactcaacacgtattctacctaacctcaagccatattacactctcctcgacatactactcatccctactcgcctttacgtcaatact

SEQ ID NO: 9937 - DNA, 1517 bp, Emericella nidulans
ctgggaaccagactcaacatagaccgcaagggtcatcgcccggcggcccgcatcctgtctctgcaaacctccatcaacgtcatcctgggccgccgcgagcagccttagaccgacctcttcccaacgtaccacataaccaacaacgcccaagcgcgctccttcatccatcccctccgcctcaaaactacggccatggaccaccaccgtcacaaccagtgcgcaaccgtcctccgccctcgtcacgtccgcccccgagcgcgcagccgctaggccttcccaacgacgatcagctctttcccctagttcgcgccgcgaacgcatcgaattccggggcacttactgagcaggagctaggatctgctctcgtgaacggcgactatacctcattccacccgaagacagtgaagatgatgatcaacatgttcgaccggaacagaagcggctcgatctcattcgatgagtttgtggcattatggcgatatttggcggcatggagggacttgttcgacagattcgacgaagaccgtagtggacgcatcagtctgcgggagtttgagaaggcgctggttacgttcgggtatagtctcagccagccgttcgtgacggtccttttcaccacatttgagaacaaggggcggcaagttggcaagcctcgagcctctggcatgagtttcgatctttttgttcaggcgtgcattagtcttcggcgtatgacggaatcgtttaagcggtacgacgatgatcgtgatgggtatatcacggtcagctttgaggagtttctaacgggtgagtacttcagtcaatctggctgtggaattgttatggaagtgttgggactgacattctttgacagaaatacttcagttacaagattaaagaatggttggctgcgaagatcgaagactaattccctttggagttacgatacattcctgcttcatgtttatcgctgcaaatagcataaaattataccctggctatatctcttagaactgttatagaactagtaaagacgacacgcccagcagaaaagtacactttcctaaacaggaaatgatcagtacacgaacgtcttttctttttcttctcgtgagtcttgtcttacctcggagcttttctaggcataaaatccgattgtatcaacggcttcaatacagcctgctatagtatatccattactagtactactgcaagttatgcgcctgactctgatctcgatcgagatagtctgggcctcggataaggcggccgtccagcctggttctacttagcgcaaccgttcggggggtcggagatcgccgcctccaacgatttttcgtgattctgttgtacggccgagctcgggggcgttgcttgacttcaaactcacagctgcggttgcaataacatatataagctccgagagcgatgtatactcgatctttgcgattcaagctaatatcctgtttgcgtgactgatctaggctcttcggcaagacccgctaaacggcgagccgagtccaacttttaccccagac

SEQ ID NO: 9938 - DNA, 2334 bp, Emericella nidulans
aatagaatgaagcaaacatgcagataattatgaagtttaacaataagacaagtatgtagactgaacataaaaatattttatttttttatacttaaacaagacgcaaatcaactcttaagaagagcccctcccacaccccctgaagaagggagtcccccccccttattagagaggcgggcgggttaccctgaagagtcgcgcccaagatgcaagaaaataaaaacttttccgaaccttcaaaatgggaaagaaattttgggtcccaaaatccttgaacccagcagataagaccaattgcctctttcgtggtcccaagcaaaacagccttgggggattgttgaatccccaaaagaaaagttggggacataggttgcctggtttcgtctattctgcaaaatgtgcaaataaccagtgcagtatatggctctgggcaaattacgcgctgagttcgaaaacttcccccaaggacctcatctctctggccaagttcgcagctgctgtgctctttgatctctgggtgacccggaatatcccagctgtagcccacttggattcatcaaagccgggaacggaatcctcggacacgctcaaagtgtactcgtacccggaagcgctctcgtcagggtttattatccctggtcatgcagacttcaactattcctctgctagcattgctcacacgcgcacgctaaccttcatcaagacccatctgggtggtccatactttgatctcgagaagatctgggatgagcacacgtactatgagttcgcggagcggtctgtagaaaagaccatggcaacaatggtgcaggagccgtacgttaatcacgttccaactgtgagttagagccttgcaccgttggcatccaaagtactaacgggaacagttaactggcggtatcgggcgagccaagctgagcaagttctatctcaatcacttcatctttaacaacccggacgacacgaaactcgagctcgtcagccggacgttaggtgtcgaccgcatagtcgacgagttcatcgcctgtcttactcataacaaagtcatagattggctgtaagatacccatatctgcccctaaactgcatccgtatgttcacaatactagacttcccggcatccctccaacgggcaagcctctccgcattcctttcacctctgtggtcaacatccgcggtgatcgtctctaccacgagcacatcgcctgggaccaagccaccgtccttatgcaactaggcctcttgccagaataccttccgtttccatacccgctagccgatgggcggactcctgctcctgggaagcgcttcgagtatcgggttccagctgcgggcgttgaaacggctaacaagcttcagaatgagaatgccgttccctctaatgggatgtttgagtttggtgtaagagaggtggatgatcagtgataacttgcatacccctcacgaaggatgatttgactgatggttcgatgggtatatgagtcgcatttggccacctgatatgggcgttttgtctacttgtttctcctagcccgcagagatatggggttgctttgaacaagtttgaatcgctagtcctttaaatgacgaatcaggactaggaagatcggtccggtaaagatatttgagcatcagtggctttgttaattcatggcatatatatattggatatatgtagttagatctgaggtttcaaaagtctattgcggacactagatcatagttcgagtgaatatagataatatacctctgacgtaagttcattaagcggaacagatgcaaacgctgcaagcacaaagtcaccattaccaccctgcaactccgtcagaggccaccttgacaacaattgatgtaacgctagccttcgccattttgctgtctcgtacgcttgccatgagccactgagctcaggaaggaggccagatggttcgcatggcatgcgcgtaattttcacggccttggctcaggaatgagagcctagacgagcggctatccaatgtcaggtcgtatgggtaatagtcccagcacctcaccacgaccacgacgattgtccataaacggcgagaacgggagccattggttacaaccttgatgaatgatcaaaggaagtagacataaatgcattgggctcatattgtcaactcgacaactgcctggagacgcttgtccgaaatcggaaacgggtgttggccaagtatgaaagaatagatattctgcatacggaactggagaagaaagtgctaatgagatgaaacgaacctttttaagaaatgaaatcgaggcccagatatcctttatcaaagaaaagaccctgttttacacttctaacagaga

SEQ ID NO: 9939 - DNA, 146 bp, Emericella nidulans
  unsure (1)..(146): unsure at all n locations
gcgtgtgcgtgtgtgcgcgtgtgtgnggcgagcgagtgcgagtgcggacgcgtgtgtgtgagtgagtgcgagtgcgtgcgtgcgagtgtgtgangagcgaggcgagagcgcgtgagtgtgcgagtgagtgtgagtgtgagtgtgtg

SEQ ID NO: 9940 - DNA, 2018 bp, Emericella nidulans
  unsure (1)..(2018): unsure at all n locations
taatgggtggggtggggatccactcaaaaaaaaggaggttgttgggcgtctttaaaaaaaacaaaatttcccaaagaaggggaacctcttaagtgtgaaattaacccctaaaaacctttcccttaatttcgggccaattttttttggccttatccggggggggcgccccaaaaaaactgcgtagaaactctttaaaggggaacccctgtgtttttcaagaaaacccaggattgtggggttttctgtgttccgggaacctatattttgtaaagaaaaaaccttggagatttaaagtttccttgaacatggggcattgtttgggccccccacagctgttccattttgcaacgaaacatttcgaggtgccttgaccgcgggacttatgttggaaaaggtaaagtgctaataataagcagctcatttcatacaccatcatactttaactgccaatgcactttgcctgcctaaggtacctatgcttggcatacagctctccagttgttctgtgaaaggggtgatacccttctgatggaagagtatactttctctagcgcccaagaatccgcccttccccaggcagtcaccgttgcccccgttaatatgtacgttcaaggacttttgcctggagacctggatcatgtcctgagcatcttgaatgagaaagtccccggtgctcgtaagcctttcgttctctataccatcccgaccggccagatccccacaggcgttacgcaatccgcagaacggcgaaaggagatctacaaagtcgctcataagcacaacgtttatatcattgaggacgagccgtactacttcttgcaaatgcagccgtacacaggagccgatagtgcgccagtgccgcctcctgcgaaccacgaagaatttgtcaagtcccttattccttcatatctgagcattgatgtcgatggccgtgttcttcgtgttgagtcattctccaaagtcctggcccctggctcgcgtaccggctgggtcgtcggctctgagcaggtcattgaacgctttcttcgaaacaccgaagtttccgcccagcatccgagcggtatctcccagctgatgctcttcaagctgttggatgagcactggggacaccttgggtacttcgattggcttatcaacctgcgcatgcaatacaccaaccgcagaaatattatggttcaagcatgcgagaagcatcttcctcaggagattgctagctggatcgcccctgcagcgggcatgttcgtaagtttatatccttgccgctcttcaattgagaacaatactaagatgtcgccacagcactggattcaagtggactggaagaagcaccctgaactcacatctggtaagactcgcgactccatcgaagaggctcttttccatgccgctatcaacaacggcgtccttgtgtcgcgtggaagctggttcaaggccgctggagcaagcgaagacaagcttttcttccgtgctacattcgcggctgccagtgaggagaatatcacagaggcgatcaggagatttggtgatgcgctccgggttgagttcaagctatagacatttatacagatttcgataagcgtctccgaactacaaatgctttcaacttgaaatatagatcgcaagctagtaggtaccggtactagtgggatagattttcctccttgaattagctgccaatgttctcgactaagcacctactctgtatagcgtggtaatctctgtgcaagatgtccagtttcatggtcatgtttcatgttttatggtatattgttgcctaagattcgagatactctcctatccgttcttggaaaaagtctttaagttctcgtagcacagttacaattgactgttggctgttgatctacctcctgngtcgcggttactgtggtctctgctctaccgggcgctaattagtgcggtgtagggattcttgcaggattccgacttcacctgccatgacagcatgagctggctgttatctctacttgtccagttcaaacgtttgactcagatgtata

SEQ ID NO: 9941 - DNA, 1149 bp, Emericella nidulans
  unsure (1)..(1149): unsure at all n locations
tccaagctgtgaaggagatccgactttgtcgttgggcgagactcggtctgacggctggcggagaagatacgttaatatactgatcaggcttgatgtttgcttcgatgattcgacacatggtgcgagacgtgagagcgtatggacaccagagaccaagaccggtttggatgggccgcgtttcagaagacgccctaaatgagagagcatatgctcgatataaggcgacaaaacttctgaacatatctcgccagctggaaagtctcccatctcctcgttctcttcaagttctttccctgaggcaatatcaatcaaaggcgtcaggatttcgtccatgacatatatcttgacctcatcacgggcggagtcaacggcaagacaatcaacaatcttcgtcaacagaacagcgttgaatcgtgaaagatagaatgtagaccgtgaagcagaagcccaggtgtggaacagtcgaagaaggcctgaaactccttgagctgtttctgtagcaaagttctccagcctgggattgacaacctcagtgaagataacacggatgtgtgatgtccagtctcgattctgcgagacagaaaagatgaggtcaaggcaacgaatacctgtctgccgaatgtttcgcaggacatttattagtcgtccctcctgggaatctgcacttgcgctctgctgctctttggccagggcacggcaagctcgaacaagacagtgcagcacaacatccatggattgttcggcgtacggagtcatacgagtttgaagtgtttcgaaaacagtttcaatcaatttaagaagacccatctgtctccttagtccgagtggctcctgcaggaagaattgctggtcaacttgaccgtttttgaccaagtgagcgttgcccagcgggccgaaagcaattttgatgaaaatgtcgaagtcatgatcaggaagttgcgctagggttcgtaggatggctttacgccgtccagtttggcccgcctgtccagcgctcgcactagcttttgagatcatccgaccatagagaagtcgaagaatgataggcacaacatggtctctatgcttgtcttatatcaacaatctcctctttgccgacgcgaacaaacacagaaagatcgtcgttaanccgngactcgcccaggacat

SEQ ID NO: 9942 - DNA, 606 bp, Emericella nidulans
gggggcaacctgttttgtgcgaccaaggtctcgagtaaagacaccgtgtccacaatctggtaattacgcgcaagcattccagcgctcagcccatcagcggtgagtatggcgattgtgtgtgcacacaggagggcatagttaggacccgaccctggcacgcaggagggggtggagacatgcattcctactgtggaaccctccagtattagtgtcctgaaatgatggaggtctttcctaagcattaaaggcctagtctttctgggaggagaaattatgttccgtttggtctacaccacactactttattcagctgagggttatctttatgttcttaatttttactgtctgtaatatagtctttatttcgtccgcattattcgtaatactatatctcgtcatctcctaaatctcgttgtcgcattctctcgcattattatacattattcactgcgtatatccagctgtatatatagttctatctgtgctcctactcattctcgatatccttttaccatttccttcttttttatatccctatgtcatttacatatacgttgctttattcttttcttcttattctattatcatgtgtctctctcaacacta

SEQ ID NO: 9943 - DNA, 1514 bp, Emericella nidulans
  unsure (1)..(1514): unsure at all n locations
agggaccctacaaattcgtcgcaggagtcgacaggttgtgtaagggcaacggatttgccatcaaggctctagagctgctgttttcctaggctcaccggtggcaatatgtccttcgaagctcacaattcgaaatcgacgggaacgttgagatggattacgcgggttctcaaccttgacaacccggagcgagtccttgtcttgaagcttgatatcttgcttctgacttaggcctttgtagcaggtctgacaaaggcaagcatccatctgtgttttgctcacatcacaccacgccctaatgcgatgactctaggacatggatcaatcggcgacaacacaagcctacgtgtcaggatggaaagaagcattgtcattgtacggcaatgagctggtcgaatttaccacatatttctctattgggtatgccttggccatcgtccctccacagatgatccagtcgctgatccggccgtccattttccttccagcctgcgaggtcatttggggattgctgactcacgtacgtgtcacagccatgtgatgaacatcgttaatcgtttgctaggacatatgctgcaaaagaatgttcgaacagtctattcactccggtttcttctcgggatatttgaatcggtctgacgcagcatttacatgggttgttcatcatttgcggtctcagacatcgtggcccggcttggtcagccttatcttcagttggtgtaggtaatctcttatgtagttgattcttgtctctgctgctgactatgcagacaccccagccgagctcggaaaaagactggctatcttcggcgtcagcggtgtcgcagggagcatgtttctcggcatcctgcaagcagcactctataaaaacctctatggtgcagggggtctcgaagtgagtattactctatcagcactgcacacgacgctgacgagcgagggatggcaatggctcttcatcggcaggtatgcttccgagttttctcctctcattcgagctaagcctaacttgaactcagcgggtggataacagtactctgggaacttattcgcttttcgattataccagactcaccgagcattactcggaggggggggttgacccattctgagcgacgaatagccttgaggcgcatggagaaaaacgacaccgcgacattgaagctaatcactttaaaaggtttttaaggaagttgactcattcattcagccactcgcatgacttacttgctgatacttggagttgctggagcagaggcaaatgtaccttttttgtcctcagggcttggtgcagctgcttaagggacaccgnaccgactactaaagcataagaagcgcgaaacccttttcagtggttatagtttaatcactgactgcacatatttccgcctcacggactgtccctgcgatgcaatcagagacattcgacgtcggtggacaggcctataatgccctaatttatataaaataaaggccccggtaacttgtttttcggctaacccatggtttacttccgg

SEQ ID NO: 9944 - DNA, 1901 bp, Emericella nidulans
agacccaagctaggatctattggcaaagtcctcctagatgcctcaccatattaccgatttgacgtaccagacctccaacgctatcatagagtcggtcgatatcgcctgtgggtaatgggcgtttctgttaaggatgctttattctacgctgaatggaactctcttcgtcccactattgaccaagtgcaacgacgggatgtcccactcgataaccatcgattatgcccgattcccataccctctctgacgtcgtctccaatacctaccccggctcctacgcagttgtgtgagcctggagattgcggcgatgtgtgttcagctggaggaggagcctgggaactctctcgccagttgactgtgggatatccccacgactacagtgactgccctgcccaccgagagccaaacttacaactctgtgatcgatttgagcattcgccgacgagaatacgagctgctcagacgtgaggatgacaacgtcaaacctcttccaaacacgcagcaagaacacctgatcgatatatacaggagactgacgagcgagacagcatggttcaatttccctagagtatcaacggctgggatgtggttcgcgttccccgaaaaggcaagtacagtcctgggcatcaaaggattatacggatgtacctcggtgatcatcgtctcgagtaagggcgtgtacatttcacacatctgggagaagcccacctttataaatcgtgatgaggagggtcggatctacgagactgacgaagagtatttcaagaagtactcattcgacgctctcactcagggcggggaagagtttgataatgttgagcccatctcaagcttggttggaacattagcaaatcctggacctctacacccgaagaatacacctcgagtcttcgtggttacacatacaactgaagatgggaaacgcctggagtacgaataccgagtctcattgctagcggacgttttcactgcgttcctttatcaaagctctgcatggggaattccacagggagcagatggccagactgttggttatcagcctggtcctcgcgatttggccgaaggtgacaatgcacattggggcaaagtgatcctagaagtctcaccaatagatcatgttctacaagcagggaaccagcacgttgcagtcggtcgttatcggttgtgggtaagcggaacgagggttgacgatactgaattctggacgtttccccatgttcctgctcaagttcaacaacgagatgttagttacaacgaagtatgcccaatgattacgtcctcttcgactgcgtccccgaatccaagcacgttcatcacaactaccagtgttagaccagtcaatccaccaggacagccgccaggctttacccttccgacttacgtgccgccaaagcccactaataatgcagaggggacactctcagccaatatggatctcgtcagcgaacgaatatgtttcgaggaagacgacttcgtccccgccaagctagaccaggcgaatgttaagaacgttgctgagctatgccgtgacgggcagggacccatcaacgacaatacaatgctcggacccgacgacgaacgtattgaatattcattagcatctgggaactctccccatgaaaagccatggtacgttgttgatgtcgaatgggtaaaaggctgcaaggggccagcgcaaaacgtccaccatccaatggtcggtcgtaattgccaccagctcattgtcgacaatttctcaatgaaaaactgcaagacgaaatacggctacggtggctctattgtaattggttgtttacgctatacctcccagctgcgtggtggtggaatcgagagtgtccaagtatcacgacctgaagacctggactcgtctggctcttccgcttctactaaaaggacagcag

SEQ ID NO: 9945 - DNA, 567 bp, Emericella nidulans
gcctgcgtagcctcatggccgaccaagggctcgaatcaatagccattgccaaccattccctcagcacgcagcattcgaacagcgcccacccgatcagcggtctccatctcgatatcaagcacacaaaggccgcccttcagaagttggtcaaccacgggcgagaagtggtagtcgtcatgcattcctacggtggagccgtcggcgcgagtgccatggaaggattggggtatgcgcagcgattaaaggccgggcttcgaggtggtgtaataatggccgtgtggatgacagcccttcgcgcgcgcaagggacagtcgatgctggatctttttggagggaattgggagtcctggatgcgaatcaagaaccgacactggtatgtttatacctcgaacgaatcaaccgtgttctccagctgcctgtctctggatgaaccaccaaaatgctttgctttgttaagcaacaattcgtgtgtgtctttatgtacccgatatttttaggacttgactcgatttccttgcatgtatctttatgcacacggtcatagatatcctattccgctttaaatcg

SEQ ID NO: 9946 - DNA, 1769 bp, Emericella nidulans
gtttgcagcgactgtatgacaatcagaattcacatcgtccacaacagcaatcgtagaatcgacatcgtcattatgtccgatcagagcttcttgagactctgaaacgcgcatctcgggacttttcacagacttcgcagcgcttttaacagagcttttgcgcgaaagcatagagaatcgtttcgagtaaacagacacagtctcggagcccgcaatggccgtaatgccggagctcttgtcgtcttccattgctccacgcagagctttggggtagccatcgtccccttccgcattttggctcagagtgcggatgtctctgtctgccgaccctatctcctgtccgctgggttcacttccggcagtgttagtatctgtggtgctgtcttctccacgtgccctgcaatcggagcagcggtacgataccacagagtcggatatactcttttcctctgctgtcttatctttcttcttgtccttgccttctccctcgtccgtataacaaaccgttggctcaggaatacttgccgagctctcagacgccccgggcgcgcggtcgccgtacttggcctcccactccatgcgctctttcatattatcctcctccaagcgtttcccgacctcagcttcagcttcgtcacgttgcatctgttcttcctgctgtttctcgtttacgtgtgctcttctttcccgtacgaccttccacagtcgtaattgcgagatcacgcccataatagctactatcaccgttacagcgagctcgactttgatgtgccgagtaaccgggaacgtttccgttcccaaaggaaaaatgccgtcgttcaacgctgcttggtcagcgtgagccctaccatttcgagaagacacttaccccagagataaagccagaactccttcagaccagccttgctataacagtcgatccccagagacacggccgtgccaccagcaacggaagtcgaaatgatcaacccgtatggccgcgtatggtgactgaacgagacagcgtagaatgcaaccgagatcgcaccgatgaaaccagtttttgcgtccgacgcttcaatcagtcctcctggtcgcgtgcaaagcaaccacatgctcgtacagaacccgcctagaagacaaccgagcccttcagccagttctttgaagacgagcgccagtgcgccgaatgtgattcccgtgaagaagatcgctatcaggtatgcgccctgaattgcaactcggactggtgggttcatgacatagacaatgaggacctagcgagtataagccttcaaccttaatgacctatagaggctgctttaccgttactccaagacttgtaaggaaggcagaggataagaaaacttgaaccctaaagtccgataaggaagggctttaaagacagagcaggacagaatatgttaccatagattccgcactccaatcaatgccagaatagcaccagcaaccagcaggataaatcctccgacgcctagcgcaggcgttacggcgggttggataggcagttcacccggtgcgggtgattcggcaacattgtcttgcgctttttagtgagagtaagctaacatcaacaagggcgctcaccttcatccggcgtcgaggtgttcaaggttggtactgtagtgacagagggtgtggttgaatttgaggtctgtgttgctgtcgcattgtttgtcgcattgacgttcgcgatagtcgtattggaggcaggttcattctcaagatctcttgagagcaggggaccatgttcgccccggtcaacatgaact

SEQ ID NO: 9947 - DNA, 2059 bp, Emericella nidulans
tttagaaataaaaacctgccggtccgcattagatatatcccaggccggtcgtggaccttcgtcgccaaaacccagccgatcatccacatcgtgggcttccggctggagcgatggcagtcgagacccaaagttagagaatgatggaggctcatcggcagcaggtctggggtcacccattaagtcagggcccagcctggaactctcacgggctgggggtttcgagtccatgggtaggctagttggcaataagggctcttctacactagagaagatgccggagtcccagtccgaagagagaccgacgctttctaggaagacggtaaagtcctgaaccggatcacctaaatctgtaaggtctagaatcgaaggctcaacaccatagttatcagtgatccctctttctggtatatcacaaagcgtcggcgtcgtcggaggcgcttgaatgttttgccaaggcttccgaagagtctctagactttcttgttgtccctcaagagcgacatgactcgcggcatgagaaagaaggttcaaatcatatccccatgaagggttgaaatgggccgtctccacgattggagggggctgaacctgaacttcaggagcaggaggaactggctgggtctgaagcggaatagcatcgactaactcgagcattcaaaattcatggtgggatggttgaactattgatgcttgggtttgagagacctcatgattggtatggctatggttgcgattctctcgattggctgccgcctcggctggatggactaggcgctcatgtcgtacaagtagatcgctttttcaagggaaaggggatgatcattagtgcgagatggctagagcgatagaatattggatagcttaccttcttgcgaaagactttgagcatatatcgcacgagaatggtttttcctttgtatctaagacggcaagttagctgtctaaagtcaatgtgccttctgggagcagaatcagggttactcaacgggtgcggaggtgccgttggaggtgctcgagacgagcgaaagaccgattacagtgttcgcaggagagtgatttccgatgaacggtggttgactccttcctgactttccccggattcgatctctcatcgtccatagcgaacagccttggggtttggagcaggtcttcggacgaacaggcgcggggaaggaaaatgctgtggggggtgagggggccgccacgtgatcgccggaaacagtgtgcattgaggcctgaggcactagatatcttaccaataactcgcgcttgatttgggcaacaatagactcttccttgaacagcgaattggtttacttcgtcaagcagctaccattagtcttgttagaaccatatcgagtcttcatgagggaacgctctggattgacctctgttttccaagtcaattaggcccgttggggttggtcatcgtcggccgacatacagctggagtacagcacctgctgccatccccactgctggtgcggagatgctgcctgcctggaaactcaatcagaccctgcgcacaacacggagcgtttcatatgtcttatgtatgcagaaccagatgcacgactgcgcctcccggcctcggcaaataatgccgtggaaaagaaggcatcatcggtacgtctcccaagacggccatctcgcccttgtccctctctgactgtcctcgcttctatatacgggatcgtataagtaattggactgatttatcaatttgcttgcatataacttcactttactcagtagtgacgcattccttgggttgacaacgttcgttagacaacgaactgagcttccattcttccagcttcatgcccataacagcatcagttccgcttgcgactcagaatagtagcaaccgagggccagttattgagattaacgacccgtgctgaactgtccagattgactgctggacgccatcttgttgtgggcctttcgagtggtccggacccaacaaaaggcaataatggtatgcccctatctttttaacatttcacaaagaaaagctttggattttcctcaccacaaaattcctttgttaccaaaa

SEQ ID NO: 9948 - DNA, 1732 bp, Emericella nidulans
aggtacagattcaggagctctgactgtcgacggtatcaacttgaaactagcgctcgtcggtgaagccattcgaagttcaatcatctggacacctttggaccacaagagcgcgacgcaagcttgctaataagctcgaagtcttcatcgttggatctatccaatttttcttcggctatggtgcaatggagattcaccgaaccacacatctactgcttccgcgccactgaaaccccagcggctgaggtgcagcacgactggaaggtcgctgtatccagtcgaagaatgagattcgacatgaatgatgatccgctaagtctcgcccacatagctgatcgggtgatagatgacgagattcagtttgtcaatcatctcatccagaacctgaatttgccagcacgccgatctcaggacaaggctaccagccaaagaccgccgcggcataggtttcaggtcgccacattcctggatgactatcgcttgagcttccgcatactgccttctctggagtacgctatcaccggcgaggtagcgagagcttccattatatctaggcttggaccaaaaatggaaatcgatttcgacgtgaagcgaaacctccatgcatttctttccaacgatggtggtatccggcagcctgtgtcggagctcgggttcccgcccattaacggtaggatcatcgccgacatatcacccaaccgtaccgagatggatgtcgacgttaccattgagataatagaactcgaggctagtgccgtgcggactctccttgacgtcttgacaaggcctgaagtctctcatctaatatctgatctgaaacagaatatggagtctctgaaattacatttccaggaagtccttccctttgatattgggtcatcgcaagtcagaaagagttccgattcagtctttctctacagggcgcggacatcgatggctggaaccaagatacatgctacggcgcctggcctgaacggcaagaactactcagcagacatggagttcagtttagggatgatacgtatgcggctcaataacggtttagaagccgggtatccgaccgaataccctgaattccaagttgacacttctaggattagctttgatctgagcaagaaagccactcacagtgctgattcttactgcagctttgctgttgatgccaagatcaagggaacatccgtcaccgatgaaaatgggaagacattacaatcgttccatctgaccagtgaaagctgtaacattgagctttatcccgaggctgccgcacttgttgttgatgttgctgctcatcttcgagagcggatcaaaacactggacctctcgcatgaggtaaagcgtttaaagaggcttcgctatcgagtccactcacagacgaagacaaagacctccgatgttcctagcttccaggtgcccgataatggtgctaatggtgatgaccttttcggtgccatattctcactgggttttaataatatccaagtggcttggaacatggccacctttacgcaaggcgtgtctcatcgcagggctgatgatctcgtgttttctattagacgcgtggatctgtcaaacaagaaaactacctccgcaaagctccggatcgagaatgttcaacttcagatggtgcctgtcgcgggtgataggagaacgcggtcactcaccccggcctcgcttccagaattggtgttcaatgtggcaaactcttcaacagcgtgaagacgttcgtgtggct

SEQ ID NO: 9949 - DNA, 1265 bp, Emericella nidulans
ttgcggtggatagtaagtggttggcatcgtttggtgttgtagtagttgagccaggcatgccccgtgtaatgccaggagtatcacgtcggtatcgcttcgccagctcggattctatataggccatccttatattgttagtttccattgcagaccgagcagaggtggcgcgacacgaagattgcgatgatatgatggggctacgtacatatgtttatccacatccactgtctgtccagtgtgtgccgtgaagcgatcgcacatggctcgtagccgttcgccatccgcatcttctgtcggcgcctgagaagctcggtccgcttggtctgatgtcggtcgtggcgtagtcgagaactctatgccgcctttgcgagagcgatgaaatcgccgtagacggaatgcatcagcagcctgtgcgggttctggctcgttcagaggtgtttgggatgccggaagatcttcctgtgaagcttgcgtttctggctggctgtctatgtcctcaggccggcgccgctggaattttcttctcttaatcgggcgaaaaaaaatttcagggtttgaatcgcagtctgtactcatgttagataagattggactgtgtgcctgaagggaaagacgtggattgtagataagtgaaatgcggtcaaatatcgtcagtcgtccagtccgcccttaccccaagtttttagttttcccacccttcgccgcactacatagctttcaactcattccattcagcaaaccaggcatcttgagctttaggcttcaggcctcttcttgcaactcacccgcaactcttgattgtacgcacgcgtctcattgataacagaacacctgttggtacttcgatctcaacttctaaactttacctacaccgttcagactcaacgatgaacgcttcagttcctccttcagctgccgagtatggtggaggtacgtggtcaaagatagcaggccctaacttctatgctttcgccctttctgttcttgaatgtcaagtgctaatgtatccggaacgtgcagacgaggtttcggccatcgtccttgatccaggtttctccaccacgcgcgctggcttcgcaggcgaagatacaccgaaatctctcgtcccaacatattatggaaaatactcttttgaggggcaggagaagctcatcttcggcgatgatgtcttcgtaactccgcgccccagcttgtcggttggaaaccccatgggcagggatggtgttgtagaggattgggacatggcagaaaagctgtgggagtac

SEQ ID NO: 9950 - DNA, 901 bp, Emericella nidulans
gtcgtacccgtacacacttgccactatgacacacccgcaacaagccgttcacgcggcctcactccaaaaccccgaggcattctggtctcaccatgcccagcagctccattggcacaagaaaccttcacgtgcaatcggtcggtcgactaagactcttgctagtggtgccagccatgagtcctggtcttggtttcctgacggtgagatctcgacaacgtacaactgtgttgaccgtcacgtgctcaatgggaatggggacaacgtcgctattatctgggactcggcggtgacggggaagaaggagaaatatacatatcgacaattgctggatgaggttgaggttctggctggagttctgagggaggagggtgtaaagaaaggggatgtcgtcatcatctatagtatgtctcccattgcaggcctctctgtcggttcggaggagctggtagctaatgcagacagtgcctatgataccggcggcgctgatcggtgcgctggctgtcgctcggctgggtgcaatccacgcggctgtcttcggtggattcgcggccaaatcgctggcgcagcgcattgaggcggcacggccgcgggcaattctgacagcctcgtgcgggatcgaaggggcgaagggccccattgcgtatcgaccgttggtggagggagccatcgaagccagcagcttcaaaccggagaaggtacttatctggcaacgagaccagctgcgatggaataatccggataaactgggcgggcagcgaaactggaacaggctcgtaaagagcgcgcggatgcggggtattcgtgctgagccagtaccagtcagaagcactgacggtttgtatatcatctataccagtggtatgtcaccgtccaacgtgcgttccataaacgttcactgacg

SEQ ID NO: 9951 - DNA, 1314 bp, Emericella nidulans
agagtaatagagtagggaagggagaaaaatggggagaagggtttaagacgaaaaacagatttgttacacgagtactagaataaggagggagaggacagaaaggggttctgagggaggtatggttgcatagttgtacgtaaggaacaatgaattgcccactggggattaggccatcgagcttgtgggacaagcagtaatagtaagaagagatgtctcaatccttgttcttgaagaggaaagatgttgggaattgctttggaggcaagaagtaagcaaagtatccggttgtttttcaagttcgtttcgggaatggcaagtatggaccctggaaggaaggcattatcgaggggaatcggaggattcccattgcgattgtgcgcgggaatccagaactggacgctgacgagccgaggtaatgagccttccaaatcagacgagcaatcagttgaaggcgattcgaaccggcttcggcaaccttgcacgtccgaaccagaggatgtagcaatcgcttctcgaatcatagcctccggcactggctcctcatcaggcggcgacgcctgccagcgctccatcggggtcatagaggccagttcactcgttggcatcggcgacccagcgcggaacacccgggtagacgttctagcctgtttctgctgcttatgccgccgccgggcattcgcaaaccaagtagagatcctctgcctcgaaaacccagtctccgctgcaagtcgagccttctcctcttccgacggatacgggcagtgctcattctgataaaaccaatcccgtaacaccctcgctcctttcctgacaaactgcttcgactctttggagtccagtttgcgctccccgcattcattctcattcccttcttcaataacgccgtgaagatgccccaggactggagacagcgtctcaaaccccgacggctggcgcttctctccgcgcccaaagctgcatggacggaacaagcccacacagctggaacatgacggtactgggttggggttatgggatgtgcgccgcagaactaaacactgcagccgatgtctacggcagtggtcgcagggtgttgggggacgatacgcgccatccaaccactcggcaacattgttgaagcccgacggcacaattggagtacttgtagtacctggcccaacctggagacagccccatccttcgggttcagggttactggcgatacgtacgccgaatcaccgccagagagcgactcgtttgcggctcgaattgcgtacagtaaagtccagcgtccccgtcgaccgagatgcctgttcatatggcaagaattcggga

SEQ ID NO: 9952 - DNA, 610 bp, Emericella nidulans
ggatgcgctcattaaaaaaaggtgggcgcgaaaaaggaaggcaaacattgttacataacggaattctaaaccataaaattttccagatttaaaataggctttttaacataacttagatataattactgtactcaacaggttatagtgttcaaaccctcaatccctacaatagtaagttaacctaaatttaaaagcatagacctttattgtccctttttaatctatcaaggaaatctttcatacctatattaaataaaattttaacaccccataaataaggtcatacaatatatttttaatatttttatattaactttaattaatatttaaatctattataattgtattccatttatctgtatataatttattatataatcctgaaaacaagattattccaaatattaatatgacattttaatctaataaatattctatacaaaatttcttttcatttttccataatatttataataattataatatatattataattcataaatattactaactcaatcgtactttatactatatacctttacaattctttctctaaaattcaattatctcttatcaaatctatctttattttaaaaattcttctcttta

SEQ ID NO: 9953 - DNA, 1265 bp, Emericella nidulans
aaagctcgtcttccattctgacaatccattatgtgacaaaggacacgatctcgcaatggcatacactcaaaccattcaatgttgggcaagatatatgcgttgagaacgacgaacgacggattctgacccgcagtctctctcggcagaagctccggcatagcaaccggaacatagaccaagataccagctgaaacacgacattccatgtgcgagaaagtggaggaagggggccaacgggtcacttactggttctcatcgccgaagggatctccctgccgatacgtgcccaaatcagtgctcagatctgaatcaacatgagagcttgctggcaggagccgcattgtcgacccagcatagcgaaggtcattgtcttcgtacgagtctcggtacccgccgtagttgtatgccggaggctcctcctcttgaccgtacggtagtcgaggctgactcatttctgtttcagagacggctcacaaggaacacgcccaaagaaagtgaggcgcttgaagcactggggctttgcaaaaatcaggatctctgcttgcggattcctctgtattcacaaagaatgatgcacttactgcggggagagcacaaaggctcttcagtgattggtaaacaaaagtctacccaggttatctgcgaggaatgtggtccaaagttattgaagttcttcagtgttatctttatcggaatggtatcgacgtcacgataattctcgtgtataggatgaagggcccgtctgtaaacaaagacgaggatcaacaatagagacacttgacgaactgattagaagtagacttgtggcagcactaagtacagcattaatacatcgtcttagatgttttcttcccttgctgacggcgcttggggtgatcgaaagccatcgccgtggagtttgtcgccctgggcaaccagcggctgggcggggaaccggaatcggcgttccttgcatgttgttttctggattctaattccaaccacgtagccagtcgtgcttgtttttatttgccaattgcagtctctgctaacgatttatttttttagtcgcgtttcactgtccatcaggatggaaaaaatgatgaagacggtggcctaggcggctctgcttacttccgccggcgttcctggtccctttatcctcaaccttttgaatcatttcaagccccgggagaacaaactattgctgcgctaagtagaagagttcataacatcagaggctacaatattactatgagtgcgctcgtctgaaccaagaaaggaac

SEQ ID NO: 9954 - DNA, 2055 bp, Emericella nidulans
ttgtactgattcgaagacgctgcagcggggttgtcctcgcactcacgtggcctaaacagtgtgcggagtgcttcagtcaccgtacctcagaggcgagtagtgtgcggacaggcaacttttttgatgctatcggcaccgtgcgcatggaagcctttattgaccagaccgaatcgaaccgctacagggctgcgaattcccgccggcatacgcgcaaaccgtccactccgtggagtatgaaccaggggtaccctgaactggagtctcctttcgaagaggttcatgaggatccattccacgggttctagccttgctgtacttatctgcatttcttctttcttcactggagttgtgctttcattgataccatctgagcgaattgttcgggactgtttgtgaagtgtatatatgaaaacccctatatataatattaatccatcccaccaataatcattcatttatagaatgaattgagttcgacgcaagtagaaatagactgtataaccggtttatcacgcaacatgtatgatatgcagctccatctctaacacgatatacagatactagacgacgtcaaaacacgacgtggtatatagtatactccaacccttcttggaggtataatctgctcccggtgtgatcgcaaccttgcaagaccaatagtactcaacaatcccttgcggaacaaatcacagcttcgcaccctccttgacctccccaatcttcaacttgggcgcatatttcttcagcacaccatcgttgtggtactatatcaagaagaactagttagcccagtgttcactatgctacacacgaacctcgctcacgcgaggttcacaagagaaagactgaaaagtgagcccaccttccagaactgcttcgaggcgtctttcccggcaacacgcttcaagatctttgcgccgcctgggtgctcgtctacaaaatttgtaacgtcgtagaccgagttgtcgacgatgatgtacaaaccctggtcgggtttgttgtgcttggcgacttcagcgggggtgaatgttttgctcattttggatggcgttttcctttagttttcgaaccggatatcgggataagcttcaaagtcttgatgtatggacaataacaatatgagaggctgctgaagtatttagaggtacaggtggatggggatgacggatggggaagatgcgggacagttggctggaccgaccgctgggactggagtcgaacctcggctctggaattccggactcatgccgcggtctactcgtttcgatttgattcatggggattgtgattggtttgacacggactgtttccttgacatggacttttttatatcttctttaaactaactattaatttgaatgtacattaatcaatcacgactctttccccctactgccccctgccccttcggcttcttctctgtgccgagcgtctcaaggtccttcttcttatagtaatgcggtgcaacctcaacaagccattccgcttgcagaggcatgttgctgcgcatgtattccttgcttgtgagaaccagctcgaagtagatcacccaccgcgggttcacctcgaagagcgtacttgacgggtgcaggtataccgtctgccctgtcttaatggtgcggtagctgtcaccgccgcgctggagacgcgctgcgttcgggaagaacccggcagtaatggctttctggatcggtacgatgttgtttgagccacaagagctgacggttacctcgacgcgatcacagagtttcgcgagttgatcgcgcacgtcgcgtgctcgagtaagactgcgctgctgaagaaagttttctttcgcccaaacgtagctgaagtcagagtccacccactggttccagatgttgaggagggtaaggtggtcaccgccatctttgacggtaaagcgattgcgcgcgctgtctgcatgaatcttcttgtcctttggtcggaagaagagtgcactggcttcaccgagcattgagacgattgagagaactcttccacgcagccgtgtttgtcggcagccaagattgccttgcaagcattgggtctgttggg

SEQ ID NO: 9955 - DNA, 1184 bp, Emericella nidulans
ttttttttttggctgttaaatcactatcgtcaggccatctcacaattggcagaatgaacgagcgggatccagtctcagcctcagccaggcatatgaagacagaattctttcgtaattcctaccgcagtgccgcggtggtcccgcagctggatgatagatgatatccaagaaaagtagggagctgcagctggacggcaacgcaggatcgtacggtcaatgagaatacgacccgaagcagcggaaagaaaggggggaacattatgtgtttactggagtctttcttccaatgagattaagatgttcagggcggtaaaggtttgagaccagacagatttggaatcatcgaatcgactttcgtacagtaccctcccttaccgcctttgagtcagcagttgtgcaaaacagcaggctagtaagtcggttcctggcacaacgcacaatctagatccagagaacagcaataaccaggatcggagctcacgacgaattgacgatctacgaatgatttgaaattgggagacaaaagctccgtgatggccagattctgttccccacacgccaaagagctctgacctgacgatctcccgtacagagatcatgggtcagacctttcagaatttgtcaaacatcaatcaataacagcttcaactccaatcaaactcgacgactccacatgtcttcatcttgtcccacagtcagaaaataccacgcaccacaatgagccaacaatccatccgctcgcttttcatcgcctccatcggaaatccaggccgttaccgcaacacccgtcacagcgccggccatgtcctcctcgacgccatcacgcccctccttccgaaccatctcccacccagatacaagacatggcagagtccttcgctcatgaacgactctggcagaaaactcgttcgcgaacttgaaaccttcaagcgccttgaaacaagcactaccatgaatgcgaaacccttgactcttgtcatcctccacgacgaactcgagaaaccgctgggcaaaatagtcgtgaggcgtgggggcccggaaaagtacagcctgcgcggtcataatggactaaaggatatcttccagtggctggacaagaagaagatgtatccgcatacaccggcactgtcgattttgcggattggggtgggcattggaggccggcgagtccaataggcgagggg

SEQ ID NO: 9956 - DNA, 1120 bp, Emericella nidulans
ctcggtcgcgctcaaagtatgctcactctgcgcggtgaacgggtaacgcatctacacatgagcttgataatctgccgttggcggggacgacaaagacaacggttactggtgcgattggcgagaacagggtgagcagctgggatgaggggagtcagtcgagccagacagggattattcgggaaacgaggacgtgggttgttactgaggagcatgtgcagatttagcttgaatgttaatccacctgcttcaataatgtatatagaagctctctgaacacatatactcgtcgcaaagactacatagtgtcttgcagcaagatatacactaaggttccttatcaacttgagattttctctataaacaaaggttctattagtaggtcggccccaggagaaatggaaccagtgccctatctgcatggtgtagctgtgtccatctggagcagcacatggatttggagaaaataaggccggagatacctttactagtcattccaggcagtcgatactacttaaggctcggagactctagaagtatgtcttcgaattcaaagagctattcgctttacatagtatgtcggaaatcttcgatctagtgtttgaggtctagctgatgttcgatcttaggcgcagatcgtttcggaattgagagcgttccgacgcgccaatctggatgtcaagcctgaggcaaagataaggtttcaatactatctactggtgaaacagctaatatcaaattgtggattctgcgggcattacaaggaatcgcttggactgaagcccacaatatacatacatcatgagataagacatcatatttgcggcgtgcatacatattctttgcaaacgactggcaaggctcgcggtaatacgagccctttctcttcccaattgacggagatgcggccgtccagctgcccctctagttccgcagcctcttaggttacagcgaaacctccataacaggcccctgatacaccttccttgccctcaatacataatacgccatggctaagatgattgtccccaccgtgccaacaacactaaaagttaatcgttgtcttatcgacctccatttgagacggacagaagctgcggtgggctctatgccatatgatcta

SEQ ID NO: 9957 - DNA, 544 bp, Emericella nidulans
aatgttgtcaccatggcacacagcagttgagtctcagctttgtctattgtcacagagaactgatgtcaacttggattcaacatattatgtatcctgcgtttgtataccataatctactatgtactatagtatcgttaattcatcatcttgaactatattgctcttaatcaggaaataccgggctccgctgacgcacggtccaattgccagtagaacgcgtccgacgcgtccacaaattggccaccgctccaaccacaacgaccagagcctagcattagatcgagtcataatgaacagttacctaaattatagtggtacgagctcttgccttgatccgaccaaccactttattcaggcccatgcctcgccgtgaaacccactcagtctatttctgcttgttgtatgagttgcgatggggcggggtgataacgacaggatttcgagaagcaatccagatcgattccgcactcccgacaaaccagcctcatctagcaaattggcacgagtacctgcgcgattgggtgtgggtcattagcagttacgc

SEQ ID NO: 9958 - DNA, 983 bp, Emericella nidulans
gcatgctgggaatgaaataaacagggtgctgctgatataatatagaaggggtatattattcaacccaagaattcatgacatatcatatgtgctacaacacaaaatgatgctttaggcagcgaccaccagagtaaggcaatgaaaagcagccagacctcaaaagggcagattggggcgcaatgggaaggccaacaaaacctacctctgcccgccatccgctgggctaccagtctgtcgtctgccgccatctgacaacttatttgtgctagtcctcaaagtaggtcgagagtttgaattttgcaccgatgcattgccggagtggttattggcaacaggggcggagttgacagtggaagaagccatgattgggctttgattgacagaagctcacgtcgtggtacttagcccgacgtcgagcttcaagtaattgtcggagggggtcgtaacgatgaagcaacacaccgcctgcgctaaaagggcgcgaggaagtgttgcaggaccgagaggggatggaaagaggggtgggaggggggagtgtgtggatgtgggtggaggaaaagcacacgagttaagctcaaggtgtaaaagtcacgggacctggaggtctctgtgactggaaaggaggggtgcgatccggagctcgaaaatagggggaaaagggtacgaccgaaaagaaacaagatttatgctgccaagtgagtataaatatagcagggagaacaagggaaagaacaataaatcgcaataactcgccaaacaacaagtgaagacgtagtgacttaagagagagggtgaggttttgggtgggaattgaattgggcgaggtggagtggacagactaaaggtgatcggggtccaagccagagcctattcttcagtgggaccacggccggagacagcccaggcgcctttacatgaatcacctttctaactcagggttggtctttgtccctgctcttcgcctgcctgcgcgcagtactatc

SEQ ID NO: 9959 - DNA, 1580 bp, Emericella nidulans
ccggagagatgatatcacgtcccaaaatcatatggtctgaaatcgccaggtattaagttcggcccagtgcaagttcgccccaactactagagttcaaggtcttcagtagcatgacacaatgcaaaccctggttcaaccagcaaagcagcccaacgctctttccgacgtcatgtcaatcgcccctgggaccggttaacagagtcttctctatccttggtggatgccaaggattgctattattgccatgattgctgagattgccgtgaataccatgaatgcgacgactgccatgacttcaatcttcgttcttcgtacgttgttctaggacacgccgtcaaggtttgcaggctgagcggcgaaccttgagtgcatgaatgcacccaagtccctccagttgaagccagttgagcgagtgcagcatctggtcaacgcatcctgagtccacgaacagataaactcaaatcagctgcaacagcggaaccgcacatcaggcgaaactagaaccgattagtggtttagtggtcaagaggctgaagtctgacgctgaagtggactgatgctgtggattgatgctgtggattgctgtggtttgattgctgggggtcggtgataacatgatgacataacccagcaatctgatatataacgccagccgccaatcaggttttgatatgtgctaactatggagagatcaagccaagcaattactaatcccagaatggactaattcaaagaagagctactccgtacactagacgcatatggaaaggtaaagacgcctccgaccccgcaaaaaagggccaatgggattgttatactgctgacgagcccctcgtgacccttctagtcccgttctagcgcttaaggggcgaagagtgaaaactctgaagagatggggaaatgagagacaaaaaaagaaaagaaaaagggactgaaggggtgggtttattgaagtgatatacatgtcaggggaaactggataaaaatctgcctggcaatgtgaccaccagagatcgactgggagaatgggtagtcgggctatggccgacgcgtactcctcggttgggagcccggagagcaggatagaccaagtccatagaactattctatgggtctccagacccacaggcagtagtcaaatgaccctacgagttttgcgcttgcgtcgctgtaacggtccctacataactccagactctcagtctcaagtatctacactcgtctcagagcgacttcgataatatcattgtaattttttctcgatcttcgatagatatagcgaaatttgatcttgttcccacgtacagaaaattatcgtaccactgtcgctgacagtgcacaaccatggcagctaccgggactcggcttggaggcgagtgttctaggccagcgatcgccctctgggcagattctatgaccacggactttctgttttgggtgacccgtcgctcggtccaggctgtcagtgtcgagtcacgatgttgtttcctgttttcagaataagaacttggcctcctctcagcgtctcccccgattctcttccctatcaccatcggaccagcacccctcatatcaccttc

SEQ ID NO: 9960 - DNA, 1885 bp, Emericella nidulans
ttcaaaggaaacaaactcacttcgcctgctccgccagcgacgacgccgccgactgtgtcaataaactgcagagttctctcgaatgccgagcgaatgtgctgtcctttttcgaggacatgtcttgtgccttctcgagataggaaagaacatcttcaatgctgagatctgtctggatcttggagtcatcaccagccagctggatgacccgagcttgaacttgggcccagatatcgacaatctcgtctttgagagtggaggatcggcgctccagcgggggcgctttggcggaagatggggatatcgtcatttcgcctgagcaacattgagcaagatagatgcttggtgcaagttgaacaagagtgagggtgtgagaggacaaggctgagtgtgggggatcagcatttgaggctgtgttggaggcactttaagcaggtgttcttaggctgctgcagccaagatgctagtttcatttagccctaactaaccagcggtgcataattgctatatggatatatccatccattcttgaatgagccagacaattatcagaattgaataaacaaactgagagagaccgcaaatagcgatctgcacaacgattagcttgggagtttcgagcgtagggcgtttgccaatcctttgacgttccagcaagttccagacctgccaccgacaaactaacactcaaacgctcagccctgccattattatgctctagaaacgatctcatcatgttatgaaagtcagtcaataccaaacagaatctttctttcttctactgacaaccatctgaagacattgctggatttatcaaactctgcctccatcgattgctcaaaatccggtaggttgaaaaagctttccgcatatctccctccttcctaacaagagatgcacctctatccatgatgcggaagacagatagtatgagatagagaagcctctcataaacgaagcataaggggaggagtcgcaagaagaaaccgaagaccagggagcgttgcttgccagacggccggaccacctacgataataacgcgcttctcgtcaggactctgcgcgtgctgcgaagatccggctatgatatctggacaaaatggagcagttgtgcgttaaagaggatggataaagtgggttgaagatggtagtcaaacaggatattcgctatattcgcaaatgacccatcagcgaggcacaccccgatgtccccaaccgggctctttctctacgccatagcagacgacgtaattacctcgattgtgtcagtgaggaaacggacgatcctggacaaatggactcgttggcagttaggagcaagatattccgggctggacgtgaggccgggtatggtctgcttttacgatacagcacggagccagaaacctttcagccacctttgggcatgtcgtactgtgctttctcttcgacgagtcgtccactcatgggatatctcacccgtcagcaacgactcgcttgctacgagcaagatacagtcagtactttgcaacccctgcttaaagcagcttaatcgctgggaaatagagaaagcatattccaggcagagagacatctaacgcgaccggctagagcctgagagatttgagccacgaaaaacccagttgtcctgatgcgcgattccaagtttggtgcccgactattgacgtcagccggaacacctttgcgaatagacggtcaactgggacggaaaaacttatgctatatttttagcggctgccaattgaccgcagcgtatggcaaaatacgccaagggccctttttacgggccactctctttaaagtatcccccttatgctgcctcccgtttattctcccctactatcgtccactcttcttggtgctcttactctactttgcttctccgtct

SEQ ID NO: 9961 - DNA, 1139 bp, Emericella nidulans
ccaaacttactctaaacatcacctcatcacttctataatctcatccatgtcttccctctcaaacaccaacaccgcaactctcctctggccccttttcgtcttgggaaatgccggtctagagaacgaggagcaccgccgctttgtcctggatatgctgctcgggatccagagagctaggaatttgggtagcgtgcgtcggacgatcgaggctgtgaagcatgcatttggtacaaaggggctagggttagttgtgcatggtgccaacaagatcgtggcgcaggggactcagactgagtggggtaacgcaaggttccggtttatcagtctggcataagacagctgtattggtggtgaagacaggtgccttttgcgcagctagagagcaggtcagatcggaccccccgggagagagcccagcgctattttaaatattggaggtaaggcatatactaaatggtcgagcaaaatgcatccggttaacgcagtatttccgcagaatatattcgtccgtgacagccagctgaaccagttcttgagagttctgcttggtggaagatctacgcgcgttgacaaatcagggacataataaatgaccgcaaggatttgaatcacgctaggttcctgattgtgtccccgatttttagtcaaaattgtctgctgcaatttgatatactatcgcttgcctatactacgaatgggttattggtgttgagttgaattgtatcaagctattttcgcgccagctactctattgccgcatatataggccaagtatacatgagtctcattggagttttgcagcatctggatactttctgcatcgaccatattgtaaaccgatacgtacctgaaggtctcaggcttggtgatctggtatagggccactacaaccagttctccctttctccttctcggctgaaaaggcctttaaatctgcggcagagactcatacagttatattctggctctagatccataataagcacgacttatcgccttgtctttatgcaattcagacttcttgttgtcgctctcaccttgatcagctggcatcttcgacctcatcctcagccaccgagacgctggggcagatcatcgctgcaggtgtcataggtccttcctatataggcggaacgtac

SEQ ID NO: 9962 - DNA, 564 bp, Emericella nidulans
ggagggcgtgcttaaaacctgggggacggataccaacaagaaaagcccccaccaaggctacatactcataaccaccaacacccaacctatccactcaaccacccgcaaacaatcacctcccaatcccacccaccgatataccacaacgaaacaccccacacacaccaactagcacccaacacacccactcaccacacacaccacacacccaacaacacataatcactccatcacaaacatatacaacactacaccatcccaccctacccacactcacacccaaccctaatcaccacaacaaccgaacatctacacacaaccacacctaatattcatccaaccccaaccacaacaaccacttcctcaaaacaaaacgcaccaccctccaacatcttcaaccctatctaatacacacctcacatcacaaacccccaccccactacactacccacaacacaacatcctcaccacctcaatcacacacaagccccacccacacatcaccttccacaatcacccaatatcctcaaccacacacatcacacacaaactctcaccacaccc

SEQ ID NO: 9963 - DNA, 1515 bp, Emericella nidulans
gaaaggggggatttgagccccccaagcataggtcccttggtgggtgggttaaggagttcgggaatgtttattacattatgaagaatattattcggcaaaaaggtagaagttaaaaatttagtcgttaaccagtttatgatgatgttagaaccagaattctggaaaggatgtttgcagtgagaagcagagcactcttaaagtcgagcttcaaagttgatgtcagcccccaaatgagtgctagaaattctggaaaggactggaacctgctgagtgtgtttgtagtgtttgcctcgctcccttcattcagggcggacgtcatgaactgcagcctcaggcagttttcttggccgtgttcttggcgggcgaacttcggccagatgctcaccaacggcgaagctgactgcagagcatggatgacatgaaatacaaaaaggaattgaactaataccgaacctttgagccgcaaagttctatagcttcctctcacagtctgctttctcttgtgtcctaatcatcgagttactcgcatcgtaccataccccgctccgcttccggaaacacagacttgcccggtagcgacgttcgagtgcagcaatcaggcgtatttcactaatagaacaaatctttagagcctggccagcaggtgccgcaagagcaaggagctagcaatatggagtctctcaaggctgttttctttggtcccgatcctcagacgcaagtaggtcagacatagccgtttcctcgtcacattctgactttatttgtctacagatgcgaaaatgtaaccagctcatccgcgcaaatacgcgtcagttggatcgtgatatcgcgcagctcaaagcacttgacggcaaaacgcggcagaccatagtcaacgcctcgaagcgcgcccagcggaacccagcgcgcgcgaaacaggcgaacctcgaagcgaaaatgcttgcgcgggaacttgttcgggtccgaagacagacgactcgcctgacaactagccgggctcagctacagagcgttcaaatgcaggtcaacgaagcgttcgcagtccggaagatccagggtagcctacagaaatcgacgggtataatgaaggatgtgaacacattgatccgtctcccacagctgtcagcaacaatgcatcaacttgctaccgagttggtccgcgccggtattattgaagagatggtggacgacgctattccaaataacgaactactggaggatgaagaggcagaggctgatgaggaggtcgataaaatcctacaggaaatcttacagggaaagctatcccaggtggacgaagtcaaaccagaaagacctctggaggagcctcagcaggccgaggaagagttcgaggatcaggaagccgctcttgcgcaaatgaggggccgtctggaagctctcaaaagctaagtcgagaaatgctggctctctgggtatagaagttcagcgcacctcgtctcgtgtcgtttgtttttacggagttggggcgcggtagattgcagttcgtccctatga

SEQ ID NO: 9964 - DNA, 558 bp, Emericella nidulans
gaatcattggatgataggagggatgagagcggccgtcccaattgacggggaaaagaacggataagtaccattttgaatgagtaagaagcaaaatgctagaatacaaggcttgttgagggtcaatagaaagcccgatttttagaaggcggtctaacagccgttttatattagacttctgacgggggctgcgcagacagctcttatttatgaacccttatcctgactgctaccataagtagcacggctcgaataactgcctcatgttatgaatatcttccacaattagtagctcaagacgttaccataacttgatttgacattttacctctatatacttttccacatatctctcattggatctacatcattctcttcccaactattatgctcttaattcctccctactactattcattccttcacctcattttattagcttctcctcacttttatagttcctctattacttctactttaacatttatatcaatcctctattttactccctacttaattgtgccttgactctatactttaatcgacttgatatttcatctc

SEQ ID NO: 9965 - DNA, 1081 bp, Emericella nidulans
gctcagtccggtctatcgaagcttgttagcgggattacccaggacctgggccccaaacacctcttgtcaatcaggaagcgcatatttgtgcgattgagtacccgcaaggcatcgcgctgtgtcaatccctccacatttgccatgatcgagggaacagcaggacgagcaacgtcagcagcctagattttaacatgagagcgcggaatggcccacaattgctgactagtccaagggcagactcggttcatattgaggtataccaatgatgagcgttctgcgataggagctcttcagtcgtggccactctgcttatgcataagcacagtgggagcagcgactagactccaaaaattactaggacggctactggaactctcgccgacaatcgaatacgtgcatctctgtcctactacgccgttctgcgggttgagttcacataacgcaatatcaggaagaccacttcattgtgagtcggccgagtgcaggtgagcttgttttgcggtctccgagctagacttcagtcttcgccatcccgatccgagagttcgctaggaagactgctaaagatgggatgaggggacagccgtgagatgccggctcctcaacgcagcgggccaggtaatcgccaattttatgttggattatttggatacaaggccgcaatgcactagtcattgatgtcctgcccacagcattctaagcccgggcaccattccttgaaatgtccaaataggaaaggtgagaatcttgtttcgcaatgcggcgattctcatcgaaacaatccgcatatagaagcatttggccgttcatctaccacttgcaaggcaggagatgccctggccatagccaggaatcaagatggtacaatattggctgagatctgtatagaggtgcttagagaccagagacttagcacagtctagtagttcactacgtacagctcagcttttcgagggcatagacaggtgtcaaggaactagattggtgagacttcctgccgcaatcagcggaatcacgcagaaataggcaaagatttggtttaagagctccttgggagcaactcaagcagctgctggggacg

SEQ ID NO: 9966 - DNA, 178 bp, Emericella nidulans
tattgcaagcaccgtttggagggtagcaaaaatgggtgaggcaccattgctcgataggatcggctctttaagcaatattcacatttatgctacagtcctcgtatagcattaccactgtaaaaacatctacgacaaaaattaccgagcgtctaagcccttcaacgatcacggaattcac

SEQ ID NO: 9967 - DNA, 1806 bp, Emericella nidulans
ctggtacccggggttcctgtgctctaaagcacggttacgtcaatatagggaactgtgccttccagatggagtcagttatccttatgtggcctgtcttcttcatgtcctttgcaacagataatgtgcttgcgcttatatgtatcctaacgtcaatgctcaatatagttctatgctgacttctgtccttatagttaatccccatgtattgtatttaccgtccaacgagaaagtttccacatcaaaatccttggaaaatagtacggatttgtcaatgtctctctccgtgcagagaggcccgctttgggtcgtacctcctgggttccaccgcaatgcgacattttttggcatggagaaggagcttgaaatactacacaccagactcttcaaagcaaagaagcgagccgatcaccttatggcagtacttatttgcggtgtgcctggttctggaaagtcgcatctagcacgacaatatgtctggaatcaccgtgacgattaccccggtggtatattctgggtcgatgcgaagagtcgccagtccaccttcaaatgcttctgggatattgctcaagcggcgactctgactgaaggtgaggagtttcaaagccccgataccaaatcgccaagtaagtatgtcgaggcggttcgccactggctacaatctcgacaggaatggcttcttgtgtttgatggagtgagcttcgcacatgatgacgatatcaataacttcaagcagtttctcccattcaaggagcgatgcggtattatctacacatcagtggacaagacactacgcaagaagcaacgcctgtacgagccgtactgtctactcgtcgccccgcttcaagtcgaagatgcgtgcaagcttctctttaaagatcttgggattaagagaccaaccaaggagcaaattcgaaaagcaacagaggtagtaacgcattatgaatgccttccattagccattcatgccatcagccaccgcctgagtgcaacggacaagccgatcgaaaagtatcatatcaattcgcactttacggacgagaaacttgctgaaccatttttgagtattatgcatgacctgtttcgaggagggcattttcaagccctaaatctcataaatctactgtcattcctggggcatcaggtcccggtcggactcgttctactgggaaagtccttcctggaggcctggaatattgaagtctttaccagtagcagacacggggagcccggcgacctggacaccacgcttggggttcttatccgctacggccttatagagcggacatcggacaagtatccgttgctacaaacgcctctgtcgcccatttctgagaggtatatggtagacccgaaagcggtggtccctgaaatgtcagagtctcaaactgaaagtagccaagagggcttctttgctcagtatcagagctccggtgtttctgacgtcgtcaaaatccatagtgtcgttcaaggcttctgccgggacgagctaaaaatcatggataaagagcttagggctaacggctcccgccccggacagaacaccgggtactacgactcatggcttgttgtagcgacccacgtcttttgtacctcgttcgaaaacgcaaagtgccgtatggatcgcgtagatgactgcggatccgtcaaagattaccgcgagtacgagactcacgcgtcacaactgatgaaaaattttaagaagaagaccgctcacggcatagtcagtgactctatgaagcagttgaaggaggcactgaaaactatccgcagcgagattgaccgggtccctttagtagagttaattgc

SEQ ID NO: 9968 - DNA, 212 bp, Emericella nidulans
gagacgatcgacaaatgcgcagtaatagccctggatgctcacgcgatcagcagacccgccataagcagctttatagtctcgtggattcaggcatgaaaatgtcttagcgatgtgacggtgtttcagacggagacgtgctgagacaatcatcaagatcaggggcgggactaacctgtctgcatgccgtaatcaaatttaaaattattatacct

SEQ ID NO: 9969 - DNA, 113 bp, Emericella nidulans
tttcacacttagttctatgggtcctaaccaaaccagacaatttgcctctcactatcaaccttgagtccattatcgcagtgcattcgtgtcatgccaagcctgacttattttcc

SEQ ID NO: 9970 - DNA, 1313 bp, Emericella nidulans
acaccgggacgcctgcttacgtgattggcggaatcggtctcccgctcacaccattggccggccatcatccctccggatcaatccgggccgactactgcgttgggattagtgccttttgcacacgggcatgaaaggcacatttgcactgaacaaaggctgagtcagcacggcattactgtcccttatttctcccgagcggcaatctgcctccactcctgacctccagccagatatccgtgaggctctctcggtgttgtatcggcggggtcggccgaaccggccaatcttgctctattcgctcgtaattacataaacgcctttatccgttcccgcgtcgagaaacaccacaaataagttaccaagggtggtgccatcgataagaagggtttctaggacttcttctttataccctcattatcattgttccttatcagtattggtaccacggtatatcatttgttcgtggcctgttgtcatggacagaaggggtcccgacagagcgtcccggatattgcttaagcggcagggcgatgtctgtaaggactagtttagcacatatttatccagctgggtgtctacttcagctatccgctagtagatataatgcactgcgtcaattagtcaattacacttaagacggttctgatactcatcggacggaccccgaagccagtcggaaaaatcccggcgcatgtataggcctgcatatatgtcccatataaagggctacatccataggttctgaagggtctcaatcggtcgtccattaagatacgcaactcctcctagctcgcagcgacttcaaggaggaaaatgggttcaatcgctcccagctcagacgtgtcagtcaacaatcccttccgaacccgcattctcaacgcccagatcacgcccgtcctgacccttaaattctggaccggtaatgaagcagcgctgatggcccggttcgccggctttgaggccgtcttcattgatatggagcactcggcccttaacttccagacggtcgcacagctcatcctctcctgtctgagtgtggggatttcgccaatcgtccgctccccgtccaagtcacactggcatatcagtcgcattctggatgctggcgccgctgctgttgtggtgccgcatgtcgattcagttgaggaggtgagggagttggtaaaccatgccaagtatccgccgctggggagcagggggtccgcgaacaatcaacctatccttgggtttcggagtgtgccgaccaacgtgcaaaatgaagtgctgaatcgagagacgatgctgatccctatgatcgagacgccggaggcagt

SEQ ID NO: 9971 - DNA, 124 bp, Emericella nidulans
tacaatggatacctcacatgggagcagtcgtcatgacggtcaagatcaactatcatctggaccatcgataccgcatgcaagcactggacttaacaggtaagttagacgctccagatctgctagc

SEQ ID NO: 9972 - DNA, 139 bp, Emericella nidulans
ggggttacttcaatcctagctaaggctgatcctcgagccacatagtcagtcggacaaggacacaacattatatgctcagccaatagttcactacccacaccttcattgactaattcgatgccctctagggctttcctcc

SEQ ID NO: 9973 - DNA, 116 bp, Emericella nidulans
gaacgcgcgtgcatcagatcatgggaagttacctgagtgatcgcgcatgccttgtctcgtagaggcgtgagtcggggcttagtccactgagcatcgttgtcatgagtgatggggcg

SEQ ID NO: 9974 - DNA, 1352 bp, Emericella nidulans
gatgcgcacgcggctaagaactcattcaccaaatagccatgcgcagcgtggttttctatcacgtccacacccgccttaacggcaatctctgcacttttcgcaaacgccttgacgatctcctggatctctgccacggtcagttcccgaggagcccagtatgatatattcccaggctcccacttgttctcctccccgccactcgggccaacaacatcctttggccacccaaacaccccctcatcagccttaagagccctcacccctcttgacgcagccagcggcggcgcaaccgtgcttcccttccgcccggagtgcgccagctgcacaccaaactttgcgccctgggagtgtacgaaatccgcaacgcgcttcagacctttgaattgctctgactcagtaccttcttgccagattcccgcatcgttcggcgagatgcgtccattcggctggacagcgagcgcttcagtgaagaccagccctgcccccttcagtgcaaagtggcccagatgtgccatgtggaagtccgtcagggcgccgactgagggtgaggatgggtcggactctgcagagtacatgcacattggcgcgacgataacgcggttcttgagcgttaccgagcggattgtgagcgggcgaaagaggtttggtgtttccttggctgctgggtttatagctgcgccagggttggtggccggcgtgaagtaggtgagccctggggctccagggtaagaaggtgagggcgccgttgcgaggtccgacatggtgggtgtgctctaggatctggagactgggtgtgtagtgctttagaccgcggttgactgcgatacataatgatttgcgcccttgacattgctttatatctaccatatcctgctaagttgtgtatagtaagtcgacttatgcacgctgacaaatcagaatggaacctcgatggagttggaattttgtagaatcctaaattagcgatcggcgtttaacgatccgaggtctattcctccttctagatagtttttcccggaagtatcagcatgattgatatcgaaaagccatttctgcctctgcttgcgtgatttcgatcgtgcagagcgcaagtggcttatcaccaatcaagcgaagcatgtgtcatgactatccgagatcatattcttcattgctcatatcgacaaaatagctgtctatggttttagatatatacatgaatcagatcagccctatgcagtacccgaccctcccatacgcgctttgcagagtacatattttagtatgcgtaaatgacccgcttcgacctcacctcccaaacatcctcgtaacgcacgggctgagtttaattctcatccaagagacccggcaca

SEQ ID NO: 9975 - DNA, 1940 bp, Emericella nidulans
  unsure (1)..(1940): unsure at all n locations
gtgatctgtttcagcggttcgtcataatgcatccttttttgggaaaaaaaaatggctaagtcagaagtagtcctctgaacactgcggctctgaggttcttttggtcattatgttggtcggcgttgaataattcaaatggtacaaaaacatatatatcgtccaggtatctcaagtaaacccatcccataatgtgaaccttattccatgctccatagacgccaatttcttgatgcttggtcaatccctatatgcccagatgcaaattaaacagcgttgatcatctcattccgctccatcagctcttcatgtgcagtcgtaaagtcatcttcgccgatgtcgctggtttcgtcccagaacttcctgtgctcgtcgctatcatcccctcgaacagtccacatactttctcgtaaccttttattgcgctcacgatcctcctcaattcgctgctcaatctgcctcttgtctacccggatgccattcgccttcataccgcgaggtgtccctgtcttcgactttgaaccaggttcttcttcctcttcagcttctagatcaagatgtgctgggtgtgtttctcgatccttcaagcctgcgtgaatttctgctaccgtttcggcggagagcacttctttggcttggagaccgttaagaactcggcgcacgtgctttacattggcggcaccagagccatccgctggcgctacgcaatcaacgactcggaggatatctcgttgaatcatgtggacgtaggggaggtggtcctctttagtggccatttcgcagaattgctcaataaagtataggatgttggctcggttgttcatgttattctagggaatagcttgatcagttttagatcatgtatgtatatggcttaacagccatgtgcactcactctttcaagctgctctagaatgcaagagtggagatcttcatccatgtcgcggtatttgagcgcataatgcgcggctttctgcgacgatgtaatggatgcattgagatgttgtagttgcgctgtaaagcgcatgcgaacttcaaacggatctgccatcatcgtgtcgaattctgcgcttttgcggttagaagataatttctaaatgtattgctgagagggaagatctgagaggccgctgatcgagaggggcggtcaatgagacgccggcagttctgtatgggaagttggcttttacccgggcggtgaccccgtatttatcgcaggactatgttaaaataagccaaattgttgagcggcagagaatacccatgaaaagaagtaatgttgcaaatataagaatactctgttgctaccaacctctcttaaagccaagagatacctatatttgttctatgtccgagacccaaatcgccaccgatcactcccgttcatcagtactggccgtggaacaatcagtttaaactaaaacgaaggccgccggtccagtggcgtcagtggaggagcaatactcaaagcatcatcgctttgcagtagtccaatctcttctgcagtgtcatttcccccgagaggaccacttgtccattcgccctcccgagatgcaggatcattaacaacagaccatacatccttttttgttagtagcccatggaggaaacctttgtttacaaataagacataacggaggccaagtctttgaaacatgcgcagcactattaggaaggttgtaccgctgttcagcgtgataggggttttggtccatccaaggtcgaaggtcgagcgtatccatcgggtccgcaaatggttgatgcgcaaaaaagaccggagttgcgctagagagctcttctccagatggagatgtggggttcttagnggcgtaagaaagctcgttgcgtgagacatagccaaggagaacggggttcgaggctttcataacgacggggaatccgcggatgaggtaggctgaggagggtttcgagagagccacccg

SEQ ID NO: 9976 - DNA, 131 bp, Emericella nidulans
taaagactaagagaggaatgacgtttgcaaaagggtaagggattgtgaagtaggaacattgtagcaatgataggtgtggcgatagtatgaacgaagtggacgattctgaatatgagacgtcgtaagatgat

SEQ ID NO: 9977 - DNA, 158 bp, Emericella nidulans
aagaatacgagataacgaaaataacaacaatagttaagaaggcgtcctcgacacacgaagagacgaaatactcagtgcagtgcactgaagacaaaccggagaacgcatcagggagagacatcagtgtcataacgataaggatgaactcaaatgatagg

SEQ ID NO: 9978 - DNA, 1600 bp, Emericella nidulans
  unsure (1)..(1600): unsure at all n locations
gtcgaagctgagccgtgtcgtacaacttactggtttctcggatcctgtctacgcagaagcctatgttacggtgcatcaatttgatattgtcctggacgtcctcttggtcaatcagaccctggagactctacagaatctgtctgttgaattcgccacattgggagatttgaaggttgtagaacggccgactacccacaacctcggccctcgtgacttcttgaacgtgcaggctacagtcaaggtgtcatcaacagataccggagttatcttcggtaacatcgtgtacgatggtgctagctcaacagaaactcatgttgtcatccttaatgatattcacgccgatataatggattacatccagcccgcccactgcaccgagacccagttccgcacaatgtggaccgagttcgaatgggagaacaaggttaacattaactccaaggccaagagcctgcgtgacttcctcaagcagctcatggagagcactaatatggcttgccttacgcctgaggcgtcgctcaccggcgattgccggttcctcagtgctaacctctacgcccgaagtgtatttggtacggttactttgttcccttgtgtatgatttccatgctaaccgagccctttttaggtgaggatgctctagcgaacttgagtatagagaaggaaggagaggatgggccggttactggtttcgtccggataagaagccgttcccaagggctagcgctcagcctgggctcgctgaagggtctgaaagcctctgcggcgtgaatagaagactgagtttccttttttttttctatatccgaatagtgatcatacttattcgacgatcatatttatgcttgtccgtttcctctttcgcaagcccttgacggatgaatctggttttgagaatctgcttccttgtactgtgtgttggcggttgagaaaatattcctttgataagataatatatttttaaacttccataaccggaaaatatacctagtaacggagccgtcggatgtgccggatcataggtagtggcagtctacgattgactgaactgaagatataggctggaagcaacagattagtccctttaatataaaataagatttctaattcatgttcggttggaaatcaaccgctaaaaccgggaatttttttgtctctggttgactttacctaggcagtggtcatctttcagtcacagccccgaccactcctgctttcttcttttctacaactcaacgctgtatttctacccctgaatgatcgcattggatatttgttttaaatcctatgctctctctcctatgttcttgtccctcctaggaaaaaatggccttcaatagctctccctgcacgaatcagtccgattctcaccttcgtttactcggtcatgattcgactttgatggtgggacaatcagtgtccctcacattgggtggcgactcacttcttattgtcggtatgtgaacgtacggtagtcgcggtcgtctgctggactaatcaaggcgctttgtagatgagcgcgtcatgcggaaatcggaccgcacatgttgtggaatggtcccaaactagtacgtgttgncgcgactttttgcatttacga

SEQ ID NO: 9979 - DNA, 1414 bp, Emericella nidulans
ttatatacgcgcattcaagtgcttgggcacgtgcagagctcaatggggctcattcataccgtgatcttccaccgaagatacgcagggcatgtggattgtgtgtgcaaagcgctattcagagcaccatcgcttttgacggggtcaaaggccgcccagtggtgacgaacattttcggtactgctcatgcgtacgtccaacatatctaaattatccccttgtcctattgagtctgacctaccgtaacaggcaatttgggaatatgctggtcctatccaccacatacttgtcacacctccaggagcttgtggatcggaacgacctcgagagacttctgcggagaactattgctttcttgctccggaaccgaaacatctcgccgacgttacgggttgatgcaaagatcctcactgatatatacgagaaaatattcgaggcgccgcccattcttaccgacgtaaatttaccacactaggcatccccagactttcctcagatttcggttctacttgaatatcaacggctctactcttgagctcactcgctaattatacccccttctgcatcaccaccttccatttggactcttttccacagcctttgcagtcgacgtcacctgcatcctgaaacctcaggagttttgtttcatgcgacaacagcgcatacggagcggtttacggcctttcattgtttcaatgttttgcttgcatgtcatcagtcacggtttagatgcaacggtccgtgcgatttggagaaggggcggttatctgtgagcgactctgtcggtccttttcgtctctctgttttattttgatggtctctggtttggcgtgggaggcaatctctgcatttacagcgaatatcataacatacctatagtaacatatcgggctatttctggcggactgtcagtccgcagtgagataccttgactaaataagcatgaattatttgctatcatggacttttataattggaacaggtcgtagcatcgagagcactgattagctcacgacccccttgaaccgcggtccgctcgctcgctctggttataggccaaaagtgctggtggagtgacggttttagtgagcctcggtttctcatgatttcaaccttccccgcattcttgtcgacgcggtcaagggtcaacacatgcaaaatttgagaaaaaatcccacgagtcacggcgtgctttcaactgtgggtgatcaacctgatcaacctggcaaaaggggcacgtctcttgaccgctgtctgccttatgaagaggccccgctgcatccctgcgcttgcttctatatttccctgaactgcaactgaaagacactcgccacttcatcatggctccccaagggttctggctctcgcgagaaggttcgtttttggctatcactttgaccaatctaaccccaactac

SEQ ID NO: 9980 - DNA, 1362 bp, Emericella nidulans
ggcaagccccttcaggtttcgtaacttttcaaatgttgataggatagagcattggacctgtgatcttaaagcagcgcaatagagcgaaccttcaattacatatgcgtactagtccagccacaagtaaccattgcgcctgtgcgactcaatctgggaaggatcaccagctctagttgcacgctgaaatcacaagctgcatccgcagacccaaactgcgtcttaaggagaactggaagcttgcagctgataccctccagtctctgcacaaactgtccctcactggaaacccttgcaactactcccaattagcttgcctacccctgtcataaccccaggggatcatgcgcgtttcagcaaaattctggttcatgacctgtttttttgaggtttcatttggtacggagtattctctcgagactatctcacccggcagtccactggtacaacccagtaatctagcatcagcccatgtttaggcttagccctccttctgtgaagggaacttcttgctctggtgatttacaatctggaaaaagttcgtccagggctcaatctatgcatggttcgtggtgttcaaggtccagggtaccctaccctacgaaagtattcgacctgcacagagctacttggaatacccgacgcagcaaaggccctcctcagccgtggtattatagaccgagccatgtctacggtcaagtcatacatagccgtgacttttcgcataacaacttatcctgttagatcggtgtctgtaacccaagtatagagtgacctatatcttctagcccaggaaaacactgactcatggactcgcagacatgctattctcttcttcaccacgcgccatatcctcgtcacaaaactcgacctctgtacccaattcatcacccaacaactggattgtcttctcataaactctcgctgtctccatctcccacttctctggcctgtccgcttccaatccaaagtccaaatctacctcgtcctcgtcctcgacatcgtcaatatcctcagagtcatcatttccacctgcacccggatcactactatcccccttctcaacaacaagcaccctcgctgtttcggcaatactcttgattctcaccttctccgtcatcgaaacgacatttcgcctaccttcgaaccctgaaagcagctggcccgtctcggcgtcttcacctagtattagcgacgcaaagaacgagtctagtttgcggacgagacggaaggtcgcttttttagagaagggataatctgggagaaagttgttcacgaggccagaaagggagatcaggtatgggatttggaggtatgctaggagtaccgaccatgtcaatcttgccctttggaagatagaggagg

SEQ ID NO: 9981 - DNA, 203 bp, Emericella nidulans
cgtgtcgccatcaataccccaaacagacaacttcgcagcaacgacgcagcacgcgttacgcaactcagtgaacgcatctgataggcaacccgactacgagtaacgacgcaaaacggctgacgaataaagtgtactggactccagggagaggggttagaagcagttcaagagcgacgggtcacaactgagatggacgaaggact

SEQ ID NO: 9982 - DNA, 106 bp, Emericella nidulans
ttggctaccccacgatgtatgcccacaggtagacataattacatgggatctacgagatctacggcgtaaatcaagaggatcatatgtcgctgatcgaaggtacaga

SEQ ID NO: 9983 - DNA, 519 bp, Emericella nidulans
attgcgcggaatacgctggctgtcttcacgcagccgaatctgggagaggaggtggaggaagggaagacgtttgcggactttgcgagggaggttgttgagagaacttattgatccttctgccgaggaaagcacatagttgggagagtactgtatatagtgatgcctaattccaatttcgaagtcaataacttcagcgcaaaaatacaacctaataactgcccagggctagagtaatgcatttcctcacgtgaaatatgctatgcgtcctatatacgaattgccatcatgaatattttgttttacttgtcaaaattgctcccgatactatacgaacttgactcagcgtccctttctgagcccttttcaagtgtctgggacatatttgccatttcctgtctcttcagtgccacttctgagccggctgatgcgcgtagtaccatccccctctgacgcactatcttcgatctccgctttcacatcaacttttggacggcctggaaacccgttgggcgactcgga

SEQ ID NO: 9984 - DNA, 146 bp, Emericella nidulans
tattctaccggaagagctgtcgaggggatgagttagtccatagcgcaactgccgtcgacgttccctgtgggaaccgacctgaggtagggtatctgtctagacaggtagtagcgctcggccaggtaccggtatctgcagtgggggac

SEQ ID NO: 9985 - DNA, 1533 bp, Emericella nidulans
  unsure (1)..(1533): unsure at all n locations
ctcctccttgtcaccgtgaactcgggagtgggccgttgaggaggctctggccggatacgctcgtccttgagagcagagaggcagcgagcgaagacggactcgccaatcagggtgacgggcatgccgaggtcgagagcgttgacggcggtccacttgccgtacccttctgaccagccttgtcgaggatcttctcaaccatgggggttccatcgtcgtcgttgaagtagagaatgtcacgagtgatttcaatcaggaaagagtcaagaacaccgttgttccacttggcgaaaacatcggcaatctccttggaggagaggccgacaccacgcttgaggatgtcgtaagcctgtaacaattagcctggtttcttaagataaatttcacgccttacctcgcagatgagctgcatgtcaccgtactcaataccattgtggaccatcttgacgtagtgaccagcaccctcatcaccgacccagtcgcagcaagcctcgccatcgctcttggcggcgatgctctggaagatatccttgatgtaaggccaggcctcctcgttaccaccgggcatgagagagggaccgtagcgggcaccctcctcaccaccggagacaccgctgccgacgaagcggatgcccttctccttcaggtacttggtgcggcggttgctgtcggggaagtgggagttaccaccgtcgatgataatatcaccctcctcgaggtggggcagaagagactcgatgaactggtcaacggggtttccggccatgacaaggagcatgatacggcgagggcgcttgagcttggagcagaattcctctacggagtgagcgccaacaatagacttgcctataaccaatcagttcccgctcaagctctgtcaagtctccggatgcgccgggatttgcaaacttacccttagcctcgttctcaaggaaacggtcaaccttggaggtggtacggttgtaggcacaaacagtgaaaccgtgatcagcagcgttgaggatcaggttctggcccataacggccagaccgatgagaccgaaatcagcactgggaataattggcgccataagaccggcagcaatgccagccaaacgggcgctagacgtcagttactcaatctatagcaaggagatggacgagaagaggcgtcatttcggtgtttgggctgtggccgtcgcggatccaaccccgcgacagctcgaggccccaggacgacagaaattccacaagccattctaacgaagctcgaagattcttgcgaatcgcctggcgaattgcctggtctgcgtgcagagctccgtgcaggtctgtagatccgtccagagctccagcaggcggccaagaggggtttggctgggcagaaataaacgggatgaaacttacacggcgctgctcatgatgatgaaggatggagatatttagttgggaggggtataagagaggacacgaagaagatggaatctaaacacaaaatcgcaggtttgaagaggggtgaagttgtttaagtgaagagagtttaagaaagaatnagag

SEQ ID NO: 9986 - DNA, 613 bp, Emericella nidulans
ctgcggattcttcgggtcgatgaggcacgatgaggacggtgccgactcgagacagccgatggcgagggttgtcgctgtggcatcggcggaaacgacgctggcggcggtgccgtatacgagaggatacccaggcgcacggcatcatagacttcggggtggaagtaggcaatcgatgtggtagctgcgtcgtcgcttgctgtggctaggttggccatgcctgccagggcgagggcttgggaaagaactgtggtgcgcatcttaactaagataggcttggtctgaatgaactgattgagatagctgggtttttgggttctaccaccacttgtactgaacagtcttatatatgtgccccgttgtctgtatgtcccattcccacttctcaacccttttcgtccccacccatatgcccgtgcccaaggcactgtaacccctcgggctttggccgaggtttgggctcaattgccaagcttttcaagcaatggagctctgaaaccctgcctaacaggagccagccaagaccgcacagccgagtcggggagtctcttagaataatttgatcggtggcgggtctggctgccggcgagcccttacccggggtcggttttgccct

SEQ ID NO: 9987 - DNA, 1837 bp, Emericella nidulans
cccacagttgaggcggtgcgcagagacattgttgccaccaggtacagctgcgcggcgagcagggcctgcaacgaaagcagatcgtgccgcgctgtaagaggggtaaggagtgtatggatgctggagcttatggggggttgaatgcggcatgacggggggagcgggagatcaggcgtgatcaacatagcgaggtggaagacgcattgaaagatcgctgtccaagcggttgaggtatgacgcttgttctgctgctgttgctggtgctgctgaggctctcgtcgttcagcttcaccctcagccgccgtctgttcggctccctccccatacagcccctccatagccctcaagaaagttgggccatgcaagaacggaaacagcggatgccatactttgaaatagaccatcatcagatcttttgctagctgctgcggcggcgcttggccaagcacacacgcgatggaggggtcgtatttccattgcgagaccggcgtttcttctgcgcttgcctgggtatctgagcgcaggtcttgcagggagtcctcgctgcctacaagcgtatcctctggttgaggaaattcgcgcgaggttgagccgaatgcacgccggacggtgttgatgaagaagaccccactggaggaaccaacgaattggctttcttggggtgagtgtgctgttaaagagccgatttcgggggttgccatcttagctagagttcattacatctcgttggagagttgtggggaaacgagaatgagattgaagttgactttagcttggaatgaggcaagaggcgagtgagagccggaagatttttatccgatacttaaaatacgacatcgcacgaggaatatataacggacacgacaaacatatagtggatatattaaagtcaaatacagatatatacagatatatacatataatcttgtaagatttaatgctgcagaaaaccaaccttacccgtacgtttctgactgggctctcttagcgtctagtcaaggcttaggcgaaagcccatcctatgcatctaggttgtaaaactgcgtcatatcaacccttaacttgtcataccccatggcaagctccctactgagatccgcatctgtctcggcctgcacacaaagcctgaagaacggatcattttccctcgcagtctcggcgtcctgatgcagccgcgcaaagttctctctcgacatcgggtcaatgatttccttccagatctgtttccgaatgtcggcgtatttggtaagaatttcttcatctgcgagacctttgtggattccgatcaaggcatcgtagaggctgccgatgtccgcgatgccgccagtcaggccgaggccgccgctgttggtcgcatattgttagctggtttgctataccgggagggtattggggttggaaagtgcgtacaaagggttacacagatgcgccgcatcagctgcaagaagcacgcgtcccacgcggaaggaaggagcgcagcgctgctgcagtttgtacggagagatattggtgatcttgtactcatggggttttgggtggcttggaaggatttcttcgtagcgtttcggttggcgagagatatattcttcacgcgagaggttggggatatctttatacgtgacgcggtataggccgtcgtttgtgatgcgcgcgaccatgaacaggttgtctgggtggatgatgaagctggtgtctgtcggaaaatctttcgaaaagtcgtagtagacctgtttctcacctgagtttggatggtatagagtgtacgaaaaggtcatacatatgttgcgataatttgcgcattgagtgtctcgcgcgggtattcaggaaagaagagttc

SEQ ID NO: 9988 - DNA, 2914 bp, Emericella nidulans
gggtgatgatatgaacagtataacagacaggagattgaggagggagagatgtataaagatgaagatgacgacgtaagagtgaacacacgatagagagggagatgaacaatactgagaaataaaggagagctagaacacgtgacaggtagtatgcagtagtagatagagaaaagtagataagatataggataaggggaaacagagagtactctagtggaagcacagagatgagaatacagacaaagaggaagccgaaaaagagagaacaaagacacgtgtatttcgatgaaggaggggaatttattgaaagtatttaggactccgaaaaatgacgaagcgtatagaacaataaggagcaggctgggcccatccaatataacggggaaagatgaaacaccaaacacccgttcgcagaatctatacagcatggccaagcacgggcacagaaggtatgaactgattcctggctggcagcaaagtcctgtgcagccagcttccaagtcctcggcactcatctgtgtcagttccatgcccgtctgtactttgatcaactcccagaaacgcgagactgtcgtgccgatctccacgttgtcaacagaaggagactcgcctgaagcggcaaacgtcgtcgctagaatacgagtcgctacctcttctgcatcagcgactgcgagccatagatcgcctccttcggccggatacgcgccaatctgaatacaggcctgcacgagcttccatagaaagtcgtccgtattgggaaccgcatccttctctgtgccgatcacccagcccgggcgaacaatcgatactcggtgtgtcgactggtggcctgcaaagcgcgagaccaactcctcagctacaaacttgctttgactatagccatttgcctgctctagagatttcatgaaggattcgaggtcctgccccggtgatcgtttcagccctccagagacaaaggtgaagctaccgggctcggaccactgggccatggccgtaagtagttcaacagtagagtcgacattgacagccttgagtccttggtatggggcctgccactgcactgcagcaccgttgtgtataactgaggtgatcggagcccctgcgtctgctgtcccacagagcatccgccactgctcaggctggagcccgagctggggcattcccagatctccaggccagcattctacgcgattcgcgtaggaggatgaccaccacttggcgagagttgccgcagacactacacgcgccatacccttggcggcatcgttcgcgcggacatgaacgatgaccctttggacgcttgggtcggcgagcagctgggcgcagaatctgagagcccaacaacccagttgcccctgtcaagaatacttttcgtttgtgcttaatagactctgaacgccgggtcaactccctgtagaccctctgcagctccttggaaaggtcgagtgtcggcgcagcttccgctggcctatcgtgcggtgaggtgatcatggctgcgaggcctgtcacagtgagcttaaggtcgtatagcgtttcaacggtcatttttgcgccatattcactccgaataaacgtaacaatggtgatcagctggattgagtcgaggcccaggatggacagtgggaagtctcgcccgtcgagtgtggtcttttcttccgacgcgaggtcgaggatcttgtgattcaaccgcagggccaccttgttcgtggaatcgatgaccggaaactcagtgctcgtttcgtcgagctcgataacggtggtactctggttgcccaattccttgcgcagagcctttcgatcaagcttaccggcgagcgacgtgggcatgcgagcccagatctggtaccgggtaggcaccatatggtgaggcataacctgctccagctgctgttttatgtgcgacatggtcgaaacattaacgtcaccaagacgctgcagaatatctgccggtgtgtccgaagaattccaggattctttatcgcagaagagaaaggcgaccagatgaacatgatactcatgcttgaagacgtcaactgcagcgccggcagcattaggaaacagcctagcaagatgatgttcgatctctgcgatctccactcgctgcccccgaatcttgacctgcgagtctttgcggccttcgaagacgatcgacccgtcttcgtcaaaatgcaccaaatcaccggtcttgtagaaccgacggggcgttggagatggtgcccaatatggaccgaaaatgtaagcagcggctgttttctcctcgtcgttaagatatccgcgcgccaggtggtcgccctcgagcagaagttcgcccgttgcaccgatcgggaggaggatctcatggtctttggggtggacaacccatgcccttcccgcaacagtagtaccgatattggctgggttggaatcgagtgtgacaggacgcttgaccgtgctcacaacggaacactcggcaggtccgtaggcatttatgagtgtcaagcggttggcccagacacgctggacgtctctagccaacggctcaccgacgagcgcaagtgtctcgagtctcgggacatcctccggacgcagatgcctcgcatacgacgatgtcagagaaatgagattcacattcatgtctctaataaccggcgctacgcttccattgcggtcttcctcagttgggacacagacggtaccgccacacattaaggatcccagaatttcatagatacttaaatcgaatgcgggcgatgcgaagaacagttgccgggtgttttcattcatccccagcgcgggcatatgtcctgctgccgaggcagcgtaggacgcatgtgtcacaatgaccccctttggctggccggtcgaaaacaaagtaaagacaaggtacaatgcgcggtctctgggagtccccgtagtagcatgatgagtgtgggcg

SEQ ID NO: 9989 - DNA, 1900 bp, Emericella nidulans
attgagtattccctcgcgtccgcaaacgaaaagccgcaccagcagaagctcaaagtacgcgctgcgatccgcgaaacgaagaatttggagtatgcgttcgtggtcacgggcccgtacgctgatgttccgttttatcttggagcttccaagaacccccgcggcgggagctttgatgtcaagaataagaaggctgttctgcttggggatgggaacgggaggatcagcttggttgcttgcgctgagtacgtgttccatgcattctggttgctacttacaatgcctcgaggtatagatggtcaggctaacggtacgttgacagtgtcggtaaattcgtcgtgcataccttaacgcattgggacaaagcacgcggccgagcgctgaagcttaactcgttcacgacgacgccgaatgatatcttagctgaattcgaaaagcagacaggcaataaatggagcgtcgagtatacatccttgaaacaattgaagcagtacgagaaggaagcgtgggagaagggtgagcctgatgcgacgaccctaacgctcaggcggatctggacagagggaggaacgctttatgagcgcagggataatgaggatattggagcggagaacactaccactttggaggaggctgtcaacggggctattaagacgcaactcggacagtaatgtaatggtgacattgacgaagatctatgagtgtcagctctaatctatctatcgtgtctaatctctctaatatacagtatatacagtgacgatattacttccacttccaggtggaatttctatggatatgatactccttactttcaatcgccttcttgattccccaaagtccaccaagcggccagatcgagcgcaccttgcggctccaagactcgtgacgttccttacgatccgcctccacatcgatcttgatcttatcatacacactcggaagagtggtggcgttatacttctcccgcagctcgtcgtaccatttccggtcatacatactccagaactcgtcttctccgtaatacgtatgggcgtagaaccacttcatcccacccagttcgcggagtcgatgttctagctctcggttcgcagtcacgaaagcctccgggtctttcgggccgaatccccacacgccgatattgagcatttgatcttcggtgaagccggggctttgcacggatgagtgagggtggaaggttggcgctggactctgtttcaacggacacagccagagcggccagatgcctagcttattgctggtatagttgataaatttctcggcgtttgcatacggtagcgctagatcctgaatgacgaagcggctggattccccactcgcatggagcgctttatagagcatgcgcgtgtgcaagaagtcatccagccaccaccgagtcacccggctgaacgggaaatggaagtagtggaacgccgcccggccaacccaaaacccgcctcggtcgtaccggaacagatactccgccagcgggatatagtctgtgacgggcgagttgccgcgcgtcttggccttaacatgtagatagtaccacgggtcccacgccttgctaaatgtctgaatttttgcgctatcgggcatctcattcgtcatctcgccggcgacgacaacgccgtggtcggggccgtatatgattccatcaacgtagtcattcgcatcgttcagcgtcgcggcgtggacattggtaatagagtcccgcacactccgctgtgggagatacgtcgccttgacgaacttcttcgcctccacaagctgcagctccatcagcgtcgtgacacccaagcttccaaccgcgcctgcagcaccacgaaacaagtcccgattctcgttctcggacactttgacaatactcccatccgccagcaccatctccacatagttgata

SEQ ID NO: 9990 - DNA, 1764 bp, Emericella nidulans
gaactttcgcggcctacctgacatatgtccacaagcttcataccccactgcacctgcatgcagggcttgcctaatgtatcctagctccatccaatgaatgcagcattcgattcgagttccatacttgttgccttctagggccaggtttcaagcacgtaggcggcgcctcctttgcatagggccgagcagcacgcggcacggtctgccaactcggcaagaatattggaaatattgaagccgttgtgtttgaagtattgtaaagaaagatacggcgccgccgtgtagcgggtaccttcttgccttctcagtcacgacgggacggacgaccctcagcatagatgagacagatccccttcacccagtattgcgttgcccaatcaagacatcgtcgcttaagcaggagcttgtagagttatccgagcgctggaactgtggaattgagtctgaactcgacgtaagatatttgatgtcgtggcgaaacaaaggtacgtacgcaagtcgccggttttcgagaggccgcagagcgatcagtgacgatctcaatgaagaagaagtgaagttaggagataagccatgaagagggagatatttgaagtaagcgtagaccgggtggtaagccggagccattgggatgtttgattgtcgtggcattcactggattggactggaagaatagaaggaacctcgtatgccataaagtattatgttagcagacctggagaagcgaaggataacaagtgaaagaatgcggctgtttgaggttggctcacgcattcgtcacgttatgccttatggttcatgtaccaccagcctggggcatcctcggtgcatctcgaacatgccaatgctatcttcctacacatgacttctccatcccaagtggaagaaaccttcgacaatacttaattttccctgcttcttccgatagttcaggtctgctgtcccatcgcatttcatccttcgtcattctgcggcgctgcttagccccaatcccaagatcatgccacccactgcggcaagacaacacggccagcgcccaatactagcagggacaatcaaacaacatcacgccatacaattatttctagctgcactcgattttcccagaaacaagagtggttcatgttagttattctctggttattattggcgcactttcgaactattcggttcgcagccccaagttaacgtgattgttaggctcagaccactttggctcccgctacagagtatgtggctacagtatagacacggcaaaggattcatgcccatctcgcctagcaatcgacagatgagactagagtcttctcgacggcttggtagcggtggtgagacgcggtgatgcgattcggaatcatgcgttcctgatcctctactccgtacctctccttcagtttgccatggctgctatccgacctcgtccaatggacgaatataaatgatagatctttgaagcaagaagtcttcacctacttctcatcaccatcaacaatccagtcaagcgaatcagaacgtaaagcgcagctttacctccctaccttgtcattcatactaccagccctcgaagaccagtacgcactaagtctagatacttagtctttaccaatcggctttaaaattacaaacacacaatcacaatggtcgacgacaaatcatcaacaccagcggtctcccacgcgcgtgcccataacgactttgggacgaacctttgggtccgtcaaggggcagttgagcaccgagtaagcatgccctttattgttttct

SEQ ID NO: 9991 - DNA, 1053 bp, Emericella nidulans
tcttcctcttcttgttctccttcgtcttctgtctccttgttcttgttggctgtggtagtttcatgcagaacaggcaacgcaaccgctcgcacctcgcacttgggcgcaatgtccctgagtcgctcgtttaggaggcgcagtgtctccggtgacttacgatttggctcgtgctcgttccagggatagaggattcgacgggcgaaaccctgcgccttgagtttgctagggtcgagtctggtcttatcattgaactccccgcagtcgtcagcgagcccctggcctttcccagctccgttcgacatcctgctctctcgtccaatctccagagtcagattagtgagttcctgcttcagcacttgcaacccctcaatctctttcccatcagtcaacaactcatccagcacgacacgcccacggtgagcaaactcgtacgcatcacgcagacacccgcattgcttgagaccgttcacgagcagacaataggtatcaccaatcatggatctgtattcctcttccgtgatgggttcgaatccgtcgttttcatcttcatcttcctcttcctccacctgctcatcctcctctggtaccttggccggtgtcggtgtcggtgccggcgtcaccttcttcctagcatgaaactcacatccatccgggtcaacaaccgagtccagcaacgacagagcacgatatgcatctgccgaggcaagatcagggaagcccaggcgctcatggatcctagcgcgcgttagatggcgagaggggttgtgcgggtccgcatagagctcagttgttgcagcagcgcggtcttggaggagcctctctgtgtcgattgccatgttgactggcatagcagtctagatggacgcctagcagagagaatctcgagcaaagttttttttttggctctctttttttttcccttctcttctcctcttaatttcctggccctgtgctggggtaactttggtggagatagtaggtattttcccctctgccccgcgatctataaattttcagttgccgtggcgagtccctgaatatcagtgcagatac

SEQ ID NO: 9992 - DNA, 3005 bp, Emericella nidulans
actgttcttgacttatgactcgtgacaagaggaaaggggaattggggtgggaccgatgtaaagacgattctgtgtcctatatatcactagcacctaactctcgaaggagcgtgctcgcagctataattttggagtctgcacatgtcttacaaagagcgccttcctagaagtctccagatactggtccatacatcaaattggaaagactaagaatgaatgggttgggtctcgtaaggaggataaaccacagcacgttgggcaatgctttgaagattcgaaaaacgtagcttctgagtgtctgcatcgtactccatactaattgctcgagttcgactcagtagactctgaacgccactggcggcagtcactggccgaacgtgggactattatgtacatatctattgtcatcatggaatgaacaatttcctatgaggccttggcgctgttacaactacctgctctgctacgactacctctacagcttcctccaccactctctataagcactattttaataagcagaaccagttcaagctacttttcctgcctctacttttgagtacctacccacaggctacgggaatcttgcagattcacgactgaaaacctcgtgtcgtcatgtatagcattcactaaaaaggaggtaccttcataagatatatccgcgacttgaaacttccaattcgaggcagctttaatttgtctacccgactctctagacgcgttcagtattataatgcattcatcattcattgttcccatcacgtcctataatacaatgactacctaggcatcaagcgggtataatgagctaaaactagccgacacatgtcaactaactcaacaggcccagacacaaatgcaactacaaatcaacatgaatgagcgacgacggatgaacaccgggggtataggtttaaacgccatccaataggaaaaaaattgaatcaaaacagaacaagatacatctagtcagagggcaagggaagagagaggaaatcacttcaactgccccttctttaatgccccgaaccccttcgagaacagttcatgaatctccatcgagcgtcttggcgcagaagactcagcgccaacaccagtaccagcaatctgatcttgactgtcgccaagcgcagaagcagacgcagacgcagactcacttgcagactcgacataaacaccaacgccgcgcgaagaatcgttcttagccgcatcgctcataactctcggcctagccaggagctcagcaacctgtctctcgcgcgcctccatctccgcttcctcgcgggcgatttcgaagcttgatttcttcttgccatggtcccatccctgctgcaactctgacgcagcggcctcttcgaagcgtttcctgatatccagatccttctcatattcctggaagacgtcgacatcagtcgggaaaatattcgcgcggagggaggcgacgatgatctcgaagatgatgaccgcggtaacggttataagtagtacaacccagaatgagagatcgtgaccagagtggagcaggaagttgccagggacatggtaaatgccgtcacccgatttgaagtcgtattgtcttgagagaatcatgttccagaggaaccagccgccaacagagatgatgaagaccgctaaggagaggtatgttttattgtggacttcgagaacctgtagttttgtgttgatgatgatcacgcaggcggagaaggttagaagacccgcggagaagatatcgttgatgttgcctgtggtgaagagtgacgttgccgaaaagactgtacatgacaaagtagacgagcatggcttcgcacgtagctatgaatgtccagccaaggtagaggcggatgttgaagccctcgctgcgctggcctttggtgtagagttccggaacggcgaggagggtcgatgcagagagatccttagtgaaaatgcctaagaagatgacggcgagcgaggtaaagagggtgttgaacatgctaagactccagggctcatacagactcgtaccggtgtatccgttccatcgctgatacaaggcttgagtaagatagaagagcatttccttccagaacgttccgagagtatacttgcaagctcgcatgtagttccaccggccgtgaaccaaaagcaatttcagcaagaatctgaactgagcaatcgagtagtcggaaatacgtgcagcctgaagaccttctttacccgtgataccaatacccacgtgagcctcttggatcatagcgatgtcattagcgccgtcgccgattgccagagtcaccgaatcttgcacctgccggcgaattgacttgaccagaaaagctttctgcttcggactggcacggcagcaaatcaccgaatcgacaagaatggcaagtttgaagaaggcggcgcaaagggtctcgtccccttcaatcattgagagcgtctgcccatcgcccacgaccacggagtgagcaactgttttgttcaagatgtcctttgtcagattcgaaatggactcttccacattgcccatttcttgatccagaatcacaaggctagagtaatccttgaccaggcggcatgagtgaccaacattgatcgccgtctcccgtttgtcgccagtaagcatccatagcttaatgttcgctcggcgtagcttgtcaattgtctctgggacgcccttctggagcttatcttcgatcgctgtggcaccggtcaattcgagctgttgctcaatttgctggccaacctgttcaatccgttcctgccgattgacaagactagttgtagcttcttggtaagcgcatctccactccgcatatgtggcctcgtctaagaatcggtgggcatatagaagcgtccgcaatccctcagtagcaaagtcatttaaatgctggaagcagcgctcgaaaacagcagcttcgtcaacaaccagcgccacctcgaccaaatcctcttcatcgtcatgaacggaacttcccgaatcagagaacgtggtaaattaccgtcctgactgccgcaca

SEQ ID NO: 9993 - DNA, 1278 bp, Emericella nidulans
  unsure (1)..(1278): unsure at all n locations
atcaaagtggccttgctcacctctggatcggccatgggcaacttgtccttgataaatggagacgggacctggctctgctgaagcgtgagatgcaaccacccgatcagctcatgctacaatcacagcagtgtaagccagggacaggggattctgagcccacagcttatctttagcaatcctctgactgactgcatttggaccccactcagcgagtctgctctctctagaccaagtctgtcgcgaagatggtatggttccggttgagaattctagaactgtcgctatccacggcaccgcccatatcgtacctgctcaccagacctctcgtcacatcaaggactctgttacgttcgctatcagacttgttaagcccgatacaagaaatccgccccgccaagaaacgggtccggttggactttgtaaaaacccgttgggtttgggtttcagcgggctaacccatggataaccaaataacccacgggttttcaaactctcgggttatttgagcttttagattgtgggttgacccgaaactcctaaccgggctccgtcatctaagacctcgtcgagttcctagtgcttgctaataacactcttacaatcagttagatcatcagtttttgctagatcaatattattctcagacatgccatcagcatcgcctcgcggaccttgacagtcgtctttcagtgtaaatctattagtgaggacaagaagcatgtgatggatggttgatcggtcaagacggcttcgacggtggtggcagatatctcggcagctattgaaaagtgtcaactaatgaaaagtctaccagattatatactgtgctagtcctgaaatattacaagtgatcaggtgttacgcgtaggttatttaccccggaacgcgcagtatatataatggctccaataattactgttgggctctaggtacctatctaggcctctgcatggtgcggtcttggtcctcaggtcgaggaccgcacggtcctgcggtcccgaattgggaggttgagaccgaaccgcaccatagtgaaccgcgattgcatgattgtgccaagaccttcccttttcggctgcataaattgatgattcatctcgttatttactgttattaaacactgttttgggccgttcttacacattgcgtggtaattcagcatcaatgactatgaaaacagaagaaacatgctcgtatatagaaaatttactattcaaaatacctaggcagaccaacaaanagaatattttatgtgcttacccaatgatcccccttttt

SEQ ID NO: 9994 - DNA, 1128 bp, Emericella nidulans
aatagataatcaagggctgtcaagacacggagtagcttgacctgatcggagcttgctggagagaatttcgcaagtgccaagccctgcatatcggtgccgttcttggcttcatgaacatggatgattaattcatccaggtcgagcaaaatcgtggtgctcaaagactgtgcctgactaacaagctcgttaccaatagtgtcccgagcaccagggacagcagaaagattgttaatggtggaaagagcgtctcggaaaatcttgccgttgcattctctggctgcaagaacatgaaccactaacttcagattgaagtcaggaataaccgggggctcaatggtccttctcttatgtttttcctcttcgctctttacaggttcagccttggcatcggtcgaaggtgcgtcttcagtttgagttgatgtcgctgcaccttgtgagtctcccacttgggcgtcaggaggagcatcggtcatattcgtatccgcagtagattccaccgctgctgtagtctcgccgggttctgcttgctgttgaggctccgcgggccgttcaccctcaccttgttcaggctccttgcccttctcttcctccgcctgcttttccttttcgcgacgaaggagtaaagtaagaggctgagtaatgcttgccagtaagctcgagagttgttccatgcaggtgggactctccagtatgagtttgcggtcaagcagcgaaacaaagcgttgagtgcaaacttgttggctttgttttccttactcttgcctttgcggtatgccttcaactttagtgcagaagctgggtcgtgctcagtcaagaagaaccaggatatatgaggattgtattgggacaggtaggcaagcgtcccgagacattgttgcaccaccataatcggagtcacctcgttgctaacatttgatgactggaagccaaggcttcgtttgacagactgtggggttttctggatagctggagtcgtcgcacgtagtgacagttgagcaaagctgcgttcgattggggaggcaacgatgcagccgtctaatagaaccaacagaagaaggctgatcccctcgatgcaaatacaggcggttctcacagacattatggaggatgtcgttagcctggggctcg

SEQ ID NO: 9995 - DNA, 868 bp, Emericella nidulans
taaagcaacagtccgccgaatgaaacgaaagccgccctgtagccctgaggttagcatctacggctgctacaggaccgcgacaagcttacatgttcccaggagaatccgaggcctcctcaaaccggtagacctttccgtggcagacatagtcgtagtcatttgcgagtgtctgctcgcccattcctacttccctccagccggtctttgcgccgtcctccttgccgtctaaagagagagtcgaagcgagggccatggaaagcgactctccggtagtgcaagggtagagctcagagttgatatcgagggtaaatgtggtctgagagtcggacgaagtgcaggtcaggcgggagacgcggtcatatttctcttggttgacaccggtgaccgtgaaggtgtcttcaaaaagtaaagggtccgacatgactgcgggtgaatataaaggcgctcagtctctggtaaggcgctgaaatgacggtaagatgaatgtgccggtagtgcacgattgttagctgtagcggtcgcgacggaggagcttttttctgcttggattttacttagcgtaactaggtaccgccgccgcttttattgccgcaagcagccccgccgcaaatcttcaaaagtgtcacctgctcagcaacagctcccaattacacccaagatgtcctttcgcaaaagaaatataggcttgtcagcaggcaccgaccgaacacctgcgtctaaattacaatcgcagccgcaacgggccgtctcgtcgcctcccacgactcctggagtgcgtccttctcctgatgacggacggccaactacctctaccggttccccgtcacttgacagtcttctagctggtcatggtggacttcctattgga

SEQ ID NO: 9996 - DNA, 559 bp, Emericella nidulans
ttggcgtcctttggtcgccactgacgatagacccggcgcaacgccggggcctgctgatgcgttttgggctattatgaacatttttagagcgcgcctggaaaggtggccggaagggactacgcagacgaaacggatctattgcatgagcggcgcaaatcctgaacaatggatgctgacaccatgatgaggagtgtaagagatataacacgctcgcacaaatacctaccggatgactagaccatcatatttcgcgagatggcatcgatggtgactaatattatggacgacacaataaccgacatgctcctgaaaccgggaccgctgacggacatcaaagatacgtagacgtgcgagacaacaaggtctgagtactgtatgcagcgcatgaagcacggtgcgacgctgctggcacgaaggctggtaggaccatcatacagagggacctagactacctagggcgaatttaatggctggctaggcactagcctgagggaactggaatttattcgagagcggaccggtttacacagagccttcaggcaatcaactcatagtgccc

SEQ ID NO: 9997 - DNA, 145 bp, Emericella nidulans
ggacagtgtgttgtattcgggtattgcagctcgctgaaccaaatgagaacctgccctctcaatgattacactcgggaactggtgggaattgaaagatgtcaccagtatcgacgagcagcgttccggccttcgggaggacagtgta

SEQ ID NO: 9998 - DNA, 622 bp, Emericella nidulans
caatcccttcctcaactgggagggcgcggccgctggcggacgcgcggtgcttttccgcagttccgatgcagaggtcgctgcgtcttacatgcgatcgaaacatccgtttgggtctgtactaggctcagatggcttcaaggcgggcctcattcgaagccagaccgattatgttgtgtttgagggtgatatggggctccgcggacttgatgtcgcattcctcgaaccgagagctcgatatcatacggaccaggatgatactaggcatactagcaaagattccttgtggcacatgttgtcgaccgctgtcgcgactacagaggaccttgtgtctgacacaagcgatcgctttgatgggcccgcgaggaatgatcacaagatagcgagtggaacaggacaccaggctgtttggttcgatctctatggaagcacctttgtgctcttccgcctacatactctatttgcgttgtcggtcaccctcctagtggtcgcgcctatcgttctacttttaacaagcattatcctaaccaaagtggataagatgtatctctttaggacttcaattcggcccgagggtagtctggaagtccttcctctatacggcgaccgcggtgtcatcaggtat

SEQ ID NO: 9999 - DNA, 1187 bp, Emericella nidulans
gattcaagctggctggatagtgggcagtatatatccctagtaggacaagagaagatttatagctcaggattatcctaaagtacctaatcaaggcatgatataggatgttgttccatacatcaattgcaaagttactcgaagccccattccgacttatccagcttccaatcatcacacagattccccaaccatttcgaagcgctgatcagttgctggcttccatccgcagcagttacaggaaccaatctcttccaggcaaggacatagttttctagagtccacgactcgaaccggatccagtcatgcagcttgctgcaaacaaacggcttgctcgcttttccagcttgcaggtcagccaagcacgcatcgcagaggtcgattctgtcgcaatatttgcaaaagttgaggccgacaccgcgtttccagcacgctttgcaggggaagggaaggtcgtcaagcttgtgaaacccctcgaggattctggagactccagtccacagggcagcttcggtgctgttgggttccgcggccgctcgaagcctttcggtttcttcagcgaccttgttgaatcggtccatagctgtttggtcggattgacattccttctcgtagaactcaaccaaatgcgtgctggctgcctcaagggaagggtcttcgttttccaagagcgccttcagcacacccaaatcgaacttccgttctggaagcagcaggcatgctttgcgcgcattttcgaagtcttcagtatgcatgagggagttacggatggcagaaaagccctcccagtcatttccatcgtcatcgtcgacaagaatgttaaatgcggtgaccatttctgagcgcaggatttcttgtgctttgagccgttgcccactgagcgtgtataaggacgccagcacaagtttgacgcttgggtatgcctcgccagtttcgtacaattcttgcaattcgctcgtatagcattgataatcaggctgctcctcttggagagcctgttcgacacgacgcctctccgagtaaggtgagcgtctgctgcttcatgaagtcaaggtcccactgacgttcaagcccaatttcctcgtgaagtattgccaaaccggcatgccagtagtccacagccttgactagatcttctgggaaattctgacggagaaagtacattgcgtttcccagcatgagttggagag

SEQ ID NO: 10000 - DNA, 585 bp, Emericella nidulans
gggagggtttcacattcagcggtcgagcgggggaacaataccaagagactaatcctctgggcatcatttagcccacctcggacctaaagcccttccctgaaagccatgttatcctgtcctggcacctgactattcatgaccccactgtgcaaacttaaatccagtaagactgtatggccagtcttacgcacgatactaaacccacgcacccgagaacccggtaagtgtacacctctagggtgtggcatctgctgccacaagtgctcaaccagcgcctaaaaactgctgaagctaaccatacttactccgatactaactaccttacaagtttaatacattctacctacaactcaaggtggtttccttttaatgcccttccccacctaggccttaacaaactgctgacaatccgaaattaaatcctcctaccccactttaaaagtgcgttagcctccatacgggcaaaaccctttttacaccgcctggcacctccctccccgatacaatctcccttttacaccttgcacgtggttccccctaaatagaaaatcccgttccttatttcacccctttttgtctaaaccc

SEQ ID NO: 10001 - DNA, 1538 bp, Emericella nidulans
ggagacagcaccggccctaaaaataaaggaagggggcccactccttataaaggttaacacaaggccaagactgcgtggggaggaggctacagaggtcagaggggagggtctttaagggcctttgcctttgcccggtaatttggcggcccgaggtctcaagattatgccaagggttttagcgggcccaggggaaccaaggcgggcgggtggcgttccagggccaataaggggcctggaggcccaggaaagggccattaggactcatcccgccccaagttatgtcaaaggagttctttgctaggcaggggtggcccgacatcgccgtcccgggtcatgacgcatccacgggtcaatagcaaaagcgttgagtatacttgtacaacaactctggccagacctcgttagatacggctgcggtcgagctttttaacgatgcaatggaactttgagcaggcagctgttcttgttctcgtcacctggacactatgagtacgctcaattgtttgcaatgacagttcccttgtgctattatatattcctgctgggtacgatagagctagagttatgaggtatcttacctacatcaccctatatcgcgcaatgaagtgaagacctaggctaagggacttctttagtgattagacggtgcctgcgattttacgctctgccctaccttccgagagttcgccggagcgaatggccaataaatttttcatatctccctgtgagaacgtatgggatataattaatattccgctgctactatgctagcctaggaagtttgccccgaacgcctctatacagccagacggattagtttgattcagtaccctctagcacattctatcagtctcagaacggtttgctttcagatggacactgtccgtaacctagcaccaacaccagcaaattctgttggagaaactaactatatctccagggatggccggtcagagaggtacaatctacaaaacagagagacaatgttccgtctctcaatcttcacgcttcagtcctttctggaaatcctgtaccacagcctcgacaagcccctccccgaacatcgcttatgacgtggttcccaatggaatgcacgatacgccatgagtcgggcaggccgatccgccagatctcgatctgccccagcttaccgttacacaacctaacccgtcggccaccgaggcctgtctgttcctgcagtgaaacgccgcaagatatacgtcaactgcagaggaagaagcgagccaatcgtggaattaccggggtagctgaaatgctgggtcgttggctggacgattgggtcacggcttgctgggacggagtacggatggaacttcatagttggcagataaccgagcattgtgttgatttacgcggttgacaaggtaagtaggtggcgtcgttgtatatctaaaataactgaggcataggctgaataaaatgattgtctgtcttcggaaatattacgtgctgttcttatctctatattcatgaagaggacgatgcatacactaaagagatcaacgaaagatacctac

SEQ ID NO: 10002 - DNA, 109 bp, Emericella nidulans
cgtatataccaccagcataactgcttcgcgctcttgggcatcaacatttatagagagctgcataactatgcctagaaacaccagaggaagcagagtacacaccacactg

SEQ ID NO: 10003 - DNA, 739 bp, Emericella nidulans
tgggccttcttcaaaacgggctccatcttcgtagccttcatgatgttgcccttgatcttgagcttccctcccatgaagagtctctgagcattggccttgccggaaacgagagaaccgaagtcagcgtccgaaaggttaagggtgactgacaatcaaataacgttagccttcgacacacaaatgcccaattcataattcctgaatagatggaaactcaccatcagccttcttgccggcaggagcagcacccttgccgacctcgcctttctccttgaggtcgaggtaccagctctcttccttgccgctggcgttcttcaggttgaaagcaacgatagtctgggcactcttgatggcgttcttgcgctcggcttcgtcgctctggagggtagcgttgatcacgtcgaaagccgcggaggagtcgaaaccgtctgggaagggaagttcagttagagcggagcgcgacttgagtcggataaacgctgacttacaactttgagagtcattgtggatacggcgtggtagaatatttagtagtatatcggtaacgaagaagttggtgtaggcgtatgtgtaactaccagcaggagacggcgagggggaacaaatattaatagtgatggacattgagcttacaccaggcatgtgaatccaggcggtcggggtactgttgcgagctttgtgccgaggctcgattcctcgctctcaatgctcaattgggtcttggcggtacatggcgatg

SEQ ID NO: 10004 - DNA, 1590 bp, Emericella nidulans
  unsure (1)..(1590): unsure at all n locations
aggatattaaaaacaacgtgaattaagaatagaaaaaacatatgatttcttcagaaagtaatccaattggcataaggcagacaagcacaatgtttggcaacccctagattccccccccaaagaactcatccatcggagtatacgcgccgaacggacctgccccgccagcggccccgaaggcgttggatacgatcgcggaagacatcccggctgaaaaagcagcgcctaactcagtcggcgcacatgtgtccccggactcttgtgtctacgtcacgaaccccaagggacaacacttcaagtcactcgggcaggcagatcgctggggccgggtatggttacttcccgaggaggctctgtacttgctggaaagagggagtcttgacatacggtggccccgctgtgctgttggagctggtgacgaagatgatatcgaagactctgggatacctatgagcttacaagctgcctacgcgtgtctgatggggcgtggtgggctaacgatggagaggttctccgtttttactggtcttaggcggttgggttacgttgtcgttcgagcacctggatggagtgaaagtgaggaggagaaaggcgcacagtcggtcacgaaatccggaatccaacaggggccagggttagccgggatcttttctcgcttcctgcaatggttacgcgatactgcgcccactacagcattgggacctgttgctggcctcggctttcatcacaactacggtatgaacgtcctggtaggtgtctctgaatgctgctaatgctacctcagacagcatatttcgcagactctcaatcataccttattacgaccccgttacttcggcgtcgtcttctccatcgccagagctgccctatgccgttgtatggtatgtctacaagccgtcaactaattttcgcaagtccgctccaccaagtcccgatttcaagattgctgtcatagacgctcggacaactaccactatacccaccctgtctcaaattgggaacctgcttgagagcacacctttagacccgcctaaccctgataagcagctttatgtgcggctgaaaaacggctatcgtaatgtcgtgctggccgtagtcgatcaaggcgttgtgagctatctcagaattgccgacgcggcctttggcaaagaaaaaatctatgcacaacggttatccggtggtaataaatttcgtggaacgccccggcataaattcaagaagcgatgattgtccgcgcgtccatggccaatacaaatcctcgcaaactatgcaagggcaacgacaaagagcagcttgtctccccttaatgaggccaaatatccctcctgagtggataaaggctgaaagagagggagtctctttgatctgccatcatttttagagcccccagtcatggaaagactgacgcagatctatagatggctaagccgaagcctcaatggcgcagctccgagatatatagcagtntagagtgaaaagcgtcagcctagccctgctgtgagatcctaaaagctgctattcataccatggctaaaacccgacattcagatgcactttaattaaacgtcgccaaacaaccactcatgaaag

SEQ ID NO: 10005 - DNA, 1072 bp, Emericella nidulans
tcacccgcccatacgaacctttccgggacaccgaccgcctggtagactctcagtaccatgacaatccccgatacggtcggaacgtgagtagaggcagtcggggtagcagcgacagcgcgacagcatggctctcctgacggccgtcatccgacgaagcctggatatgggtttgcctattgaattctagagtcataagtcttgggtgttttaatgcaaatcattgtatgtcttcctggtcattttgtcctcagcttcttgtgcatgaagcgtcttctttccaagcgccgaattgatgacttagcgtttcttgttggccacattgttttaccttctgctctcttcacatcaagctttttgttggtggctccagtgtcagaatcttcataccgtcatttatatcatttcattctctcaaattaagaccaaattgattcatcgcgcacagcaccccctacatgggataaccaatagcttatagacaaacatgaagtttgtaaatataccaactcgatagtctacaatacaatagctcacgaaattcatatatgtggtcgaagttgtgattacttatagtgcactaccagctctatagaaatctacatgttcatagctgacttcatatctaggccaaaatgtcacaagctttccttatatgcggatataaatacagtaaagtggagacaattatggccacgatctttgtttaggttgtccgcacggccccgggtcgatatgatgatcaatgcccgcaaaaatcacggctacaacgtctggccttacacagcggcacaatgtgctatgctcatcaccaacataaactgcaaatgcctcactgctatcgccaggaccatggaagcgggaatcatatctccctttgcgaactccggcgatatgtggcgcaagcgatttgatgatagcgcactatggaaggccgagtcgaacggacaccgaggggtaactaggtgtctcaccacgacaaaccgtagtgaccgtacaaggcagctgcattgatctatgcatgcaatatcgtaattcggtcgaattgttagcagcacttctagcaaggtttctt

SEQ ID NO: 10006 - DNA, 468 bp, Emericella nidulans
tgtccagttgctgtatatcgtggaatatcatgtgaccggcgtcttctcgacaatggcttacttccgcgcgacagattcctccgcatttggtcatctcattgacgttaattatacctggatgatgtcggtcactgtgagttctgaaccgcccccgtccctgccttaaatccattatctgcttaggagcttacaataccatcttttagcttcacaccacgcacggcgacctcaaggtcgagcttttctgtgaagcagtgcccaagacagcagaagtacgtaactgcaaggcgagaccgcataaatttcttgtatatctgtgattcactatcatcagcaactgactttagcccctcttagaacttcatcgccctttgcgctgccggccgatacaacgacaccccattccaccgtctgatacccggcttcatgatccaaggcggcgacatttccctcggaccagcagcaaac

SEQ ID NO: 10007 - DNA, 107 bp, Emericella nidulans
ctccatattgcgtgtgtgaatgtacatatacatatacacatgttgatgtagtagaggtactccaatattatgtgtgtgtgtcgagttataacgttcatttgttaata

SEQ ID NO: 10008 - DNA, 495 bp, Emericella nidulans
gatggcagacccacataagcagcagaccaaccctcataccaggaatataacggcactttacactgaacacgctgctattatagatacaactgtcattgtctgataatctatagctctacggtcaaggaaccatgcggacaactttctctaaactgtcaaggctcaggcagggttcgatctgtcgcgagccttcgcaatgcagatcggaggggctactctatccgcttccgcttgcagatgctaggctctatcgtccgctcacatgggtgctggggaaacactgtcaatggaagtggtgatggccatctcattatgctgctgggcatccgcgtatttcaactgagcgtttaaggctgaatctgatttttcttgtaccatcatcaggaacccaaagcacaatatatatcaattggctctgtattccctaccgtagtattgacacgcagctcgcaccaccttatatatctggaccatttgagcaaggacttcacggtg

SEQ ID NO: 10009 - DNA, 104 bp, Emericella nidulans
ttctactagtctcatgaacgatcagtaatcactgtaatggtgaacagatgtactcagtagaatgtattgtagttgtggcaagtagtcttagaatctataaaatg

SEQ ID NO: 10010 - DNA, 1839 bp, Emericella nidulans
gctgaacggtgcccgtccggcacttccttccacgtagtacacgccttcggaatgtcgcactgtcggcgtatcagttgtatcagtgcacgtggattggccagccgtcaatgcttgtccggttcccgagggcgtccacaacggcgttgagggctgggtagcattggtattcccctgacccacggggacagcattgttgcgatttgtctgagaagcgtgctcacccagtctatccatactctcaacccgcgcggtagttccgtccttgccctttggcagcagtaaatcctcgaactgagcttctgggaaatgattactttcgggggagagccaattcacagacgtcaggctcccaatccagtggcctaaatggttctctagcgtattattctcgaatgctagcataccttcactaaccaacccaggactcgcactggccagtgtgccggattgctgcaacggcagccaatcctgtgtaattccagcattcggggcctgactttccgactcttcgcctaacaagtgtgaagttgacgggaggccatcaattatcgaattgttcagagtttgttgggacgaatgaagctggaaagagctgacatcgctgagatagaagccgctctctgctgtctgaggaagcgagccagtttgacccaacccggattggctttttctcttccgcggtactggatattcacactgaatttccttcactgagcagcggtcgcagggacttcctcgggagcagcggacgcgactcaacgcgcactccttgcaagccctcgagctgctcccacctcgaccttctgacgcgttacgcttatacctatgcaactgactatggcggtgaagcacgtccaagcggctgaatgatttgccgcatttcacacaatggaacggtttttctgcattatggctgcggaggtgacggctgagatgttcttgccgagtgaatgttgtttggcagagatggcactggatcgaacaccctccgcgtgatggtgagtaggggaccggatcccatcgcaagaggatagtgtctgtaccggttgtcaatatagtctgctcataaacgccggcaatagtaggaaacagtatcagatgcgggcgacgtattagtggagattcctgtagaggatgaaatgtggggtaatgtggggatgaccgggacggcatgggccgcgtcatacagcatgattcagtgctagtaaaatttatttttaccctgagaatgggcatagggctgtagctccgtggcggcatagttccggtggggtccgagatcggtgtagcacaagggtttgggttaaaacccctggaacagcagggccagaaaagccccgaatggtggaaaataactaatagcaacactttgatggttcagatgatatcactacatcattattgaactaggacctagttcttcattatagccatatagtggacggctcaatacgcgtcgataacactgccttctccggccagcagacagagaaccctccctgaaatagtcatccaacaactagcactttccgtgaggagagatctcaaacgcaaaagccgtcgagttggttggaggatcaacggtaaatgtaagctaatatgaaaggagtcatcagctatggttctgtattcaacaaccaggacgcgcaccgcggcgtacgaggagcaattgaagttgcaacatggtgtcaagatatctcacatacctgtccatcctggacgggataatgggaacagccctgatccaccggacctccgacatcagcaaactggccattccagtcgaatcgcaggatccgaacgccgatctcgccacgacggggaaatcccagtttcggc

SEQ ID NO: 10011 - DNA, 567 bp, Emericella nidulans
gggttaaataacaaaggggtccagcacccacctctacacacaccttcgaaaccgcttccgacgcctgcgatcccatccccaacgacgtggacacaccccacaagcctgccgaacccgagttacctccgcacccccgccaccaccacctgtcacccgctcggcacgctgactttatgctaaacccctaggaccaacacacctccgatacaggccacagaccacgtgcagcctccagtctatctaccgactagaggcaacctccgagcaacccatcgccgagggtcgcaacacagccagccgtaccacacctacccaccaactcttcgttacccactcctgccgaactaatcaccccagagccttcccgccccctcttccgtaacaccgcccaccccccctacacccccaccaccagcggcactatcggtcccctcgtcgtctcttcagaacctccaacctctactcccctcttccctacaccacctggaactctcactacccttagcacacctccctactaaatacacgccattcatcacgccctgctccccgtcaccccggactccg

SEQ ID NO: 10012 - DNA, 158 bp, Emericella nidulans
ctcatacgctgtcacaggaaaccgaacctcaccgacaacgcgcacactcctgcacagtgttcctccgtctcacgcatcgccaatcgaccgttatcaagcacttcttctacccaaaaagcccgcgcgacttaccacttacgatgccgccgacgcaacga

SEQ ID NO: 10013 - DNA, 2289 bp, Emericella nidulans
  unsure (1)..(2289): unsure at all n locations
ctggacttcactaagaaccggacattcaagttgatcaatgaaaataaaatcaaccccacaacgaaaacgccggttggattcaaactccttcccgcatacagccaaatgctcctcgcccacccagattcctaccactccaagcgttctgagttcggcgctcatgccgtttgggtgacccgatacgacgatgaagagatgttccccgcaggccagtatacaatgcagtcaagtggcggcgagggtatcaactcggccatcacaaggcgccgcaacgatcctggaagcaaaacctctgtccgcaacgaggatattgtcctctggcacacctttggatcgacccataatccgcgaatagaagattggccggttatgccaatggacaggatggttgtcgggttgaagccggtcaacttcttcagtgggaatcctggcctggatgtccctgtttcgacacaggagaggaatcggagtgtgttggtagaaggggacacagtggtgtcaacttcggacgcgtgttgtcgcttgtaagcattcgtcgcagcaagaaaattttatttctgtgccatatatggcaaatttccatatcttgtgctatcaatggttgttccccaccccggtatctcagtgattattcatagactgtcccctattctagcgtagttcatacttcatgaacctgccacaacgcaaaccaacttttggccccgatatttggccagaggagacgagagctcaaggcccaatataaggtacttgactttgggttgctacatgcgccttgtctataatattctctctggcaattagtttctctttttgcggaataatttaacggtctcaagaccttatgacgttttaatggatattatctaataatagtaacagatcgtattttagaataactcggatgataatattatcgtatcatcattaacaggtattacttcctcttgctcagggtatgcttcgtgcacagattaaggatgttccaatgaacagatgatcagatcaaaagtatcccgtgagaaactgtacatgaaggctgtcacagtgaatgcagggggaaaataaatactgagatttgcctggtcatccttggcatgtttaatcttgattggcaacggcattccagaaaacaaattatgcacattaagcggttggccttactgcataggccactgaccgcagattcaccggaattgaccaagacgatcagactgaaaatttccgtggcgaccttctttcccttaattgtccagttctcaatttagttacctcgatgagaacgcggcaaagagtcaatacctggtaaataacgctgaggataatgaaacgtagggtagaagggccttcgttgctatccacaacgacctgggattagcagaacagtcaccattaacatcctcataggtacggtgagtcaagtcaccgaagcaccacaattgctttatcgctaaccacttccccaacggctcttccgctatgggctcgagacttggatggttgcaagaacggttggctcagtagtttaagcttacgcagcccctctgtttctgtttcataaatcctatgtgccacgaccgttccatgcacacaaagcctgattagcggctttttgtcccgttcctggccctgtaattgctcctgcggcgcgtcctgcgcctccatggtaactgaataaaagactctcctggctcgaagtggatgacctcgtatcgtatgcccgtccgagcaaaacacccggctctgaagaaaaaggtttcaaaaaagaggtggtccatcttaccgagaagtctttttcgttcgtggcagcttggcagaatcgaagatggatccacaagctattggataaactgaagtttttacctgggaaccgagaaacatgccctgaatctgggtgggtccacatggaaagaaaatgtttgggatgtcaggacaatgcttcggttggtagagtggaacgtggttcctaggcatataaatgttttagaaatatacctcccgtggtgacccctttggcttaagaccctctggggagcaccatcttttttttttgcccacaataccccacccagggtttatatctcatttttaacgtaaaacccactgctcttctaatattaaagtggaatccttcactccccactcatccccatatanaattccctttttacactctttacactcttatctttcctctcctcgcgcccttctcccttctcactaactcatattttccttctcttttatactgcccactcttctccccctctacccctatttctcccc

SEQ ID NO: 10014 - DNA, 1267 bp, Emericella nidulans
tgtttattaaggcagtcttccggtttcaaatcacgatggatatagcccagagcatgcaaggcatcgatgcagcaaaacatctcggcaatatagaagcgagcgtgccggttgtgcagcacgcccgtgttgttgagcagggtgcggaaatcgcctcctggcacgaactccattgcaaaataaatctgtgtttcatcctggaatgcataaagaagcttcactagccattcgctcttcgctgctgtcaagatgtcgcgctcggtaaggatatgccgaatctcatccagtttaaatagaagttttttgctcatgaccttcaaagcgcatacttctttggtgtccttctttgatgccaagtacacctgtccgtacccaccctgaccaacctgagtcaaaatctggaaatcgccctgcctaagtctggtacgacgcttgcggaggtgggcccgttcccgacccaaatatttggataaagcaggctcatactcttcgatcggtgtcgcgggaggctcaggatttgcggcgcaaaactgggaatagcgggtttgccggttgtgaacgtagctcaacaggtcgaaataatagtccaggaaatctgtagctgttagttggtccctacagaaaaagcatttcgcaaaggcttacatagctgggtcacgttgaccaggcgctttacgcgtgggttctgcagtttttccaattcctccggagtcagcccccgcatcggcacctgacgtctctgcacgctctccagatctcgggtgtggtattgctcttgacgagaaatggccgcggcagctggattacgacccagatccttggttaggggagccgattgcggtaaagtgttctcattcttgggtcgccgactgggactggccggacgaataacactctcattgaaggtttcgccgctctgattgggtagggtaaacattggatggttgaaattgttgtgcgcattcttggttggcgatgaaggctgcagtttcagagcgttatcgaaaacactagggaggtccagggcaccaggaggcatacggctcttgcttgggctgcctagcggggttgagattgggctggtaaagccatcgtcgcggggcgttgagggggcgatcgaacgcctcattgccggagcgagtgtgtaaaggcgggggaaaatggggaagacgaaagttggaatggtctttagaatcgagattcagagtcatgatggcataaagcttctgaaccccgtggtgtgaatatttcgaagacagcgtgcgagcgc

SEQ ID NO: 10015 - DNA, 485 bp, Emericella nidulans
ctcggtacagaatatatttcgagtcataatctatttctattcataacgctaaatgatctatggccccccattcatctactctaacaagaacttcagaaaagccaccccaatagcaattccatcatgcggctttccggctctctccaatgcatcctcagcctgccccttatcaaaaacacccgccgcagcccgcaagttcaccacctcagaaacaatatcctctttgaactccggatgcccctgcactgtaataaacttccctgccttgtacattccctggacttcgcacctcggcgagctgcccagcggggtcacaccatcggggtacgcaaagacgatgtcacggtgcatttgttggattttctggataccgttagcatgtcgtattcagaatctctatggttatacagcgttggcacccaccagtgtctcaacaccaaacaactctttccccttttccgtcaaatcaacatcgcaaacagcaa

SEQ ID NO: 10016 - DNA, 125 bp, Emericella nidulans
tagtgacaatgtcagaaggttttggacggttcacacgaccttggatgcggcccaggcttcgatctgatcccgcctatagatggcactcacacagccagcaggctgcatttctgagcgagctctct

SEQ ID NO: 10017 - DNA, 805 bp, Emericella nidulans
cttgctattatccgcgcgaggatctggagagctcggagtgacgaagtggtacggtgaacttctaccaggccttgcagagatgggtagattcgctgcaaagctcctggaaggattagatgcggttccaagaatgctaggccctgtaaggtcgacaacgagaagctcatagcggtggcgcttttagaatagatacccatgaatatcacgtcgcgcaacagagcacgaagcgacgttttaaaggctctgtcagtcttcgctcctgtgggacctccatctcgccactctgttctctgttccagcgcattacgaagaagtcggtaaggtagtacaccagctgagctaaggtcttagtccagctgcccgaatttgacgggtggaaaaaagtctctacggcctgtataaggccttcgagctggctcaagattgattcttccttgtcaagacatgctggtgatagagacataacgatccacctagcaatgtgatgtgcaactggatgcttccgagagtcgcgatcaagcattatccccaatccagaggatatatcaaccagcgcactgtagggggagctcgactgcccaactggaatttccggagcctcaggatggctgtgacaataagagaagattgctctttggtgagagccatattagaaacggaatatgccagcagcaatgagtccccgccagcggatgagatgtcagtacgtctgtcaaagttttgccggctacccagaccaagatggagttgttgcctataagctgggagaaatcctttggctccgggggggggtgggatcagaatt

SEQ ID NO: 10018 - DNA, 1166 bp, Emericella nidulans
acgggtgctggtcgccggcagcttaacagccaacatggaccatgtcgttttcctgcaccaccaaagaggggctgcaacgtcagaaaggttatcttggatgatgaggcaagtcgatgtcagagaccccttcgtggagattattattagatacatcgagcgtcgaacctttcttacttgggtggcctgggttgaaccagcgcgaactggtcaatctctacaaactgagtgatagtaaagtatatagcgtagactacgggcgggaagacaaagagaatcattacaatacacgacttatttgatgctaagtgtacggggacggtgtattgcttgattccaggtttccagtaaggaggagtcttttaaggagtctgcgggctcaggccccctaacgactggctcaccctaaggagctccctgcgaggttctggaaaaggagagtgcctatcactactgaatcaatgaggtctaggtagttctcaggtcgacgttcagcgagacccagtaataccatcatcgatatttggccattcttcaccataaaccggccatggccagtagttgacatgctggaaaaccccagctgtacgatgcgtttcaacttgcggaacagcattttggaagcaatcagaaatgactggcaagtgtatccttagaccagatagcctgaaacagattacttctagcagacaggaaaccagtgcacgacaatacgcgatttacctgctttacccacatcattaaatacgggtccccgttactttaccgtcttttacactcctcagccggcacctctcgacctgtatctccgccctcagtctccttcgacgctcttcttcttttcttttctcccttacactcgcctggagagagaagccactcctcctcattcttctctcctccttctccttcttctatcttcgtgtcctctcccctttctctcctcccgtctctcctatcccttcctggtcaattcctccggagagattcgagactggtcctcaagtagagatacagtcgacggcgtcttgtctgtcgacctagtcctgcacccgttgcaccagctctccagtcgagccgtgtccgtcagctcctgcttcgacgttttcgcattcgacgtttgttagctcaaacggcgacctcttccctatctgacagtcgaagtcaat

SEQ ID NO: 10019 - DNA, 1660 bp, Emericella nidulans
acgtctgctcgtcgagatgccacctcatcaggatgaagagtctcaatgatatccgataggcttttgttgtttcgctccgacctgacagatgaaggcatattcagcttccgccgacatatggggcataaattactatgagataaagccatagcgacgcatctacgacagaaagtatgaccgcagggcgtcgtcaatgggtcgagaatcagcgagtagcaaacctggcaatctagctcattgcgcactgtggctcgaagtttggtaagcgtgcgggtatactttgtgtagcaggcagataggggaggttggtagctgacttccgagacgttatagccaaatcgacctcccttaaccaagttgaacactcccgtcaggggttccggaccaatctcggcactctgctccagcttccccctgtcaggtaaagctcccacccatgcgactgtttgcccaggatttccatccttagttgtacttgagtcgtcctccagcacctcgtcaaacacctcaaccaacctcgataaaaggacatcagtaccacaatcacccagacaatgatcggcaccgcatccaccttcacccccgtaacacgtaaagccctgcttccgctcctcgattgcaggatatgaaacccctatgcgtggcctaatcggcggtaagcagctccgacaaaacgtacctccacacggaagtcgaaggggtgtttggagaggaaacgagcaacgagagcattgtatcaatcgaataatggcatgcggagagatagtagtcgcctcctcgaaagtctggttcatcaatgacggcgtcatgcagcgagatgtagagcgagaatcagggtcatcgccgtgcgggagagtgtgctgagaagcctcatcttccatgttggtattattggttttgtatgtatgtggtagattatatacgagtaaagtatatatggaaaggaaactttgttcgtatcaaatgcaagctagccgtttcttcatggcgctgaggtgagttgtcgacaaaacaagttgccttggtctgggcaataagatactccggcaccggtacacggaccgcgggattctgatgaattatgtaagcatttgctgcagggaatcttcgatcagcttggaagagaatctcaagcgaggtatacaatgtcgcagtgagcggttacgaagctattgaagatagcccgagattgagtgagcgtataacacgctgactgactcaagaataacggagctacgcgaactcgttgtctacgacgaaaaacattccagcgaaccgaaaattttttatcatatattggacatgataagttgaagaccaggcaaaattgccgttcttcgcgtttattccatccacattcagcaggtaataagcctagctagcaaatccatgtcccataaagtccagccacatggcgtaaataactctgccaaccggaatacaagacaaatagatgcgcgctgcagactcgcacatacctacagacgacgaccgcggcgaccacccttgcgacgagtagagtcggaaggagtaggggtgacgtcctcaatacgaccgattctcataccggaacgggcgagacacgaagggcagactgggctccgggaccgggggtcttggtgccgttacctgtagcatttggtatcagtatttgctcgca

SEQ ID NO: 10020 - DNA, 1209 bp, Emericella nidulans
actcacaggaggaaggccgcccaactgttcgaggcggcaaaacgtgacgcccatcgcgtgattgatatcaagggacagatctaagtttcatttccgttccctatctcattgaactacgctctcccgtcaccatcctgaataaccttccgtccgcacgatcaccctacacattgttctggttatcttttatctcgtttctcttcttttccttttccccctgtctgttctgctctgctcgaactcatcctccgaccgcctgcgtttgcggtccgatataccccgtcaatagcaaaagcactggcgtctttcatcttcgcgctttggagtttggcatacggtacctagtgcagcaggatattcacctggcaaattcattattccgtacatactgcctattaagtcgaagataaatcctaatcacttgaagggaataacttgatggtctcagcactgccgacgcgtagaggtatacgtgtacgggttgcccttggtgttaatagcaaatcgtagtaacttgttacgtacatctctggcccgcgtgctccagatggatctggcgtggaaaagcagccccgcagcaacgttctcgaacatagcgggtccagcgattcatgaagcgttgggctcgggataaggacgttcatttgatctatgttttttgactttgccataaataccttcaccgttgtccaagaaaagacatctatcaactgacgcactggctacgtctgccgtccacgcgagccagccttacggttcagccgcgatccgccagtgcttcatccaattttcgatcccagcccactgttgaaggcggggaagaagggcgaaagaatggaatcggagaaccagcaaacgcgaaccatggattgaggctgattgggctctctgacggtccgaagtcgctcaagtgagggcttgcgtgcttggctggaggttgacgcaggtaggcgatgatgtgagttctgatacttttgtctggctcaattgagaggcgggagaaaggatttaaacggaataacgtcataaggaatcagtggctgaggtactagatcctgaatacagcggaaggctggcggcggcgatggctgtcagtgtgggtgccagcgccagtcacctgatattaaggtgcggcaaggtacatttttagcataacgctgtggcaagcaactctgcctgcaccctgcggaatattctgggtaataattg

SEQ ID NO: 10021 - DNA, 156 bp, Emericella nidulans
cgtagtgcgcgtatatagactatcattatgtcatcagataaatctgctctaatcgtaaaggctacttcgtctccgatagtcatactgcgacacatagagtaatccagaaaggcgtatgattacgcttatctaaacgtagatgtgaccagagtgtca

SEQ ID NO: 10022 - DNA, 132 bp, Emericella nidulans
ttcagattcaaccatcagtacagcggcttcagtgacggcaacaaccgagagtgcagtgttggactactttcagactcgtccccgacaaagcgtcaatcacctcatggtgattgatgtgacctacgcgggcag

SEQ ID NO: 10023 - DNA, 925 bp, Emericella nidulans
  unsure (1)..(925): unsure at all n locations
ggccttacttgctcgaaagagggctacagtccaccatcattgcagaagcgccaacactctaaccttaggcgacaagctgtggcgccctagaagccgtacgagctggtctttaagaacggtcagaaatagagcgtactaccagacactcaataaaagcgctagcccacgcacccaacactttcgtaatgcctgtgccaacgcataccgcgaacccttagcatgtatataatggtcgacattaaaacagcgagagccactgtttcagaatcaaccacacagacatgccacatgttagtgttctatgtaatcagcagactcaaacacgaagtatgacagcgtgcccctagccgtcccatgatttagacacaccgcatactagcctgtattgcgtggaattcgacgaagagagcacactgcatgatgatggtcacaacctaatgtgagcgcttgacagcttcgcaacctatgcagtgtcaactagtgaacataaggtaagctattatgcacatattacgctgaatcaactcatgagccgtgctgaatgaacgacttgctatgtgtcaaaagaacagagccaaatgcagtacgttttttaaggcatctcagctgcagaatgatgccagccttcatggtaaaattttgggtgatgaaccctattgccgatcgtttatccaatgcttactacctttcattgtaatcttggggccataccttccaaaattctggaaaaaaaataatttctttagtccagagtaaataatcttttctttatgggtcctctaaaattttaaaaaatatattcancnatcctaatatatcataaataggtttgctgttcttaaatttttcactcctcttctttctataaataattgtatttatataaattttcctagcttttcctaactcttcaggtgtatttttt

SEQ ID NO: 10024 - DNA, 1117 bp, Emericella nidulans
tcttcaaccagcgggcgatggaggtccttcgcgatgcggagatagaagctcagtgttatagagaagcaagctccatggagcgtaggtcttgagctctgacccccatggtgccctggtgatactgaccgcatgatccagatatggcgcactcttccttcctggacaaactgactggccaagagtacggacggctttgggcttggggaaacaagccgcaacagaagggcgagtatgaggtcgctagtccttgtcacatgagtgatcttcctcagtctcatctggagccaattcttgtcgatgaggccaaaaagctcggcgcacagttccgcttctacaccgagtttgtgagcgtcacccaggacgagtctggcgtgtccaccattctgcgagatcgagagtcagaaaagacttacatggtgcgctcgaactatctacttggctgtgacggagcgcgcagtgctgttgtgagcgcgctgggaatcccaattacagggagacaaatcaacacggcgttcaacgtgcatattcaagccgacctcaccaaatacatcgctcatcgtccgggaagtctcaattggatcttgaatccagaggctccagactggtccgctgtcggaaattttcgaatggtgcgtccctggcacgaatgggttgtctcgatgcacccggcctcgaagaatggcaagcgatttaccccaaccgaggcagatatcatcaaacgtctgcaccagatgatcggcgacacatcaatacctatcaaggtactctcgacatttgaatggactatcaacgaccaggtcgccgattattggcagcgggatcggatcctatgcattggagacgccgttcatcggcaccctcccatcaatggtttgggtagcaacacatgcctgtccgatgcattcaacattgcgtggaagctagcttatgtcattaaaggcattgcgaagcctgctctcctggagactctcagcgtcgaaaggaagcctgttggtgatggcattgttcgccgcgccaacaccggcatggaagcacatcggaacctgtggtctatcattgggttgactccagaggaccggcaaaatgccttgtcattgctttcagaagatagtcctgc

SEQ ID NO: 10025 - DNA, 736 bp, Emericella nidulans
ggaaacaaggggtatttatccctacatgatgatatctgatgccgtctgaacgtctacactcacaaagtcacattcacttcccggctgaatatcagccatttcgttgtatatcgcattatcgacctggattcccactcaagcgtccgtcctgcaccgctcatggccgctaagcaggtcccgagtccccagaaggctgagcgtgtatagggaatcggagaagacaaattccccaaagctagctaggcgatgagaacaccacccttggcttaccattcgcgatttgaggtactcgatgatatgccggttgctaccgggggacgtaccacgccttcctgccatatatctgcttaaaggtgtcaacgatcgtgacgagggggatttctaccgagattgcaaccaggggatgttccaggacgaggatgttgggtattgtgtacgacaacaatgcgtaagacatggctttgctcttctcaacgactgttcccgctgacggtcattcgtggctttgagggaactctctttccgggagtcgagataaaaacagacgctccgtcgtgacgaccagacgcccgcccgactcagtgacacgaatcaggcccgtgcctcgtacgggcaagccggccatctcactcaaggcagcgaagaatagccacgcttgggcaaatgctgctgactgagtggatgatttctgagtattttccatcacgtaggtggccgatattccaagttcgacggt

SEQ ID NO: 10026 - DNA, 2937 bp, Emericella nidulans
cttgtcgtttttggcgctgtaattgtaatctctcgaagccgaaatgatttgatatattataaactaaatggttataggtattgcgagccggcgtcgtacggcgaggtaccactcaccaccaatcttccaccatccacatccacacactgctctctattccgtataccctactcttacctattaccttttgacgctcttgcctcctttcttttttgtgatcgtctcgagtctgaaccattttttaaactccgtctatgcctgacgcgcatcgatctgccttcctgttcctccccgtctttcgttcctctcctctgctgatatacgtaccccaaatagctatgctttagtctatccatgcctgctctgtaattgcgcttgttccatgtcgactatgcacctgcttctgctttgtcgtcctctgtcttggctctagactttgctctgctctgctgctctgcctcgacctttttcagctccagcttccagccttttcttctttgctttttcgccatcctccccatcccctcaatcctcgcgagcctgcttgtgaggctgcagcttatagtgtcttctccccgtcgccaaccaccttgacggctcctctcctgcctatcctatattaccaattcacagctcccggttgaccccacgacatggacacggagactccccatgcgcaggaaaatggctttgcgcagtctccctggatggatatgggcggcttccatccgtcccatcagaactcgccaccattggattatcatggttttggatacccggttcatgtacctctagatgcttcctacggcgtcacgataccgccgccttatgcaccacctgcactgcccatgactgtaccttccaatgcctggcccagcatgctcaccacttcctctcaaccgcctttccagcagtcggagcatccagtggcgccggtcccaatcgcgccgtctgtctcgccaattgccccagttccaccacccaggaagtcttccacgagtagctccacgcctcggaggacccttaccgacgatgaccggcgaaggatgtgtctctacgccgaggaaaacaagaccgccaaacagacggatatcggaggtgtgtttcttttattcttctcacgatgcagacaagctaataaactatttacagcgctttttggtgttgaacgaaggtaaagtggcttcattgagttcctgatagcaggcttctgactccttaaagcaccgtttctaaagtgctacgccaaaaggacaagtatcttaacccagaagatggaagtcgatcgcctatcaaaagagccaagggccgagtccctgatattgaaaaagccctgtccaactgggtgaggaattatcaacgaggagggcatggcctgactgatgaaatgataagagagaaggctctcttctttgccagcacctgtggttctgacgggaaggagaaggtcctcagcaacagctggttggagaagttcaagcaaaagaatggcctgctaggtgccaaagttcgaaagggctcttttggcgcgaagagtgattcggaaagccctactggtctgagcatcaattcggccctggcatctgctgtgcactcacccagtgtgctttcgcccatctcacctactggctttgtatctccttctgcactgtctcctgctcagagtcacgaaaatatcagggggagtatttccgttggtcccacagatctgggtatcgactttcaacattcgcattcacggagtaccatttcgctcgataccaccgcttctttctctccgacgtccacgctgcttaccgagagtccgttcactccgtccagccagtcccgtatctccccaacggacgttaattccagcagaccaaggagccaaacatttccaatcgcaaacgccgatccccactccatgcccacggacgacttatccgagccgacatctactatgaagggacttctacctgctgctatggaagacgccgtcggtgatgattgcgaccagaaagttgcactcaatattgacacatcccccggaaccatcaaacggaaccgaagcaacccagatattcgggctagaactatttaccccccgtcatattcaagatccacgactgtttccccaatcagctctcctggatccccgacgcaggatgaagcccgcaaggctttagagctggtggtgaactatttcgagcatcagagctctggattaggtgcccaagaagccgttaccattggtaaactactggagaggctacagctcgcccaacaaccaccgaccctaccaggtggccttactcgtattgatgaacatgatgacgcatctccaccccatcaatcttctctcacaaagaagcgaagcatccataatatggggtgaccacatgtcctcttcaaggccagttgcaagggcgtggctgcctccatcacattcctgtcatatcatatattttctctaatcctggggcggccggttatatgtctattgcatgttttggattgttttcctgcggctttcgtactccttggctttctacgattccctgtttcattaaacaccgcactgcacattttcgttggattttgggcaacccgggcggaccgcacgatacagatactacgagggcgacctcaactttttcagatatcgttatggagacaaagacactctgctttgaatatagatgctgacagtatgtttatccgattcgtttttcttttgtactttacgcatagacatatcggttgcacccctgactgaattgatgcctatcagttcagctggctagcttttcatcagtaccatgtatataaattggcagcgttgatccgacgcgttgccgttgcttcaactttataaaaattttacgcgttaaagggagtcaaaaacgccgcaaatttttttaaaaaaaaacaagggggagtatggctcccccacac

SEQ ID NO: 10027 - DNA, 1462 bp, Emericella nidulans
gcacacggtattgatgccgaccacgatagccgataagacccatgttttgagtattaccgaacagtttgtattcgaggggacttgatcacctgctggaagtccgactgcatcagcaatcgacatcccggccaatatacgaggtcctactcgtgggctcgggtttgagcaactgcgccttcgtttcccgaatagcagttacggagtagatacgggtgggaggtaggcctgcagagaggcagagaggcagcgaggcagcaagatcctagtcgtctcctgcatatagcagggctggctcgcattccttcgtggggggaggggggcccaaaaaacaggtcagagcatcctggtttcattaatcgtagctttgacacttggaagtgccgagatcctccgtatattgcttaagatatattccttgtctcttatggctgctcccatgtgctcgtctcagagaccaggcaacacaccgatcagcgacctggtttgctcctactctggtgggcagccgctggtaatcgtcttcgatgagatgatgagctgtacttagcgcactgatcttagcctcccagtaacatgattgcaccctcctgcttactctcgtttacaacccgttaagcccttattcgccaacaaatgcttgatgcttgatcaccatcagcataactcgttagggaacggagtggcgggcggaaggaagattgcaaacgcaaatgtggtggtgacaggcacaaggccgttgtcacaccggagatcatccatgtgtctcggatagaagcctggttagcctagtacgcatgacaagactcaaaaggaggtaggtgccaaagacagttctggaatagattaccagacatctgggagggactcgaacggctccagatgcctgcattggcctcgcatcacctggtttggcaaccctgtcgccgagagcgagctataatactgccatcttatcagtgctcaaagtacacctttagagatcgttgcaaaggcatgtcgtagaaatgccaatacttccccacttgggttatctttattgatggaggaggcgagtatcagtgcagccttgcatgcgcatctgacgcaaggccatccaagcaagccggatggatcatctattgttgttcgatgcgataagccgctagggatcatgctgctgcgccgcttgttggcgagcgcctggccgcatgatttaccatacagaagactacagccgtaacaagttagcttgccgctcactactggggtgcgagtcaaaccgtttgacgggcaatcgtttgcccctcagcgcgagccccgccatgaatcccacgatggcgtcacgtcttatcgtactagcacccagtctaaaggcgcgagacgaggagttctaggtgaactgggaaaacctgttgctgtaactctttgtctcgcccaccatcggcagatgcgaggctatatctgagtcattgccatatggctc

SEQ ID NO: 10028 - DNA, 781 bp, Emericella nidulans
acagccgcgggagtggggtatcaggcgtgcaagaaatcaatgtcaaggaagaatcgcaacggcctgcgccgccgaccgacgccgagaaggctgctcaggggctttaaaactgagttaatcgcgttttttttttcgttttgcttcattatagcttgcatttcatttccctttctgaattttgtgcatgcccgagatatccacttgtgttttgttttcctccaacgacccctctggctgagctttttcctctggtgctataggattttgtttgctccgccgcgcgttaattcgtgccttgcttctagacctatgggagatttttgtttttcagcaggcgttactccctttctttttttttacctacgcttttcgagctcgcattctcaaaatgtctcacggagcctgggttgggattgaatactgtatatttctgggattgtgtgataactgtatatactaatgaaagagaggaagttcctccttccatccattattattttgttatggtcttgataatcattacatccaccattctggatatagatgtgatgatccacagtgctaatttagttcaaatagactggcaaattattgggatataagcttccgcttccgaatgcttgggctgatgggcccgcccataataaatgataggtgatgaggttattatctttgtaatccttatacactagtagcactaaacctataaactatattcacgaattttcacaagacaagaaacaaaaaacgggagaaaaaactaccgcctgaccatccccct

SEQ ID NO: 10029 - DNA, 992 bp, Emericella nidulans
gccaaccgcactattacctagaacgacttcgtcgtacgaaaagtatgtcagcataagtcccacgttcgtctggctttcctgttcctgctttatttcgtcgtatgggaagacatttagacttttagtgtactatggctaactgactcccttgtctagaggcatgtattccgcagaccagttcatgaaccctgggcccgcccctcgcccaccgaccgatcgcccgaaacttaacctctccgcaagcagcggtgtaacgacgtctcttaatcagatgagcctagattctccaagcaccccgagcgctaacctgtcattgttcccgaataccagcagcccttctctcgtgcgcacaaggacagatcaatcaggttctgccgtggtcaaggaaggatatgtacgttgcaaagaggataagttcctggctacgtggaaccagcgtttcctaattcttcgcgaatctcgcttggatttcttgaagaatgaggcaggaaaggtggttctctccatacctctttcggcagtcacaggtgtttctcgctctgaagatacacgaatggccttcgaaatcgtccgtctagccaatccgaaagatgcgacctccaaggccgccctgatcactcgggatgttcccacgaaaagtctgacttgtgaggtcagaactgatgaagagatatatgactggattgataagatatacgaacgttgccccggaatgggtggtgtaagcaatccgacaaacttcagccaccgcgttcatgtcggtttcgacccgcggacaggagccttcgttggtctacctccagagtgggagaaacttcttactgcatccgcaatcaccaaggaagactacaagaagaacccgcaagcagtcatcgaggttttggagttctactccgacattaagatgcgtgaacaaaacccgcagtattacgcaggtttgggctctccagctggtcaggcaaagccgtatggtagcagcactgtggcggtcc

SEQ ID NO: 10030 - DNA, 2483 bp, Emericella nidulans
ccactgggctggcggtgggcgttcctgatccagatcccttttgttctggcgtcggcgatcttagtggctttgaccgtcaagatccccccgaaaaacgcaaacaaggacaagctcaggcgcgttgatttccttggagcaattacgctggtaacagcgcttgtcttgcttctgcttggcctcaacacagggggtaaccagttaccatggacccaccctctgattctcactacgcttccactttcagcagtcgtactcggggcattcgtctatatcgaagcgaacattgcgtcggagccagtcattcccgttcgtttgcttctcaacaggaccgtattatcggggtgcctgaccaactggtttactacgatgaatgtgtatgcgctgcttttctacctaccgatactattccaggttcaaggcctttcagccaccgcttcaggagcgagattgattccccaagctatcggtacctcctttgggtccttggggtccggtgccctgatgcgttacagtggccgctataagatgtatagtcacatcactatgctgcttctagtggtctcgtcggctttgatctgtaccttgaaacctgataccccgacggccctccctctgctttacttcttactggggggagtagcttacggcagcatgctcactatcactctggtcgccctcatttctgccgtcgaccatgagcaccacgctgttatcacgtcggcctcttatgccttccgcagtactggcagttcgatcggtatcaccatcggctcctctgtttttcagaatattcttaggagtggtctctggtcgcgctttggagatcgtgaaaacgcacgggaggtgatctcgcgcctccttgacagcctccaggagatccaaaaagtgccggcggactggttacctggcgtcatggatgcctacatggtttctctgagggctactttcattacgctgcttgggcttgctgttctgggagcattggtcagttttggaatgcgagagcatgtattgcattcgaacatggctcgaaggaatgagtaaacacacttcctcgacaaccctcctcgaccggcctgtgtgtatgctccagcatatccactggtacacgagcacagctgtcgtcaggatagaatgcacctatctgttggtttcagaagacactacaaatcttgttctaattgccggtagactatcggtggaacagcatcagatattttgtatagactcataatgatgacatagacggcatatattcgatttagcatagaccctagagataggagacgttgcgctgcggcttcggcaggttgacctcaaaaaaggtgaatccatacttgccttgtggagggcaccagcacctcctaactcctgagatcctccagttgttcattctgtgtaatggaattgagtagctgtgacgtgcgctgagggatgcctctgagtggtgggtttatctatacttacgcttcaatttaaggactagcgccttcctagccggcccgccctccgaccagttaaatcggacgggattcggagttggcatcaacgcctcagccttcaggccacaaccgtatcccgtagaacgatctcgccgactcgccgctggtccgctggtaaccgtgacctcagcgcctcctggccctccacctgcacgaaggttttaccaaatatcatcactgcgtcttcagcacatggcttagcctttttttgtctttaatttatataccttaatttccttcgaactgctccgacaaccatatcgtcgaagacaattccagcggcatccgttcgcgaaacccaaggccgataacaacaaaagacaagtcactgatactgcgtacaactcaccgctcctcagctcccctggtctgaccaccagatctttgacacgagctgcatcgagcgtgtcatacctcggatcggcgccacggttacttggacgggttgcatggtcctctgtggttagctgatgaccctgcttgggccacaaattcggaccactctgtgcactttacgccatttacttttcccttctttctttctcttactatactttagactctccaatcgcactggctgcggattatatatctcttaactcttctcctttttttgcaacgaggtattgctcgcgcgtgagccccgcggccagttttctgcaaattggatgttttaggcgacggccacttctgttaagcctggcagctactgattttcctgtcctatacctcgaccaaacaacgctattgctccgttcatgcctgtgggtttgtgtctagcactattcccttcacggtgatcagtaacgtcgggccagaaagcgttcatgtcactgggatggatatcgatgagatcccgcgaaaaggacggtcgaaaagtaacaggcttcaacgcatctgatcgacaaacatgaagaacttagcaccgacccgcgccgcaacggtactaatatcacggacagcgagtcgtcatatgtttac

SEQ ID NO: 10031 - DNA, 179 bp, Emericella nidulans
tcgagtagaagacaagaacgggaagacgataggcatacagcgaacaaaagcacgatatattacgctgaacaagatataggttactagcaacccattgcgcatccagcatgaactgaaactattacatgctctccggggatactgatcaattggccctctgcgaagggcatgccggcatc

SEQ ID NO: 10032 - DNA, 1404 bp, Emericella nidulans
ctcaagatcctcgagcttgcaccgccggagtagagcatatcgactagacgagttgcgttgaatctctgtttccaggccgttaatgaatctcagagtggattccacctccttgctgcgtttctgaagttctctacggtgatgagccaaattttcagcggactgtccatacttctccttctgctcctcaagcttttcgcgcaaaatatcgagttcggcattaagctcatcaagcttattccgtactctctcctgctcggactcaagttccccaatcatatttgcatcacgctggtgttgagcctgcagactggcaatgcggtcggtagtagcctgcagccgctgttgctcgaagctgagctgattctcaatcctactcttctgggttgtgaactcaagcttcttctgtgcagcctcctcgtgtagggaaccttgttgcacttcgtactcccggatattgctgtaaccaagacgtttacagaattttctatagatctcatcttcaacaccactgacagcgtcttgagaagtagcgatggcctcatcgagctcatcgagtacttcttgcttttcagtgtactttggccggagatcctcgagctgcctcttgacaaagtccaattcggtatatttatccttcaggtttcgttcaagggctttgagttcctcacgagcgtatgcaagtcgttgctccagaccaaccaattcaccctgcagagtttcctcctcggttcctcgacggtgacccttaggtaggttggctaggtctgccatgatcttgtcctttagcttgaagaggctctctacctccgagtcttcccaacgcttggagttttgctgtggaccgcggccaccggtcatcaagccccccttgtggatcacggttccgtccagagtgacagcctttgcatccacgtgtctctcgtagcacaggtacttggcagttgccagatcatcgcatacgatagcattgccacaagcataagtaatagctcttgccacggaatcgtcgtagtccactgtttcaattgcaggacgcatggcgcgatgcatacccttcaggttagagttcagagctttaacctgaatagtctctagaggaatgaaggtagcctggccggccctctgatcacgaaggtgttgaatgcactctttggcagtcttctcgttgtccacaacaatagcgtcaaaatgacggcccagaacagtactaacggcgtcggcatattttttctgtttgggcttgcacagatcactaacacgccctttgacaccaggaaagatccgcttgagggttgagatcagctctttcgctcggatctctcgctctgtctgctttttgccgtcgtctgcttcaaagggctttttcaaaacaacttgaagtttctcttcgtactctgttcgcat

SEQ ID NO: 10033 - DNA, 951 bp, Emericella nidulans
aagcttgcgggaacggtctggtggatgacattctctttgttgcgcaaacatttatgggcattcggcgaacgtcagatcctctgatggtaagcggaatgggctcacactcgaaagcgatacctccctccgataaaccttgcacctctattccccctaatctcctcccgtcggcgcctgcatctcctccgaccccggctcccagtcctactccccaccagcgactaccctcttggcgagcgcctgaacaggaagaggatgcgttgcttttgaacaccaagtttttcgagtctttgtccgggcctcgaaggcaacagtacttggaagctatccttagtctatgcagcagccagcaacttagttttgtctcgagctatgtcgctccccgcctacgaaaagatccgtttcgcgtctttccaacggagatatctttaagagtgagttggccgccgtcttgcactacgcgactcgcgaacactgacactgtgcttctgagtaggttctctcctttgttgaggacccaaagactttggcgcgagcatcacaagtatcgaaacgatggcacgcactgttggaggacgatatcacctggaagaatctctgcgagaaacatgcgttcacccatcggcgacctgcagaagataatcaggatatcattgagtccattcataaccaccgcacgaactccttgagcgggctacaaaggagacctaatagtgccacgattcagtcccgggatggttttgcagatatccctcggtcgttatctggagattggattgcatcttcgagcatacagacgaggaaacgtcgagttcggcctctttcttacaaataccatttcaaacagaaatatatgattgaatcggcgtggagtaagggcggcagatgcacccagcgacatatctcgcccgaccagggcgtagtaacaagtctgcatctacatcccaaatc

SEQ ID NO: 10034 - DNA, 2597 bp, Emericella nidulans
ccacatgaaagtacggttggcattctctgcagtctttgcttaagtgactgtcgcacggtgtctcattttgattgtctcatttcgtggcatatctgcctagttcgacatttgatgagccgctccacatcgaaggtagtcgcgcctgtctcgcttccagctctagtcggctagatggtaaagaggagaaaatagagctgtacaacacctagtgatgagcatcttgacagtaccggaattctgatctggggccatctgtggtagtaatgggacgatttttcgatagcagggctgagctggaatcgcaacactcatcaggagcatcaatcacgcacgtcgcagggccgcatcatctgcccccggcgacggtactaaagatgtttaacagagaactgatattgtggaggagattggctcctttagtattatgattcggcagagtgtgttcgatgaggacggggttggcgccaagaagctcatgcagaatattcgagagagcagcagtagccgtactcgaattttcatcattgtgttggaagaatcagcaaacagcgcgcgcgacaatcccttttcaagctgccgagccacgtgcagggctatatgcgactttccgcaccctggatcacagagacctagaggagctccgactgaaagctttggatcaacccctgataatgcgggtgggctgagagccacttgcaggtgccctcgagagtatcgtcgagtcttcaggtcaggtcattcttgtggcccggggtgttcctcgtgctttctatcattcagacagtcccgacacggtgggaaaagttaaagggtagagcagggacgcaccgttgccgtctcatttcacacccgtgccaacgacccgagcagattactcgccggatcatcaattctaagttttgaaataagctgctagaacttggcgacatccgcatagtatccaaaggtggaaaccctcgcaggcacattgtcaccgtatctaacgtggctggccagtatcattatgatgccaggtattgccagcaaacccggtcaggccgtgaacaaacacaacatcatggaacagaaaagatacagtcagtgcgatggtcgtccatactgttcttctgagaggcatgtacgtacttaatcgcgggtgcagagatttccgttggatcatggagctgcttcagcccatactttaggatggggttcgcggtggagctgaagagtttcactttgatgtactgtggaaagacgggaaatttgtgagatgtgggatggacgaccagtactaatattgttctttgtgattcgggaagaagagtggttggacaatctgatatgaagtgcctcgcaggtctggctttcacgtttccaaactctttgctctttctcagcgccactttcgcgagactgagcgtactgggcttacgccgtaattagtaaaaatatacgaaagtatgcgttgtatgaacgtagagccaagagtatctcatctaagggagttaacagaacatcgtcgccgcaaatcaggcgaacaccagaagtgagtattgatgtgccacaagtcaagctcatagtgcgagacgccttgttgccaactcttaataaaactatcctggccgccttttgaataaaggcaacctgcaacaagcttgtaagggaacatgctgattctcgcagctataactcaatcgctacagccactactcttaggtacttggtagatcatttaatattagctactatattaacgtgtagccatgtcgagtaaggtgcagtataaactgtgcacatgactgtattactcaacttcttcctgcgtaactcggtttcgtgacgtgggcgagggtgctctggaagcaatgataaggggatgaccaccggagaggaatcccagcgctaattggccctgggtatgaggcaaacgaatgtgccctacacggtgtgggtgtgccagtattggagctgcagtgtgctgcattacaacttgtagatgctctgattgctcaatttgaggtggcggaggtggaagccgctcatttaggaacaaatcatgcttgcccatcacagcgatctagagcatcaacagtgtcttttgtgatggggtgagctgaacctaatactttgtgccttaacagacaagattctctatagcaaaggtaatgattccaaaaggatcacgtgagattgccatacatagagccagattggtcatgctggacaaagtatcaagatgctcagagtgctagtactttcttttcttatcaccataacttgcatgagcatctacccaattcggttaagcaatctttattgctaatggttaaggccagggttgcttaacgtggtaagagataaagattgcttacctcctaacattgacttaatatctttgaaatcgtcgggcacttttaggttagcctacctacctgttggaatagggaacaagccgatgggcatttggtttagaattaggagttgaaagaagaatttctttttgctctctagaactaaaggggggcttttaaggtaaggcattgccttatttattcttatggagtttgcaagtttttaccataccttgtatttcaggaatttttctttcccatggt

SEQ ID NO: 10035 - DNA, 829 bp, Emericella nidulans
cacacggggggacgcccgatccgtcgtcggcaatcagctctgtatattctgatcgcgaaggtggtgtgcaaatgggacgagacaacagcgtcaactgtttgattccagacttggataagctaagtttggaaaagggtagagctttagacgttgaggatcttgatgatcagggttggctagctgctagcgagcagaagaagattgtcgagttgggtagtctcggagaaggagccggaggagcggttacgcgatgcaaattgaaggaggggaaaactgtctttgcattaaaggtgagtcttatgacggcttttaatggtcgccgagctaatatacgctgtaaagatcataaccaccgacccaaatccagacgtgaagaagcaaatcattcgagaactcaactttaataaggattgcgcctcggagcacatttgccgttactatggtgcgtttatggacaagtcgactggtacgatatctatcgcaatggaattctgtgaaggcggcagcttggacagcatatataaggaggtcaagaagcttggtggacgaacaggagagaaggtgcttggaaaagtagcggaaggagtcctgaatggactcacttatctccatggcagaaagatcatacaccgaggtatgtctacctggttagaatgatgaaatgctgctaacactgtgcagatatcaaaccgtcaaatatccttctctgccgaaacggtcaggtaaaactctgcgacttcggtgtcagcggtgagtttggcaccaagggtgacgcgaacacgtttatcggtacttcttattacatggctcctgagaggattacgggaca

SEQ ID NO: 10036 - DNA, 259 bp, Emericella nidulans
gactcaaaaaaaaaaatcaatatttactattataactacttgtaaatcaaaaacaagtttattaatagtaggtcctatagtattataatatatctacaaattttatggttattagaaatttatattagctattagtaacaggtcttaactaagttctttattttatataccctagataaatataaatagttataaataaaaaaaaaaaaaaagataggctagaagattataattctctagaaatactagataatcctaa

SEQ ID NO: 10037 - DNA, 131 bp, Emericella nidulans
atggagtatagcgggcaatctgcaccggggtactgccaacaagggctagctgtggaagcagtgtattagaacgggaactcggataaggtttgcttcgcggagcgcacgcaggatatcttcaggggacggaa

SEQ ID NO: 10038 - DNA, 789 bp, Emericella nidulans
atcctttgaagccaaagcgcctccaggttatacattcatatcggcaggcgatcctttcttcaccacaacttgcaaggagcgctgtcggaaagatggacttaaagtgtacgcggtttctgtatgtcataattccatccctgcgcggggcgccaatttttccattctgccctcatggtattttgttacctttctctctaacgctttttcactttctttagacaaccccccatcttcacactcacggcctctcgcagcatgtccatcgtattggttatcatttcccaagcgctgttgttgcggacgtgtgtataaatcatggtctttatctcacagaaactgggaaggctgtggcaccccacagtatcaggggccacgaggctagtcgcaaaatcactgactcagattctcagattactataaacacagaagcaagggatgttctcaaggatctttttccaaatattcctgacaacgacctcaaccaaattatcaaaaccgcattccaaaaggttgaacatgccgctaggagatcggatacgctgagcgcaatagctgctgactaggtttagggtcaacgaaaagtaggtacagccgtcgaactacccctcgcccgccgagcacagttggcggttgtcgcccatattcggcacatctatacagattatgatcgcctcctaaaactacttctttccatgaagcaagagcagccgtggaacagccaactcttgccaagctagtggaatggaggggtgatgatgaaaatggcaaaacggttcttgaggatgtgtt

SEQ ID NO: 10039 - DNA, 147 bp, Emericella nidulans
acaaatagccacatgcgaatcctgcgatgtctcaactgtcgccgcaccgatgcctgcgatgagcatttcatagccagtgagtcgtccctgagagtccggattgtaccccgcgtaaactgccatcgccatcacgtttagaccagaata

SEQ ID NO: 10040 - DNA, 2117 bp, Emericella nidulans
ttataatgcgtacctagttaaaccaagttttaaaccaaaatcaatcgagatcgaactcgatgcaaactcaattggcatccatggcagactcagctgatcattggcgcctaaggtgtaaccctctctggactcgtccgcagctattgtccaggcaccgatgtgagaccctacgaacagaacttctcaatctctagaagtagaataatagctaatacggcttaatcaaacgcccgcttatatcaatgataggttgcacaccatttgcccttcgtcgagcttattccagccgggcgctcagctaaccagggaaccatactctagggtattatcaacataacaagcttaatgatgccatggttccagtaccgccttgaagtcatacaaagcaatctctacctgaatatatataggagccaaaggacggatgactctgcagcacaaatatctaagaggttgtcgagctatgatatgtgccgagcagaaaaggaacacgctctcactgtagccctactcatcacagtgctgagctaaacagtcttattgagaatcttttcaactaagatctctgattctttattttttttttattttttttttattttactatatttgaaatatatttagcttgatatacgtatatcaggtgtgtcgcagcacgcagggaagcttcgtcagataaccctacgcttttgccctacttctcattatgtatggcctatcagcggcagaacgcatattcatattcaagcaggcctctcgacaacttccaagcggctgtggtagacaattacacgacctcgtcgatttcttgcctcttaagctgacaaagatgaaggggcaagcgtccagtctaggggcaagaatgcgaggccttcgtcagacgttacagctggcagaccaagtaaatatattagactctgaccactaatataatgatctcccatagatttcaaagtgcagggtatttcctaccgcataatcccgccacagacgatcaatatggccagctttttctacggtcgtccaatcagtgtgtatccacagaataagctcaacaagaagagtccttatttgctagacaattgatgcaaggcgatccaatagctagtcttacaaaaaccgcttctcacgttagaggatcccattttccgtcctccctccccctcccataggcggtcccacccagatctctttatcggagggcaaagcactggtttctgatgatctaaatagaaagagagtgctacgcatgccgttaacccccagatgttccgtttaggccggcgagccttcaccaaccctgatccaacccggccggtaaaacatctcttaagcagcgactttggtctgttcacgggactatatcagcaatttgcaatgagttaaaccagggtataacccaatctcgcggactcggagttcaaacagacctaaggtgttgctccgagtccgatcgagcgacgcatactccgagcctcctaattgcgtgccctacccgtcattcgtcctcatctgatcggacaatgcatggcagctacagagtcccatgtaggcttctggcgtctaacagacccctggtctgatgcatgtggcacgaatatgtccctgacgtaagagtccacttctttccttctttgcctgtttcagcaagcgaatattagcatcatagccatgcagctgccatttttggagaagccagtgcgggcctagatcggttttgacggcaattcatccacaatctgccagtcctattcttgccgtctacgacagcacagcaactacaccaggaccgtccgttgctctggttgattatcatgacagtggcatccactctgaccgtgcagcagcttgccctctcaaagggattcagggcagtcttcggtcgagaagcctatgtggaaggaacaagatcctggccgccctagtgtataccgcctggtaagtcattaagagtcgaggaccctcgccggtctcacactttctacgtgccgtgggagtttaactttattcttggcatcaaggcccggcattactacgtcgataaggctatttcaactggtctcgtgcagcttgcaactgcgatcctgtatgatttgggggtcatcaacccacaacgg

SEQ ID NO: 10041 - DNA, 2269 bp, Emericella nidulans
aatgtcatattcgattgggagttggaaccagcgacttagccaccgcctctaaaccgaacgccatttaccatatctaggtttaccgttcggagtttggtttttacacgtttcaaggcaacttaccattcccattctttcaagtatgccatggcgtaccagatgactgagctatatcctttcgacacccgttttttttaatgcagctgattaccaactattctgggctggcgtctaatggctgtgggcaagactctataccatgcatcttcaggtagcttacttcataactggcgtttgtcagttcccaatctcccttatacttctcccccttacaaaatggttaagctagggaaacatctaagtgtctttgcaactttcttttgtgatatccagaccgtcgcagatatcaaggtacacctggagttcaggattaattgattgatctaattgtgttttgcgcttttagtactcttgctcatccttatgagagacatcgagtacaagttctccgaggctgctcttgttctctttccggatgctttaaacgacgattgaggtgcactttacgatatatatatatactcttagtaggctggttatccatgcaccaatcatatgtcatgcacaatccaccagatgtgatataaattgtaagtcagtcgtaagtatataggatacggaatgctctacgaagtcggcccaacacagctaatatttatgtcggcggtttactgctggctttcatatattcaaatccatgatgatgggatcttgtgaagcaatcttgtacacgagtttcgtagtattgttgctgttaaacctgaacagaggattggttgctacgcatctcctttgtagctggtgctatgaataccgaatgatcaagtatggtgcccaactatataacaatctacgatttgtagcttttacgaagattattacgaagattacacagagtacgagaaagagtaaaagaaccagacagtgtagtgtattgggtttagaaaatgagaacgctcaaaacgccacgagattgacatcgttgataacatgaaagacatcatctgctaccataccatcaattaaaaaagtaagccgaagcagttcagtgtcataagaagacagaatatttcgttttgctttttattttcccccttttttattcattagctgatctagtcaacctcctccatggcgctctcgccggtcgtagcggcagcgggtgcctcctcggtgctggcgggctcagcctcggcctcctcgtcaatgttcagaccgagagacacgagcttgtggatgcgctcagcgaagctggcgggctcttcaatggtgaagccagaaacgagcagggaggtctcatagaggagctgagtgatggacttgacggtgcggtcgctctcgccatcagcctcaaccttcttcttaagctccttgatgatgggagacttgggggagatctcgaaggtcttcttggaagacatgtaggagctcatggaggtgtcacggagggcttgagccttcatgatacgctccatgttagcggaccaaccgaactgaccagtacggatggcgcaaggggaaccgataagtttgtgagagacaacaaccttctcgactttgtcgccaaggatgttcttgaggctcttagcgagattctcgaactccttctcctccttctcacgctcagccttctcctcgtcggtctcctcaagctcgaagtccttggtaatatcaacgagcttcttgccgtcaaattccttaagctgagtgaaagcgtactcatcaatggggtcaaccaggaacagaacctcaaagtccttctgcttgagggtgtcaaggaagggcgacttagcaacagccttgatggactcgccagtaatgtaatagatctgcttctggtgctccttcatacgggtgacgtagtctgtcagagaggtggtctcgtcaccagacttggtggactggtagcggaggagcttggcaagggtgttgcggttctgagcatcctcgtggataccgagcttaatgttcttggagaaggcgctgtagaacttgtcaaactgctcgcggtcttcagcaatttcgttgaagagctcaagagtcttcttgacgatgttcttcttgatgaccttcataatcttgttctgctgcagggtctcacgagacaggttgagaggaagatcctcagagtcgacaacacccttgacgaaaccgagccattcggggataagatcggtagcatcgtcggtgatgaagacacggcgaacat

SEQ ID NO: 10042 - DNA, 304 bp, Emericella nidulans
atataaatattggaaaaaggttattgatgatagtcttaaggtataataacggcatatacattctcgatgttgatgatgacaagagttcggatgcctgagagatgtatgacggtcgaaatgtattagccaggtcgatgaagaggcacgtcattaatgaacgaagtgacggtcgtaaaggacaagatgtgcccgaatgtgttaacagattggaagaagccattaatgatgtagagtggtgtgtgaaggtagatagtgaagacagtggacttccaattgcagttggtaggacaatcgatgagagatg

SEQ ID NO: 10043 - DNA, 734 bp, Emericella nidulans
taacctcagtatccatttggaatacctcccctcctcttcttctgttactgctcctgatgtggcgtgtgacgacttcgtctcctcgatatctccgtcaattgcgaccagtcactcagtcagtcaggatgaagcatcatttgatggtgggcacttggacccgtccaggccgcatctatacagttgctttcgatgacgaggctttgactctggaattggttaagaagactgacattccagaagctgagccgatctcatggatgactttctctgtatgttcttcatttggtacttcattggcgtgtctaaccaaagcagcatgacaaaaaaaccatctatggtgctgccatgaagaagtggaatagcttcgcagtcaacagccctaccgaaattgtccaccaagtatctcatccagttgctgggcatcgtacgtctactcctgctttccgcgcagctgagcagtcttgactgactttctctttcacagctatggccgccaatgaagacacaaacacacgcgcaatcttcgtactcgcagcccgcaaacctccctataacgtttatggaaatccgttctataagtacgctggattcggcaatgtgttctcagtagaatcggacggtcgtctggccaagaacatccagaactacgagtacgagccgaacaccggtattcacggcatggtgtttgaccctaccgaaacctacttatactctgcggatttgcaggccaacaa

SEQ ID NO: 10044 - DNA, 555 bp, Emericella nidulans
aaagaagggaagaaagacttacccggtatcgtggataattttggcgattaaccctgtccagccacataggtgggatgctcccaggccacggctgatatcgccatcgaaaaactcgtggaaccacatgtagtctttccagtgctcgtcaaagttaagtaagtcagagccggcgtggactgcgcggcggccttcatcattgcgcgcgaagaggtgctgaagccggtgctgtatttcttctgctacctgccctagatgcatatagtccccagaacccgtggggcattccaccttgaaggagtctccgtaaaacatgtaaaagcgacgagggattctatgagcagaaagttgacgcacaaccacaccggcccacgccagttgctgttgccaccaaagaggccgctgtcggagtcgccagggacatagctaacccggaatgtctgcccgttgacatccatcgagtaaggatgcttctcatggtattttgacattgaccgaattccgtgatctgagaggaattcggtctcgtcgagcatgcgtttcagtatcttcactagt

SEQ ID NO: 10045 - DNA, 1847 bp, Emericella nidulans
agaaaatagaagggagagaagaaagaacttaatttaataagaagtaaattatgagtataaagaaaataaaaaatgtaaaaaaagaaagactaaaaggagaatagaaataagggaaagaaatagagaaggaaaagaaagaaaaaaaagagataaaaaaaagagggaaaattaacagttagatgaagaaagagagagagaaaagaaaaaacgaggaaagacgagaatgtgaaaaaaaacagaaagatgaagatattcgcaaacaggagagatagaacaagacgcgaaacaaccgctcttccgctctcgaactgcgagtgcttcgctcatcaagatcttggatccgaaagtcacagtgggctttgctccgccccatcgtttgagcttttgcccgagaatctcagacgtcagcgtgcagatttattgaggtcgatgacccatgtcacactgtggtccaagtgtatggcatttgtcgatcggagctgagtgattggaccgttagggagacaacgaagagctaccccaagcctcttttttcggcacctctcacgactggtccctcgagtcagcctttgttcaccgttcaaagagcaacgttcgcgtgactcgcttctcatctggctttgaccgctgcggggccgccgcatgactgctgaaacgctgtgttgctatctcccgccactgtctgggtcgtcgtccaccgccagaacataaatatgcaagctggccgtcggcagctgtgctctctagccccttttactacaggctctgattcagagcgctgtcgtacctcaatgttatatgtgagtatttttctgccgtcgcggaagctttgttagagcccgctaaccaagtgccacaccgacctaatagagaacgcgtgtttcgtagcatagattccggagttcgttttatattctcgaatttcttttcaaacctgcattcctccccttgcatccaccctttgctccggcgtgcgttgataccatcaaatagcactggcggcatctgaaggccacatggctgctgcagcggggcagccgcacgaagatatgggctcacaacaggcagaaaagggttggtggaaaagggtatttcgctcggcttcgtctggaaactccaggtcgagtcagggtccagaggacatagactatcgccctagagcgaccttgggtattcttagtgatcgggagaccgacgaagtgccaggtaagaatgcccctgggtctcggtgaggatccgctaacttaggctactagggactgtactcctcctatcttccaaccgtaacgaaccgctgggcttgaggcatcagcctcaacgtacatcagcctcatcgctgcctgtctcacatcctccatcgaggtcgtcttctcgcgcatcggccgcccctacaaagaagaccgcggacggaaagattgtcttgaacccacagccagacgattcaagaaatgaccctttgaactggccggtctggcgacgtgatgccgcattgatctcactgggcttttactgcctgatgggcggcggcatgacgccattctcgccgccggcttcaaccaggtcgcggaggcttacgatgttgacacgcagaaggtggcatatactacagggttgtatatgctagggctgggtattggatcagttgtcatgtcacctaccgcaattctgtggggaaagcgcccggtttatttactaggcgcaaccctgttcattatctctgcagtctggtgtgcagtgtcccaaactaccctagcctcgtcgtggctcgtatctttcaaggcattgcggtcagcccgtcgagtgcttacctcagcaacgatcgcggagatctacttcttgcatgagag

SEQ ID NO: 10046 - DNA, 2516 bp, Emericella nidulans
gtataaaagccacaccccataacggtagctataatggctcaccgtcaatggaaatagtggactccagccctcgtgcatggtcgtcgagggaaagggtaaaggcggttacctgtgtggccataagcccgaatggaaggtttcttgctctaggagaggtaagtagaatgataacttgccggaacaatagaagctcactgtctcagacgggctataaccctcgagtcctggttttttcaacagccaaagacgcaccttcagacatcccgctcacaatcctcacggatcattcatttggcgttcgtgcccttgcatggagtccgaactcgcagtatctagcaaccctcggggatgtgaacgatgggttccttttcgtatggtccgtcagcctcaaaaatggctcagcgaagcttcattcaacgaacaaatgcacaaccgttgttcgtgacatgacttggttaggccaagctttaatcacgtatgtacttcgaagctctccttgacaactctggatactgaatatgttcacagggtgggagttagacatgtgaaggtttggagacttcccgacatcaggccggtttctccgtcgaagtctcgcacaaataccggcgacgctcccaatatagccacgccaaaggctctttctggaaggaactgtgtattgcatacgctggctgacagcacattcactagcgttgtcggcatctctgattccgaggctatcgttggcactgatatgggagcactctgtcttattgatgataacgatggaactgctaagcttactctaattcagtacgtcggattcagcatcacgtcactcacagccgactcagaccgtgcttgtatatggataggtgggcgtggcagacgtatgcgaaggcttccttttgagtcgctacgaccgtcgagcaaccttccgtctccacgcacgcttaatcggctgtctgcggagataaagtccagggggccagcgattacttgcattggttctctttcatctcaccttgtcacagtggatggtaccagagcaatcaatatataccctatcgaaaagcttaagggcgaggacgaacaatgtaacctgggagacaccatgcccgctcatagggactctgttcttggtgtaggaccactgaaaacaccgaactatttagaggcggatttctttacttggtcttgtcgtggtgttgtcaagttttggaacatacaaggcaagtgccgtgactcacggaccatccttgccgagccgcttgcaggcagtgaggatgatgccgtaaatgagctcaagatattacgggcaactacggacatgggtctgttcttttccggcgacaaagtcggtgttctacggtatagtacattacacaacagattgcttggtgccctgctaattttcacagcgtgttccagggaccaatgtgggagtgtgtgggcgaagtcagagctcatgggggggaagtcacagacatcgcaatacttgaaacttcggattcctgcgtggttgctagctcaggccgcgatcgaatggtgcagcttttcgaaaggcgcaacgacaaccttcaactgattcagaccatggatgaccacgtcggcgcagttaatcaacttctttttgtaaacggaggagagaggctgctgtcctcatctgcggatcgtacaatcctggtgagagagcgcgttactcgcgacgatgaagaggtccctgcgatcgccctacttggtatcaaaggcaaattacccttaagatcatcaccggtatcgctgtctctatccccagatgatccgggacacccctcgttttctccacagtggatcgctgcgtacatcattatgatttgaattctggtcattatatcaactctttccgtgcggccgattccgagtcgaatgatactgtaataatgggctcgttgacggtaacctccgctgtttctggacagaaccctagattactcattggggcttctggaacagacaaatcgatccgtgtatatgatatggaaaagggtgcccttcttacaggcgaattcggccacacggaaggcgtcagtgatgttctgatgctggagagatattccgatgcatcgaaagattcaccagagcggatattggtgagctcaggcatcgatggggtggttatgatctggaacatatcagtgcaattgcaacagtctcaggaagttacacatgcaggctccaatgacgaagaggatatttcctcaaaagagccaaacctgtcgaagcctcctctaagaaaagtactgtctcggcaagacctcgcggggtaccaacgaccagagggttcagttctgactcccaccccggcgcgtgaagggccggagcagtccccgcttttcttgcgcagactatccaaggtatctattgtcccgacaatgaaaaacgcgcacttagtgccagcaacacctccctatgcaccgcctcgtcactcacccacatcgtcagttcgcccggagaggttgcgcaattcgccgtcaccgcccagcgcgagatcc

SEQ ID NO: 10047 - DNA, 1236 bp, Emericella nidulans
atggttgtagtttcattgtgcatgttcacgttcggtgttgttacgatctgccagggtttggtcacaaactggggcgggctgatgaccactcgttggtttcttggtaggtgcatttaccctggatgggtatctccgcggctaatcgcaaattgtaggcatgtctgaaacaggcatgtttcctgggtgtgagtgattttcccccctgatgtccaactcgaacaatgtgtaacagttcctaggtttctatctgctaggaatgtggtacaagcgcacgatggcccagaagcgatttagtttcttcttcagctctacttcgttggccggtgcgttcggcggcgtcctcgccagtggtcttggtaaaatgcacggtgtccgcaatttggctggatggcgatgggttttccttattgagggtgtgctcactgccgtggttgccatcatcttattcttcttcctccccgattttcccgaggaggctaagtggctcactgaggaagagcgcgcgtacatgcgcgcaaagctggctcaggattctggagaggcaggagaagatacccgtatgggctggcgcgaggttttggccgttttcaaagactgtgagtcgcacttctacccgcgaggacgcgccatccctgtattctgacctcactttagacaagatctttattggtggcttgatgtattttggacagattgtcacagcttatggttagttcttgctttctggcccgattctagaaaagtctcgacggctgacatatctcaggctatgcttattttgcgccaacaattatccaatcctacggatatggacgtgagttgaatctttccttccttgcagccgcctcactaactagcttcaagcaattcaaacgcagctatactcgattccaccttgggcgggcgcattcggattctccatgtgcatcgcatacatttctgacaaattccgacatcgtttcgcattcactataatcccgatgctgatttccatggctggattgggtatcctcatgaacgtgcatgataaccgcgatgttcaatacggtgcgctatttttggtcacagcgggatgctacagcgccatgcctgtggttgtttgttggtatgctatgaacctaggtggtcatcggcggcgcagtgttggaactgcatggcaggtcgggttcggtaacagtaagtagtaccatctcttgcatgacgtatgagggcactaacatgcgtcgaagttggcgg

SEQ ID NO: 10048 - DNA, 167 bp, Emericella nidulans
gtttcttcgtcatcgtcgggacaccagagcgcaatcataatctcgcgcctgtcacggagcatgcttccatagtcgtccatgagtagatacgaagtcttattctcctgatgcctagccatagaacgccgcttatagtatagcttgccgcctatgcgatccctgcacgt

SEQ ID NO: 10049 - DNA, 671 bp, Emericella nidulans
atcgcatgcgaacttaataagagcatccattgtggctagagccggttgagggcccgaggaccaacggatcaattctacgcgatggtcggcactcaggagtcaggtagttatctcagcctttgaccttagattcgattactggacaaacttcggaccggaaagctgataattcctggaaagctgatgtcttggaggttctcggcagtggacaacactcgacgggcgttcccgcggtccagagtcgtgctggatggatggcatggacactggttctacagtatttgacctcggcgttaatcttatctattcccttccaagatatggtcggctacgacaccattctgtggccattacggcttgaatctggatccgtggtcgacctctctctatcatttgtcaataatccagcagacctggcactttcacatgcggaaccagctcgtcccaatcaggcaattacctgcacatctggccagatcagcgctattggtcagtatccattttttaggcgatacccagcccaaccctgtgtggtagcacgctgctggcaccgcagtctatatcaattagagatattcccatattcaagcaaatgcaacgaatctcattcgcccgcttggcaagcatcaactcttcagacgaaggatttggcggggtaaactctagcccac

SEQ ID NO: 10050 - DNA, 906 bp, Emericella nidulans
  unsure (1)..(906): unsure at all n locations
gcgtgccttgcactaggagtggggtcgccacaacagggtcacgcatgatactagcggcggtaaaccaacatcaaggatcaacgagcaaccaaagcgcgaccgtgtgctttgtgaagcagataataaacgggtggcattaaaatgtctacttgtcttagataaacactgacttatgatacaagcgtagacgaatatgacatgcacaagcttcttccgacagaaagcacaggcgcggacgctatgagactccactcttcaggaacacgggagggaggctactgaagtgaccactgacagagtttctcaagctagttgacgaaagtaggggagaaatgactgccacatgcccatcggcgtgtgcggacccactgtgcatgaacacagggaccgaaaacacagaccgattctacgttagagcacatggcaggcacgtccaacaacatgccagtgacccctcgcggagccgcaatggccctctgatcgacaatagccctggaaagctaccccatggcttcccatgctatttcagaccagagggcttcccaatacaaggcctaataaaactttgtgtgcctgccctaatatgatgtaaagccctgggtatttttcgatctaaggggatctatttcaaagacttgtgacacattggctttaagagctgattaatatgtttcggcatgagtttttttatctcngtatatttttctacaatttttttccactttttattagagaaaccttgtatatttccttatcttttgtgataaacattaaaattacttttttttactcacttttttatttttatttatattgaatgcnncnttttatttttttttctattatatttcatatatttaatttattattcaatcaaattttaaataataagtctaaatttcttta

SEQ ID NO: 10051 - DNA, 2336 bp, Emericella nidulans
  unsure (1)..(2336): unsure at all n locations
cttactggagggccaagatgagccagtacgtcaaggctgaagtcgagcgccgacgtgccgctaaggcagaggaagctgctaagaaggaaaagtcttctgaagataccgagtcaaaggaagagggctctgaggagaagtccgaagaagcattggatcaggagcgtgttgatatctccggtttctctcttgctctcaaccctgacgttttcagcggccagatccctcaaactgacgaggagaaggagcagtgggcccaggacgagaaagaagttcgtgatgcttgtgactttttgcggtccaaggtgatgccagagttgatccaagatctgcacgatggcgacgtgggcttcacaatggacggccagtctcttagccagttgttgcacaagcgtggtatcaacatccgctacttgggtaaattggccaccctggccaaggagaagggctcgcgccttgaggctctctctactctgttggtgcaggagatggttgttcgtgcattcaagcacattacgaacaagtacttgcgtaacgttcctgcgccgtttgctgcttcttgcgttgcccaccttctgaactgccttctcggtgctgacgtcaatgcgacaccgcgcgctgagattgattcctctctccgcgagatctacccggagggcgacttctctttcgagaaggtcacacccgaagctctcagggcagaaattgagaagcaggttaccctcagatatcgcttcaatttggagtcccagtggttcaactctctgcgacacctgcaacttcttcgcgatattgctatcaagcttggtcttcagcttgctgctcgcgatttcgtgttcaccaaggcccaagctgagggcttgaaggtcttgcctgttgccaacggtgtcaacggcaccggacaggatgagggcagcaagaaaaagaagaaaaacaagaacggtgactctggttcaccggctcgttccgctgctgcagagaagcctattgttacctttaccccggacgacattgtgaacatcgtccccttggtcaaggatgcctctccacggagttcgcttgctgaggaggctctagaagcgggccgcatctctctcatgcagaaccagaaacagcttggccaggagctcatcttggagtctctgtctctgcatgagcagatctatggtattctccaccctgaagtcgccaagttatatcaccagctgtctatgctctactatcaaacagacgagaaggatgctgctgtcgagctggctcggaaggcagttatcgtcaccgaacgcacacttggtgttgactccgccgacaccatcttgagctacctcaacctcagtctctttgagcacgcttctggaaacaccaaagttgcgcttgcgtatatcaaacacgccatggacctgtggaagatcatcttcggttccaaccacccggattcgatcaccactatgaacaacgctgcggttatgcttcagcacttgaagcagtactctgactcaggaagtggttcgaggcatccttgtcagtctgcgaatcactcttcggcaagcagtccatcaacactgcaacaattctcttccagcttgcgcaggcactggcccttgaccaagattctaaggctgctgttgggaagatgcgcgatgcgtacaacatcttcctcagccagctcggccccgaagaccgcaacaccaaggaggcggagacatggctcgagcagctcacgcagaacgctgtctccatcgccaagcatgccaaagatatccaggcccgccgcctgcgtcgtatcaatatgggcactcggactactctaggaacccaaatccaacctcaggttggccagtcaacagccgatgtctctgcgcccagccaggcttctaactcttctatcgactcgaggaacattgatgaactgttgaagttcatcgagggtggcgacaccagctcttcgcgaaccaagcagaagaagcgtgctgctgccagcaaccctaagcttcgtgggtcgaagaagtcctctgcttgaatttcttcatactctctgttcgaataaaaacaaaatttctgggtgttacatctccttttgaccttcacatctcttgacggccatacttcttttttctctctagcccttatttccagggctcgtgcgttggatgagcggaattcttggatatacttctgtctgactttttttaaatttgtagaaatctctactctcatatctgggcttgggttgctattcggcatggattgtcccacggttcattatgggcagcgcatagcagaaaagatagggtgatttgcatgctgtactggtgtcctgcatctgtgtntgntttttc

SEQ ID NO: 10052 - DNA, 992 bp, Emericella nidulans
agtatatgcccactgactttgccgatccaatgtgacggctggtccggttcttgaacacgcgcaggtacccacccgatgaggaattttcatgccattttcttgctgatattgtatcagactatgtaactcgtccgagcaagctgcaactcgagcaaggagcttgacccctgacgatcaactagcttctcgatttctaaagttgattatcggagcgtataaacatctgttcttgcacgggatgagaaggagaagaggtcgggtacggcatgccgaagtcgaaccggttaatgtcaccgaggacccattgttcttgatagctagatcaaacattcttcagtgaggcggtaggaaacaagttatcaggccgccaagccgtaaccacgccacgtcatagtgagcggaataggcctggcgatatgccggagattgttcggtgttttgaggagctcaacttgctgacataattaattatccgttatacagctcgttcagccaatgaaatctcttgaaacagcccacgccaccatgctgactgatactcgaagcacatctataataagggcatggcaaatttctctccctgccttggccgggacgggtatgttccttaaaggagcaatttaaggctgaaccatgcccaatcgagggaatcgagacccttgctcccatcaagtcccgaactctggttcgccgaaatatgactcagtcggcgtcggcgatatcgtgggctagcttcggcgaaaaagacccggccactatatgtgcaattttttcatgcctgaagctataagtatgccctggaccgtcgataggaacagctgggttcaagtcgactgtcagacaaaactctataccctctatatcatttattgtttaatactggctggtaggttcatggcagcttaagcataccggcataatgtccatcatctaactttactagtactagcccctatctcaaccaacatgagctacacacccagcacaagtac

SEQ ID NO: 10053 - DNA, 175 bp, Emericella nidulans
aatagggccgaagcacagtaatctttgaacgagcacggatggcgatggaagcccaggcgaagagcagccgatacgagctaggctatgagtctactcgtatactgcagtaaagcataaggccattgatgcaattcgggtccgtagctgtaggtttgtcatggctcagagttctgct

SEQ ID NO: 10054 - DNA, 843 bp, Emericella nidulans
atcggactaccagttaattgatgtcctcaatgaccatctgtgctatgtgattacggacaaaagaactccgtggcaccttcctttcaggcgtaatttcaggctagtcaataagattgtgatcacgttcgttgcgaaagggaagtgcaagctttccgtttacaccaaagtggaatggctatggtccccttacggaatccaacgtaagtttccagatactaccgacagtgaatacggctgagacgctgcaggggtgattaacaaacaggctatgggcgacttggaagaagatgcgatggaccttgtcgacctcgttggggatcaggtgcgcaagctcggtgtgcacagccgaaccaagaaagcaatcactatcttcggccatgttggacgacaggctctaacatcgcagttcaatattggcccggatgcaaaggtggagcgccgcagaccacgcactcaaagaacgcttttccagatgctttacgagaccttcgtatcgttctttcagagcgctatttcatccataattatttggatatttggctctttacgctgggttttcaagactgcgaacgccaataagatcataattgcgctccttgcatccagtgtcttgttgaacggtttctattcgacgcgggccacagtccactggtggcacgaacgaaatgttgagaacttcatggctcgtatggagattccccccaaaccaagttttgaccaaagctctctacatgcctgacatctaccagggaatcgtcaactctactggtggacaaattgacaccgttagcgattggttttttccatttcagcagcagaccctacgggtttctttttgccggt

SEQ ID NO: 10055 - DNA, 1735 bp, Emericella nidulans
aacagggtcccaatatatgcagcttcttcttgggcgagtattgtatcactaaaggcgtcactatggctggctcctattcgtgacgtatacgaggtatcttcaactgccagacacttaagttatattgtttgttgacaggctgttctgcaggccttcaccatctacactttctttcaactcctcatcaacttcctgggcggcgaacgagcagtgattattatgatgcacggtcgtccgcctgttcaacatgcatggccgctaaatcacatcctgtccaaagtcgatatctcagacccatatactttcctcaatgtgaagcgcggcatcttgcaatatacctggctgaaaccagttctcgccattgtttccatcgtcatgaaagcaacagatacctacaaggaaggttatttgggcttatcgtccggttatctctggaccggtattctgtataatattagcgttaccattagtctttattcgctggcgttgttctgggtgtgtcttcatcatgatctggccccattccgtcccgtcccgaagttcctctgtgtcaagcttattatctttgcttcctactggcaagggttcttcctatcaatccttcaatggcttggagctttgcccaacggcacaggggattatacaccggataaccttgcggctgccatccaagacagtttgacttgtttcgagatgcccgtgtttgcggttgctcattggtatgcgttctcatggcacgactatgcagattcaaccatctcggccgctcgcctcccggtcaagtacgctcttcgtgatgcattcggggcgaaggatttgatcgaggataccaagatgaccatgcggggcgaaaactacgcgtacaggctcttcgattcgggtgaccatatcattccgcatgcagaatctaattcgcgcgtgcggcgggtcatgcacggcatgcgatacgagcgcggtggaaaggcgaaatactggatccctcagccgggagaggttaacagtcgaacacctttgctgggcggcttcgacggtagcagtggtagtcgacgcaatagcacgctcgaccggtatcgctcccacagcgagtcggaggagactactctcgacgactctgacgagaggctcttttcacaagcccgggaactagaattcggcgacttcaatgtaagtgttttgtcagcaaccctaagatatcccgaagctgaactgtgttagtacccggtcatcactgccaatttagtcccaagagaccaacgacttgccagtcccgctccctcccgttctactcagcagcctacattggtgaagaaagcgagaaaaaacagaaagtctcacgcgtcaagcagtggacgtaaaaccagcgaaggccatgcctctaggagctcacggcaagagcgctctgaaacgtcgaaacttcaacgaaggggtaccgactcgccgaagtcgccgggctctcatcgcagtcagttagtggatcttgtggtagaagaccgagaggcggaagaggaggagcgcgcgcaaatccagcgagcattcggatcagtagcggtcgaggatgagcccaaacacttccagtatgtagtgtaatccaatcttagcatggtgtgaccattgctgacttacgcaacaggagaccgtctggtgatccggtcgacggaggggccaccaaggatgcggaaggaaacgccgaatccacaatcaagcagcagaggctgggggaactagaagatgaagg

SEQ ID NO: 10056 - DNA, 1940 bp, Emericella nidulans
gtacctggccttggcacgggagaggcaagccctaagaggtggagccaaagtctaggcaaggttcccatgtcagtacatatctacctatgagagagcatttgcaatcaccctaggcggggtagttgcaggcttcagggcttatatattctggtgttcgtcgcttgaagctggttaaaccccaaaacttctctggtttacgcatgaaagtgtccaagattgaataagacaatcctctaagtgattacttttgtagttgtcaatgacgataattccgagtgtgccggatacgctccagggcgcgcgttgagggaggaagcccggtgtcaggcttgagcactgcttttgataaaacactggatcttgacgagagaaacgggacttgaagttttgtgctagaactgtatgttactgtaagtaccccgttcgcagtattatctgcggcttatagaagtcataaccaaaaatacgtaaatgtaaatgaatagggctagcaattgctaaatgtgtaagttagagcaacccctgtcgttgagtagtgtgccgatatcaccaacagagcaaacaggagaaataagagaaaagggagtgatagcagcttgtcacaagcgcagcgacgtttagccatctgggcaaggggtaaaattttgggctgcatgtccccagcaaagcccgttaaggctgtggtggttgttggactgccggggccggagctaaggccatagtggtctcattttcaattttggtgttaattgactgagtgaaagatcgtaatatctaaacgcagcaacaatgacttgctccaggaggtacagtgctttgggaaccgggtattgcattaatcaccctagcaacgacggtttcgataatgccaataatagccggtatagcggttttgccgccaaacaaccacatctccatgctcgaaggaactagtggaaactggaggctatatatgatcttttcgggcacattcgaaaagtgaacctcgtaaaggtcgcgaacggcacttgacgtcctttcagctatcctggtctcaaggcggccttgagcatgcgcgaattcatcggcaccaggactctggaacattgaatgcatagacgcgcctggggtatgacatggcacaaggcgggatatcatcggcggccaaagaagctctagcaagtagtagaaggctttggtgggatagttgaagcggggatgtgtccagactaattcggagaatgcctgttgtcgtgcgtcgtcctaggcccaggcgtcgaagcgagggctagaataagccacgtgtatacgcctttgtattatgaagagtacgtgaagatcctcgacgcttgaaacatggtgatttagaggcggccgaaccctgcaaaggcgggaggaatatatatcaaccacctacccacgtagaacaagagaacggtatgatgcacgatatacaggatcgtgctccacgttaccactgtgaggaaccgagaaaatgattgggctgctgcattctccacgccaattctgctcatcgcaacttaggtttacggtaagttgctacgggcagttgcggaggaactcgagccctccagggaatataaaaaagagggaaacagaagaaaacaaggggcgagggggttgaggattgggcatgtacgtggcagacgccatgtacaccccagaaagcctggagatcacgagtgtcagtcctgtacatgtcgtcaatgttaacaaggtctgtcaatgcgcagaagctcattcgtcagtcaggtaccggagtaaatatgcaaagggttttggcaacaattcggcataaaaactgacaatatgagcttggacaactataaaagtctcatacggggttaaaatatccatccacatagagtgaagaaaacgtggaatgcctaatcaagaaatagtggtgagtagccgtaataatcagtcgccttatacatcag

SEQ ID NO: 10057 - DNA, 2075 bp, Emericella nidulans
aagattaaatataaacggtaaggcgggagaaaggaatgatagagagagaaaagaggtagtgagaaggaaaagaaggaagaaaaaagaggtaggtgtataacatgtagaagaaacgtaagaaaaaagaatgggagagttaagaaagagtggaagaacagagggtggcgaagaggaaagacaaggagacttcatagaggagatgagatataatgatgagcagaaacagaacgaaatgatagtagaaagggggaaattcgtaggagaagcacgatagtggtgggtaatgaagaataacaaagggtccaaaagcagaagtaataagaaggttggtaaaaatcctgcaagtagagaaaaggaacgatagttttttatttaagaaggtaagtagccaaagatgaaccccccctggggaacggacctcttccaaagaattggggcgtgaaaaaattaacccaagcctgaggggttaaaaatgcacgggttctcagtaagaagaatgggctttggtcccatctgtaataacatcgtgaaagtactaggtagcagtttaagtattggtaagggaaacagttatcccggccccacggttcaagcttcgctccaaaatgtcccccttgctccgttgcgggtaattatccatcttgcacaaaatatcctttatttagaccgtctaagtcaagaccttggtctggagggtgctggtactaatgctcatgtttaccttcaagaggcttttgctgccactcctcctgctcagagcctagacacaggcattgacacggtgtcaaagttccaaggcttatgcatcggcatgataagtgccgcggtgatggaatgctcctcgacaaggacggaacttggacagaatgctgcggctgctttgagacttgctatgtgtatcggggcctatgttgattctaagagagctctggcaatgagtggtttcaactcgaaactcaatcccagctccgaaattgtgtgctttattgcgcgttggggtatagaatccggtagggaaaatatggaggcgatattgggccggtatcctgaggtaagatacataatatagggctttcagaagggcgttatgctaagtgataaactcactcacaggcctatatatcagttgaactagacaagaacagcgtgacagtcacggcgccggactgcgatgcgccatctctgtggagggaattgaacatccaaagcgtgagagtgacagaaatcccagtgcgaggagggtaccttagctcgaagaacgagcagattctgcagagtctgttgaaattatgttcttcatgttcttctgattctactagcccactctgggtcccctgggagcgtgagaagctggagcgctgcttacgatcgatactcaccgagcaggcggactggttctccgatatctcgagaacgatcagttcgatttcgcatatttcgacaattgcagttttggaactcggtcttgtgagctgtttcccgccatcgctctctgtactgcctcatcatcgtatcaaccgcggatctctaccagtgcccgctcctcaggaccaggatcagattccctataactacccagaaacttcggtagctatcataggcgcactgcaaatacccaggtgccagtagcctagaccagctgtggacgcttatttcaacgggacaagtaatgttcagtgaagctcctcctggcagattcaaagagacagtggctggcaacttcatttctgattttgatcagtttgattacgggctatttgacatctctccacgtgaagcaacgtatatggatccgcagcaacgcattgctctacaagttgcttaccgggcggttgagtcgagtgggtatttcgcgtgccctaatcgagagctcgatgttggctgttatgtcggggttggaagctctgattacgaacataatgtgaattcaaacacgcccaccgcatactctttcacagggacttcacgggcattcatcagtggacggataagccacttcttcaagtggtcagggccttcactaaccctcgacacagcctgttcttcgtccgcgacagcactccatcaagcttgta

SEQ ID NO: 10058 - DNA, 1511 bp, Emericella nidulans
catggcctcatcaacaccaggaatctgatcttgttagaaatgaccctagagtggtcgaacgctacatacgctgaaagctagatcctgcatcatattcccgacaccgaggccagccataggatcgtcaccctgaccttcgccgttcgctagaaggtcctggaggctgccattcgggtcgacttccatagcactgaggttggtaaatccatcgactagacgagcctccttgccgaacttctgaccaaaggcatcactgaggttgtgcgcggggtcggtggagatgagcagaacagacttgcgagctttggcaagctggatggcgagtgagcaagaggtagtggtcttaccaacacctcctttgcctccaacgaagatccagcgcaatgttttctggttgacaattgactggagcgtaggctccataaggtcgtcgtcgtggacaatcgcggttgaggacattttggcaaggggttatcggaaattcgcgacgatgattattgacaaacctaataggtctgttgaaatagagattcggtcagataataatggccaaatgctggggtgtgacagacttagcacgttctgcagactgttgactgttgattctccccgcaaaggtcaaaagttctggccgaagcttcaggaagcggaaagaatggctagcgctgtcacccggatcggcactactcgagacgcaggaggataccagagtatcgattgtcgcgcacaactaacgcaagcagttgacctttagcttattttctcactattgtcagagcaaagcaagcgtctttgccgccttcagagttaacacgtgcagagggtttctgcctcaggtgggataagcgggttaccccactatgaagtccccgttgcttcaggttcctgaaagctaaactcgacttcaaatggcaataagcaatgggtagagatatctcatggaaaattagttgactgtctaatccgcgtttgtttaaagatcaacaaatactcactgactaactacgatactgactccggagagctccccgtcggtggtctccgacagaaacagcggagatcgaaagcaacataaaatatcgtctcgctcactcattttctccaattcacctcgtcttctatatcaattttctgttcttaatggacgttagtcccagagacctgcaagcaattgaccagccaggcaaagtcacgggccgtcttaacctgtaccagaatcacctccttccagctggagtctcatcgacgtcctccacaaatataccgtcgagaccaaactcaccaccaaaaattgctcgcgacccgctaacttgccacgttctcaacccctttatagcgcacgcccgccgcaaacctccctgtcaccctcacactcctttcaagcccgtgccccgcagccaccagccatgtcagcttcaccgcaacaacaatacgcaggacaggcgcgtagcgagctggacaccggttacagagcgatccgcatccgtaaccgcatctgccacagtgcgcct

SEQ ID NO: 10059 - DNA, 537 bp, Emericella nidulans
  unsure (1)..(537): unsure at all n locations
gctagctactctctcaacgcgagtacgtgactacgaagcggcatccccgttttaaccggttgaaagatggctctcaatgagattcacaactcggcaagacgtgggttcggttgtgctgcacagggaagcgagcgttgtgttggctgcctgcagggacagatagactggagaatcgctagcatatcgtgggttactccaatcatgagcttcgtctagcactccacagtctggaggagacccgcattccaacgctgacagcaacccgtccgctcacctcattgagaagccagaattgtaaccaccatttgcaagattgttatgagaaactcggtatcaacaggcccgagcttcatcagagtctgccaatatagtctatagaagatgagactatacctctgcctggagtactgcttgcttggatagagtcgaaagttcgggggacttagtttgggcacctggttgtgcgcggcccgcgcgggaagctcggatgggttacatggntcaatctccccgcagctgacctagcccctgatgctg

SEQ ID NO: 10060 - DNA, 1694 bp, Emericella nidulans
  unsure (1)..(1694): unsure at all n locations
cgggagaagttcatattcaggctcgaacccagggacatagtgccctcgctctggatttggtccttgaccctcagactccagctcgtttgtaaattggccatttaaagattgtcgctgcggagcgactcggtcgtcggagggggggcctgcgtttcggacaggcgagtctccacgatgtccctgagacaagggctgtcggacgcaaaggccgaggcagaggacattgcgactgcccctggggccgctcgatggtgccgcgcggtgctgtctgattttgtttatggtgaggagatcatgaggggaaaaggctgcggcggtcaggtagcctcatgactaaagccgtcgagtgggtcgcaggggaatggagccgttgtcattgtgctgctgcttatcaggttatcagtatcagggtgacagcgagataagagttggagacgccgggggagtatggaggagataggatcgtcgatgaggccggagaggcgcaagggcgcatttttaaaagagcagccggcgagcaggtgacttgaccacctcctcttcctcctcctgcatacatactcgtctactgcatacccctcatttatctctctcgcaatcatcatcaccgccagtctcaagtcctcccttggttcaccatctaaccccctccactattcttccaccatgacgctgcgctctaacatccacatctccacccaccctctcctgcaagccaaagtctctcagctgcggtcctcgtcaaccacaacccgcgagacacgcagcctggtcaatgaaatcgcgacgattctgggcgtagaggcctttgctacctggaaggctgcgggcactggaaagactgtacgcacatacattccggaaatgtaacccattagattagacagctctaacagcagcaggattccaccccgttaggtatcgagtacgagacgaagacaatcgaccccgcaaacattgcactggtaccaatcctccgttcaggactgggcatgattgacggtagacgaccgattcgatagataccggccggctaggtagctaatcagtgtgctgcagcgatcaatgatctcctaccgtctcccgtcccaatctaccacctcggcctcttccgcgagcgcttctccctccagcccgtcgaatactacaacaacctcccctacaaccgccccgagcaatcgtcttcttcgtccggaccaagtcccagcgccgtcaacacagccgcggcctcggtcgctatcctactcgatcccatcattgcaacaggcggcacggccgaagcagccatccagcttctccgcgagtggggcgtgcagcgggttgttatgctgagtgtgcttggctccgaggatggtgtcaagcgtgcggccgagtgctggcctgagggcgtggaggtatggataggcgctgtggatgaacggtgtaacgagcgggggatgattgtgcctggattgggggatattggggantcggttgtttgttgccattggaaagtagtcgaggttgccacaaaaacctagattctatttgctgatgtcccactgttgaaagcatccatagaaaatacagttgttatatttgcaatcccttgagagtttgtataaccaaaccgaacccaggcctcaattcaataaaccacccaagcaacttcattctccaactgaacccccacataagaaactcacctagttgaa

SEQ ID NO: 10061 - DNA, 939 bp, Emericella nidulans
ctcagaattacaatctcaatcctcgcattagtctcaacagccgtgtcgagtttgttttatgggatcaagaccgcgggatctggcgtgtggatattgcgaactatgggattatcgaaagtcagatcctcatcaacgccggtggaatcctcaataatccgcagatgcctggtctccggggcatggatactttcaacggcccaatactgcatacagcggcctgggaccacacattgatctagccgggaaacgagcaacgattatcggcgccgatgcgagcgctgtccagcttctaccagaaatctgggaagttgtggaccatgtcgatatctacatacgtaccccatcgtggatatctcctcttgttgctttgccggaaggcgatgacaagagacatgtctacactgagacagagaagcggtatttcaagtctgataaggaggcctacctggcaatgcggaagggacttgaggatcagtcaacatgatgttcagcgctttaatgaaagagtcaccggggcagcagagactccgggcgcggtttgaagggtggatgaaggagctcagtcgagataaagccctccaagagaaactgatttcaaagtttgaggctggctgccaaagagtccatcccggggaagaatacctgatcgctctgcagcaggataacgtacggcctgttttcgatccaatacgtgaggtcgtgagagacggagtcgtcctggaagacggatcaatgaacccagccgagatactgaagcagcaactgggttcaatacttccttccggccacagttccctataataggcgctgatggtgtgaatatgcaggatctatggcagacaaacccagtctcgtactttggcctcgcggggtccgggtccccaattatcttatgtgcctagggccaaatacgccatctcgaatgggagcttgataggt

SEQ ID NO: 10062 - DNA, 138 bp, Emericella nidulans
atatgcagcacgaggcttccatccgtcacatcccaaatgtctctaccgtcctactctgccgttgtcgacgccactaccgcgatcgagtacaatgatcccgcgcactcatgaggatactccagccgcaacgaactcctg

SEQ ID NO: 10063 - DNA, 1648 bp, Emericella nidulans
acagagacgtccataggtagcataaagctatgcttgtttgacaggtttagcccgttcaccaaattcatcaaggaggtgtgagagctgggggcgcagctgtcaaagtcgctcgacaggtcaacggcttatcctccgagcgactattgagtattagtctcaggggcaggcccggcccaggaaagtcgctagcgggaacatttagtagattcctcttataggaaagattagcggatctatactaagatctatttagagtcggtagcatgaaaatggcttccagcctctgagcttactctatcagcctttgttcaggaacctgatgacgggcagcgtaaacacaggtcgaggttgatacttggcgaaggcagcagcgagctccgcgagatatttcctgatctgctcattcaaaatgtgacgtctccgccaaataacacttattgaaaggcgtcttcgacaatcaccgtcttactgttcagggttctggacgctgcagagcaaagagcatgcttccaatcctaggtgccaattccggtaccaattccgcagctgcatactccatacaaaaatatcacaaagaaaaccacgtggctctgccctcatgggttggttcggcataaatagcagtgttgaccggtagtatgtggcattcgatccaaggatctaatcgtgatcccagctcgagtgaatgtttggtgaaaacgcgaggggcaagcgaggagttccctcgaccagttcctagcagagaatctgcatctgatagatctcagcgatcggccattggacgcgaatgcgaagcgtaagctaaagcgatacgatgtggctcaaaagatccgactcggtgtttcagcttcgtgacggttgatcgagtctaaagtctaacgcggtctgaaaatggggcagagggttgggcggggaaaactctgggtttcttcaaggcttggctctattcgaaagttgagtctgtgcctaaattttgagctcgcccgtggtgttttgatgtgcaatagaggagtagaggatggcgtatacggttgggaacgcacgtaagggaaaccgtgcgagacagcaagagggccgacagagagcgccgttgtaagcgacgatcgacccatccggcatgtcctccgctcaagtgaaataatgaacttaccaggcttttcacctggtctgtttattgcttttcagacagtccttcggttttcgtgtctcaattccgcagtccctcagtgactgggcagtagcagggcggtcgtaggcggtcgtaggcggtaatagtggcagttgggcacaacgctgctgcacagcctgcagttcgtctcggcagttcctgagcccagaccagcaggggcggacgaactaggaagtcgggcgcagatccaaataccggcgccgttcctggacaactcaagaggatttcttgtcacactgtcaccgcccgaattaacgccgccaaggcctgctgcagcttgaccgacgctgacgtttatcgcatgttgcagtcatccttgcttcatcccctccacgattgtatacagttcaggtcaaacattcaatatgcagccaagtgcagaaaatatccattagtgcttcaatccctcgtcaaaaggcctgcgtttcgtaggttcacattgtttgagtgctaattcgg

SEQ ID NO: 10064 - DNA, 381 bp, Emericella nidulans
  unsure (1)..(381): unsure at all n locations
attgcatttgcatcttagactactcagccattctttaattcactctttctcagtcgctctttaacttagtttttttttttttcttggaccagccacacccactctcgctaatcccgattccagctccatccatcctcgaacccctccctattccgactctgcaacctcagcttaaaacgagctcgatagaacgcccgggttacaatacatactctacggacagatctctccattcgttatatctttcctcgaccggtttctccatcatcgcaccttccttctagtcttaacatacgaggaacggagctttgtttacatcgaagatctccatcaggccactgnctgctcgtctcagcaaatgcagccgaaactcctacaaat

SEQ ID NO: 10065 - DNA, 439 bp, Emericella nidulans
catgtcttcttatggactgtcaccgcaccctgttgctatcgagttgttgccaggccgaggagcatggtgctagccagacactttgtgcgggtgggggagctcttcaggccaaggaccgggctgcccctgagccgtaaacaagagagagcctctgcgcctctccgatggtgactgaccacccgtatctggagggaccctttcaccgcatagactcctgtacacgctcctaacttgcgaggggctcctaggtatacagcctgcacttaacccaggctgacatactcactggtagggtgtccaagaacacgtacatatatcgtagatccaacgagacatttgacgggcatccatgcggagaatagtccctagctaggagtattggctggcgctacaagccctaacaactgaacctttatacacgcaagtcagtaccaaggta

SEQ ID NO: 10066 - DNA, 1638 bp, Emericella nidulans
gtggaggcaaaaaaggggtttaaaggttggccaaaaactggttttcttcggtttccccctatgaaagcgtccaaaccaagagctttgttgcaaaatcgccttggacaagtggctttctggttttttaggaacggtcttaaaaaggctccccggtgggttctcaaaaggtatggcgaccataacattgtgtaaaaggcccaaaacggtctcagaataatgaaaaagccactttcagatccagtttttgaatcttaattgcaaaaaaagcgcaaaccgaaaaaaacagcacagaacagttgagttcgggtgcacggcaaattggagtttaacccctggtttaccccacctgggccaaaaaccgtattctaaaagaaaaatcccggtttaaaaacgaacacccatagggttgtattagcggagagctctaccgaagggtcataaattaagggaagttaaattgtaagctataagctccccaaatgagacaaagaatttaggccccgttggcgcattttggccaccgggatcgtcaaaccaaattggccgcccttagatatccaaaaccctccaatccaattggatctgggtccccaactggatcgattctccgccaccgaatgtaaacactgccggtcgaatcgtgtgcttcagaaggcgcttatctctcgcctcaccaccgacaagggctctcctccatatttcggcagacacgcggtataagctcttcgtaaatggggagcgcgtggctgtcggacccacgcggtcaagtccctggatctggtactatgacacgatcgacatagcgtcctatctgcggcaaggaaataatacagtgcaattagatgttcttcgctatttcttcgtatcgagagctgcaatgccttttcagcggaccgcgttgccgggattgacggttgtcggcgttattgagacagaaaatggagctgttgagctcgatacggcaaagaccgaggcctgggaagcgcgagtcgatgagagtagactgtttcctatggggctggtggacgatccgtttcttcatgtacagtttcccggtgctttagttgtagttcaccccggtatactgaccccagcagatcaacgagcgcgtcgccccggtcgagctgtccgcacccataaccccgatcctgcacggcatcaagacgttgaatggagagctagcaccatggagactacgtccacgggcgataccaatgtacgaggaaagcagcgttgcggtagacaccatccgttcatgcagcagcatacgtactaaggaggaatggctggccggcctcagtcagagcgagaagcccctgcttctgccagcaggctcgtcacacgctctagatctgcaggcagcggtgcactccacggccttcctccgctggacgttcaaatccacgggtagggcgtcttccattcgcttcaaggtcacatactctgaaggctacgagctaaacccacgcgcatacccatttttccggacaaagaacgaccgcctcgatgcagaaaatggccacttaatcggcccctatgacgagatccagctggacatcccagccttcggagagacaatcgcatacgagcccttctggtttcgcactttccgtttctttcgcgtagagatcacagttg

SEQ ID NO: 10067 - DNA, 1663 bp, Emericella nidulans
tcacaggcttctatggggataaccgtgcataaataccgttttaattgctcaggccaattgcagctgcgccggtgctcgagacattggatgcatttgggcctccattttgttaggctattgaagctcccgtggatgaggtgtgcttaccgatttccgctgcactaccggattagctgggcttctgcctagggatgcccttaccttctgctttcgttgacgacaggagttacaagcagttgtgattcgtgactgtgatcgagcaggcatcttgaggagtcgacgatgatgacgatgatgatggaagatgagtccaactgtgaagaaaatggcctagatcacgtgaccatacgctgttcctgattgtctgattctgcttttgcgaaccgagttgctggcaaaggcagcaggtgagaattgcgtaattgtattgttatataatcatagtacttgatatcggatacttgttttgtaggacttgggaggatgaactctcacggtgacccaacttacaggttgcagagtcggctgaaggatcagccgaattgttctcccgtctacgacacataagaggatgcagtcactcccttctcaatctctttactcacatcaaccatcatctcaagatgcataagatcgcttctattcccggtgacggcattggcccagaagtggtctcggccacaattcaggtcgtcaacaagctcgcctcgaagctgggcttccagatcgagttcacccatcttccatggggaactaagtactacaaggaacacggccagttcatgtctgacgatgccctggatatccttcgcaaatttgatgccggcctttttggcgctgttggcgatcctggtatgcttgcttcactgcaaccccctcgcattgattaagaattctgaccttggtagacgtccccgaccatatctccctctggggcttgctgttaaagatccgcagtccacttcaattgtacgccaatgtccgtcctgtccggactttccctggaaccaagagtcccctcaccacggctaaaaacggcatcgactgggtgcttgtgcgtgagaactccgagggcgagtactgcggacaaggaggacgcagccatatcggccacccgtgggaggcagctactgaggtcgccgtcttcacccgagtggcgattgagcggattatgcggtttgcctttgagaccgctcgctcgcggccacgcaagaggttacggtggtgaacaagagcaatgcgatgcgccccggcttggtcctttggaccaagtggcttgcaaggtggcaaggatttcccgccgttgcctgaaatagaagctggtgaatgcattccaataggatggttccgggccgatctcttggacaattttgggccaacttaatttggactttttggacctgggggaggttgccggtaaatcggggccccacaatatattccccccggaaaatccttttttacccgtccggcttttttattccgggggggttcacccggttttggccctgtgaattttggtgaaaaaaaaaataaatgtgtggtgggtggtgggctctctctgaataatattaattctattttatttttttttctttcatccgtcctcctttaatagcttcattaaaaattattttaaaattgtcctactctttacttaggg

SEQ ID NO: 10068 - DNA, 1287 bp, Emericella nidulans
aaaagtatgaggatatttaaaaaatataactaaaagaatatttaagggggataataaaaataggcaagggtccacagattttagagagaaaagttttattaaagaataaaattccgacaaaaagatgggtataaaaaaagggcttcagaagatgggaaaaaaaaaatacggaaaaaacagttccggttattgaaaggaattaacataaatggggcaacggaggacaaaaacctaagggcccgggaaaaaaattttaactagggcaggcaaccagttcgctattataaaaaaaaaaccacttctaaatccacccaaaggggcactcttcttcattttacgatgaatagcttctcaattttcattgggaatcgcgataaggcccccgcatcacgtgtagataacatctgctgtaattggtgcctgagcctcttatgctggtgtacgcaggtccatgcaggaaggcctccgacaggcgtatggcaactctctgctctgcggcacagagcaagtaaggaagaataagaagtactcggcgtcgtatgacccacccgtctcacatagtgttagagtgctgctgtacaaatcgatggatccattggacgggaagcgcggacaacgtcatgcttaggtttaggttccaacccatgtgcccttcaaacactttcaactccttcactcccaaaatttctctttcttcaacagaggcctcttgcatcaagatcaacggtcctctccctcttagcatttcttttaccattatcttctgttcgtcgcttggacgatccactacaccggaccatctcgcttcttgttcttgagattaccatgtcatttgtctctcaaactaccagtctctttgcatcacactcgataccgtttgatagtcggactcgataactgcactatccgctctcttgtgctcaagttcacctaagtctacatcttccatcagaggctttattgtgcctttcacgcgaaatcacacagtcctctttcgcttgctctttttatattgtcccatctgaacacttgccaacatgccggatcttcgtcgccaggttcttgagagcggcaaaaccatgtcccgcaaagctgcgtcgaaggagggctctcggcgcacttcgcgcgcaacgtcggctcaaaattcacaccagtcatcacggaacgcaagcagacaggcctcagacgatgaggacgcgggtaatctcagcgatgataccgctgtcaggtacgtttctcttctctttcacgagattcagatttttatttgtgtaagatgatatcata

SEQ ID NO: 10069 - DNA, 202 bp, Emericella nidulans
cctgctctgtaggcatcgagcgcctcgccaattaagcgcagccacaccggctcaaccgtccacgcagcacagcatggcggcctcccaagtgtcggccactgtgacctccgtaagttcagcgccacctctctcgcataccatacgcacaccgcgcgtaaactaccgaacaaaccgcataaaaatcaaacgcgcaggatcaaac

SEQ ID NO: 10070 - DNA, 1242 bp, Emericella nidulans
tgcaactttctctttccaatcgaaccccaaagcagttgttaacgaaagcggtgaccagaagctatggaagctgtatcggaaacgaacagttggcaatgattttgaactgaaatgttaccgcattgaccataatggcgaagcctatgtctgcattccgactacattcactatcagttatttcaaaggggaacaggacattgtcaacctgacggtctacccgcttcggtttgcagaggaccacaaagccctcctacaggtatacaaggagtcgggccaaaagtgcaaagagtgcatcgaggccaagttcctcttgcacaccggatgggctctgactcccgagtcccagagctcgttgcagtacattgccagcgatgttattctcgacgctggtgaggcgatgaaactccatttcaactggaagtttgattcaaaataccccagtacaaaggagtgggatagaggctacccgtattatttgtatcatgttttctactggaggttgaaggaccaaaaagctgtctcctcgaacatccaaaatgcctgctgggtggacgactgggtgggccgcaaggagaagattgactattgcgagcgtgtggactctttcctttcacacggcatcaacggccgggagaaggaatatcaactcaacgacgatgacatcgtgctattgccacgtcggcttttcgcctatgtcctccaagagcgacggtttgtggccgtggagactcgaaacctctcaagcgtgaaggactctacaagtggcacatttgagaacttggtgatcaatccggaccatatgagcttgcttcagtccctcgtgcattcccattatatgcgcaagcagatacaagattccggtcgatacagtgtcaaccaggacattgtccacaacaaaggacgaggcctggttatcctccttcatgggcgtcccgggtgttggcaagacctcgacagcagaaaccattgcccatcaatggaagaagccgctattgccgataacctacggggacctcggactatcgccatcgaacgttgagagcaagttgaaggacgtttttcgccttgctcagctttggggctgcatccttctcttggacgaggcagatgtctttctctccgagagaaaagcaacggatctcgagagaaatgctcttgtttccggtggagattccttcacatggtgcagaatcatcactaacaggcagcgccttctcagtcctcctcggggcctgacgtaac

SEQ ID NO: 10071 - DNA, 418 bp, Emericella nidulans
accgtatcccagcgagcctcctcattatcagtcagagacgtcttgggttcagaaaagtcacggttactccgtgacgacgcacggctgatggacgtcggggcagtcaagggttcgtccaacgtctgtgtgcccttatcagcacttgcataactttgaacactggttcgccagctgttacgccgcgaactctccatacttcgccggaaggatgcgtagacggggcttcctgggttcggcctgaattcaaaggcgtcatgacttggccgggctttcgagccggcttcgcgaatgaacagaccttctgcctccaagccttgaccccgaatggatcggggtcctcaggatctgggacaccaaacggcacagagtgatcgagatcgacatcactggcgtctggctggagggggattaggctctc

SEQ ID NO: 10072 - DNA, 439 bp, Emericella nidulans
cagtattgcagaaacgatcctttgtggctgcccattacagtgctgggataattcgaccagaggtcttgacagctcaaccgctcttgtaagtggactccgggctgttctctactgtctctaactctggaaaggaatttgttcgaaacctacgtctttccacggaatatactggctccacagctattgtagccatttaccaggcgagtcaggcaatttacgatgtgttcgataaagcaattgtcctgtacgaaggccggcagatatactttgggagtgcttctgatgctagacgatttttcgtcgagatgggtttcgaatgccctgacaggcagaccactggcgactttctgacatccctgactagtcccaccgagcgccttgtgcgaaagggtttcgagaatcttgttcccggacaccagatgagtttgcggaacgatgg

SEQ ID NO: 10073 - DNA, 124 bp, Emericella nidulans
tatgatggccgagataaaaagttctgctcgaacctcgactaaccggagtagtggtgccgtcaccatcgatgtctcgcctaaaggcgcagagacactctctaatctttagtcagttgggctttcc

SEQ ID NO: 10074 - DNA, 1517 bp, Emericella nidulans
gatcatcgtttaaattaattctcttgacgatgagatgaaaccaatcttcgcagagccgtgttaaagagttagacagggtagaatctcgttctgatacgagtgacgagccgaacccgattagaccaagggtcttaccctgggccttctttcgtatcgaacggtatgccgcagtcgttgaggattcatcagggttatccgagacgggagacatcggcacttggatggttacctcggtgcctttgtctttctccgaactaagctcgattgttccatggagggaggcgactgcctttctcacaatacttagtcctagcccacttccaggggcaagagcatcttcctgcgagaatggaacgaagaggccgtttcggagaaaagcagtcccaatgccctgaccagtatctttgacagttaatgtaacggtatatttggcgttggaatcagactgcgaggagtcattgctttctccccggggtgtttctgcttcccctaccttcagcccaatgtaaacgaaaccctgttgcgtgtacttcagtgcgttactgaaaacattcagcatgatacgtcgccagcacccagcctgtgtgtagaaaccccatccgttggattcttggatatcgaatatgatagttacttgcttcgccgaaacaacagccgttttcggactaccaccgttccttcttgcatgatgatagaaagtatgaccggcaaatatactctcgaccacttcctctaggaccgcatctagctgaacatgcgtattgatattctcgctgctatttggggggttacgttcaagagtgtcgtgattttgacttgacgtctcagctttcttggcatgtttatgcttcgagtttcggtctttcctgaatttatcaatataggtaaagtccagcagatgattgatagtatcaagcaaggtccggccgcaggcctccaaagtgtgtaccattccatactggagagcattcaaggcagtatcgctaaggaggtctgcggtgcccaaaattccatgcagggggcttctcagttcgtgagagatattgctgaccaggtttgtctttgctctgtcggccatctcgatatcaagtttatggaccgcagccataatactattagcaaaagcacgcagatacgccagctccgtctccgccgcgaaaacacgctgcggcttattagtccagacaagcaatcctgaaagccatctcgacttgtgagagtcccacagtggcagaaatatgatgcttcgggggccgtgaagaacacggtgcagatcgttggcgtcttgcttgtggctccgcttccgcctcctagagtcctttgtggatacagatttcgaggtgtcagcagagaaattgctgccgctctcgtcggataatgacccgtcattattgtagttgaatatcttcccacgagggtaccggttcatcatggtttcagcagaaactcacgcagcgcataaccattgtcctgcgagttggatctggccctggaatcctcgtttattgtggaaaaga

SEQ ID NO: 10075 - DNA, 1369 bp, Emericella nidulans
agtaatctctctgaattcgagcaacccgaaatttgggatcaactggtgtcagtattagtcataattcatcgctctcagcggtatgccctttaaacaggttgctgtcttggcattcctggtcacacatggggcaaagttgcttgcgcacaaggtcaccctgaccggttgtcgttgagctacctccaaatgctcaaggtaaacggcttaggttatccagatacttcgcatttattttgatcagaaatggtacggaatgacttactagaaaaaaatgttagtgagtggactagcacgaatttcgttacctaactcacataactgcaagcttaagagtttgcaagtccggagagccttcgaaacgcagaatcttaagtgattttgagatgagctgctgagtggtgtttgagccgtcttgcccattccttggctgagggcgacaatagcgcttggatgctcgcataaattcatcaccttcgacctcctggtttatcgccaacagcccttggctgcaagagagagaatcgggcattgttccaacggcatggttggtcaaaagtgtggcggactcgaccgttgaaaccacacgcattgccttagtgaaagcgttgcgaactgcagccttgttttctgtcagtctctctgttttcttgttagggtggttgtagggcactctacctgaagatgtggttcaagagattcgaaagtggctttcttcaaagtatcgcttaagggtgacaaaagacccctaaggcatttgactcggccctccgtacaattatcaggaaggcacaaatcgtcaatgaactgactcgtattcaactgaagggagggataatggtccagatagtttaaggacagtatgtcacctagcattcgaggaacatcatatgctatttccgttgcaaatgatgatccatagaagcagtacggccgtatcgacgtcaggaagtgcgagcagagttcgactttggacttgaggttatctaagctgggcgaccggagccaactcgaaagaacgttccatagccgttcatagccgttcaggatccaagcaaggttctggcggacgattgaagccttatcaggaacagatgtagggctgctttccgggaccacaaacgattcaaggagagcgaggattaaattgaaggctctctcggttgatccaatcttaaatcctttcctgaacagattccgggggaggctgattctgcctagtcctacggaaagaggtcctccgggcagtggaaatgacaacttgaattgggaggcgtcccatcgtccgcaagcacagagcctttctaggattaatatgacctctggatcttattagtgtgatattcatagctcgcttcaggttactaccaac

SEQ ID NO: 10076 - DNA, 201 bp, Emericella nidulans
gcattgtcggcgactggtcagtgttctcgtccttcgccctcctgttttggccggcccggtttattcttgttgtcggctgcttgtacatcgcagttgtcgtctcagggatattacttgggatatctcctattagctccctccttctctgtcgtcgtaacaacgccatcgtgtccactctccatgaactgctcctcgtgaacc

SEQ ID NO: 10077 - DNA, 2263 bp, Emericella nidulans
cagccaacccgctcgataatcacgaatcccctcgcttatagggtattgctcgtggacctagagatctggaaatacggcgcgccttctctggtagaactgtactactcacagttctgcgtatttgcgagggagagtcagttccgccggtttaactccaacggccttgcgcggatgcgtacgtctcgaaaacttcattatctcgaagacttggcttacacagactaggtgttaacaagaaattgctcgaggctcttaaaggaggaagcgtctcgtcgcaagtgctgcggccatttgtttctgcgttcaggtcattgatggagagttgtttgtcagctgatttcgttcgctctttagctctgtttatcacacatgcactacacaagcccaaagagtccagcggattgcagaagaagaaaagtatgcgatttaggacgaattcagggcggcagggtttcccatctaacaaaggcccgagtatgtctacaagtcaggttgctactgaaatgctacgaatgctctgttcacttgtctgcgacacccgtgacctggcgctaataaagaaattcgccagaaccgttacaaataaggtacgtggacatggggttagacttcatattatctaactatttcatagtggcttctctatctcatgtgtgaagacgagccagaaatcgttgttctagcaagtaggatcctcgctaaggtgcttgtgaccaacggcagcacttataacaagaggtttaaggaaaagaataatgggtatattatcatgcgaggctgcttgagacgatggtggaacattcctatcttatggcccctttgcttctcggtcctgtttggtatagatctcggtacaacgatggctgacagactattcgacaatgcttcactttgccgagtattaatggcgaatgaagtcaaagtttgttttcctgagatatttcccgtcattgcggacatgatgcgaagtgctctgaggaagtctgtcatggcccatgggagtctgcacggtcttgacctagaccaaactgctcggcccctcatggctcaccccgtacccgtcgatacaaatgatcaggaagcgttacttcttgcaacggttattgaattccttgccggcttgcacctgaaatcagagggctttcgtgagttcgcgtccaaatccgagtacgcagaagacgtgctttctgtccttttccctgttgtcgtcggttcggactctgtcagtgcagacatagaattatcttaccgagtgagtggcctcggcctcgatgatcataactccagagccagccctcctcaatcgcggaacacaaatgagctgcacacaacgaccgttgagcactccgggacccgcgatgagactagctcatctttaccccgatcgtcctccttcatcctcgtatcacaacatggagggaaacaatcacgttctcccttgcaaataaagcattcgtttgctctagggagtatggatattgaagggctcacagagcatccatttctttcgcgtattctatgcctaatattgtcaatcttctcagagcaactcttggagcggaaagacttctctgggttgggtcttttttccaagacgccgccgggctttctggaacaccaagcatactttaactcttgggtgttaacaaaactgcttcaaatgttgaaggacgtcgcgttctcaaagactgagttgttagcagagccacgcgttattaccaacttgggacgtttcacaactcatttagcggaagcgacattagaaggatggtttatcgacggggcgatggcgactctcgaattttcgggaacaattctggaatatcttcaacggccggatgtctcgtccctgaagagcataaggctatgtagccagattatcgctacaatccgctcaaacttattccgcgttgttctagttaagctttccgaggttcaaggtccggatgcgttgtcctttctcaactgcctgtcctactggcaagtggtactccttcaggcaggcgagtcccaagcggacaatttgcaactgctgtgctatcttctttacaccaagttgatagatgagaacaaggacgtccgtgtggctgctgcgggtcttttccgagttatcatggttcagaagccagccgaactattcgtgatactgaaccatgcagcagttccccttcaagaacgtctttctgggggcttcgaagcccttgcaaacatggatgacgctgccttcttggaatggatagacaaccacgcaggcgatttgcat

SEQ ID NO: 10078 - DNA, 1264 bp, Emericella nidulans
agctcgcgaccgcttccatggacacgccggtcattgatgtgattcatatactggtccagcggagtatatctagtgtgcccattgtgaactcagaaggtgtgcaatatttttatgaagatacgggtcgcccaactaactgcggcttaggtgtcgtatacaacgttttcgaatcggtagatgttgttactctaatcaaaggcggggtatatgacgatttgagccttacagtaggcgaagcattgaagaagcggtccccggtatgaattgaagactaggaccctgatgtcttttgctgaccatgctcgcaggatttccctggaatctatacctgctctttgaacgacggtttagacactatttttgatacaattcgcaagtcccgcgtgcatcgactggttgtagtagacgacaatttccgattaaaaggcgttcttacactgagcgacattttacagtatatcctgctagaaggcgaaggtgatgaatgttaatgatctagggcttctccaggtcttcacttaacgcaacttgcatcggaacggcgttttttgttttctgtacaggtcagtccgtcaacggcgaatggctggttcattcgggaagttcccatattcgggcctgctgctcgaagactctgcttcttgcctctttgctgaggatctatgtccagccacagtctagcatcagcgtttggcttgcaacaatagatttcagtcttttatacgaccattttatgatgatttacgtctgtgctttataattctacaaagtttctggtattcaaaatcgtgtgcggtaggcggttgtgtatttagggttgtactgtacgtctggagatgataactttatcagggtgtcgcaacgaggcgttcggtatctagctgaaccccaaaccagttagaagccctggtcgtgccttctcagaatgacacaagcacaggaaaagggaaggtgcgatggctacagcccgtgccgagctcaattcacgatgctgcggattgatgtcgttacgagtactggaaagcctgccgataaagcaatcgttatttctacgctcgtctttacttttagattggatagcaggatgggccgtctcagcatattttcctggtcatcggtgaaaggaagcaactcgggttccgacatcagtcgatcctggactttgatgagtcgacctcaatcgacgacaacccagcctggacaactgaacatagactcggcaggagatactgatcctgacaggctgaaggaatccaaaacaggg

SEQ ID NO: 10079 - DNA, 580 bp, Emericella nidulans
  unsure (1)..(580): unsure at all n locations
taatacttgcggaacaatcttcgagattctgctcgcagcgtgttgaaatgtgcaagtgcatttctataatgatataaagttaaagattcacggccgtgtacatatcatgtcatatatccaaaagaaacaccatacccagtccgtcccaacgccaagatacaaccccaaacctatgcgaacccgtctagaagtaatgaaggttctcctctttccatcccaacgacagnaggatcttctttgaagccttctccatcgcctcaggcccgcaaaccaaaaccatggtctctctatccggtgtcccggcatgctgcctaatcaattcttcatcaatacgtcccctccgcccagtccaactttcactccccttcgtcagtgtatgcacaattttgcacttctctttcttcccggccaaagcctcgaattcgtctagctcgttcttcagcanaatgtcttcctctagccggtttccatcaagcatgacacatttcgttcatcttgtcatctgcatacagccctaagacttgaagacagcgtgtgcccgtccngccagacatgacgaagactgacaactttctttcgt

SEQ ID NO: 10080 - DNA, 942 bp, Emericella nidulans
  unsure (1)..(942): unsure at all n locations
tggattgcgattctcatcggtgagagagtctgaagttaggctcgagctggagctgctggactgtgctccaggcaatgggacccatggtttctccctctctatagtcggctcaagtacggctgaattctcgcctgctccaccgctgcagcatttatatggctccccgctctcagcctcttcgacttgttggttttccggttcacctgtctcacatttatcgctctattgggtcaacaagacgatgggctcgagttggtacctttgtgccttggtgcctgaggtgtcaacaaatgcctgtatcagttatcaactggttgatttccaggtcccaactggccagagcagtatacaacgcgaaccagtgtcaggttgaattgaaagcagaatgccgatcttcttccttccgcccggacgagatggaagcagcccgtcatccaacggagaattatcttccgtgagatcgtcttcccagaaccatgatggaaattatccgtcgagcttgtttccccgagccagttgggcttgagtacgtatatatggctacatcaggaacgtggagatgggcaagcatcccttcgncggagcccggtagtttagccttgaagaaatcgaaatagatataaaaccacctaagcaatgctcgccgcaactttcatcctagctctcatgaatggcaattcgctaaccagcgccctccctttcaaaccaattacgcggagtagacatggctttgactgggattcgacccggaatctgtcagtattgaatccatcatttgtgatctgacacggttgatgggaaaactacaaatatcgaattgtagggctgacaatatttacaacccacagtaaagcaattggcgactcgtatacattcatccaaggaacccatgggtacccaagctacagcattaaggagacgagtgcacatagcgtacgccct

SEQ ID NO: 10081 - DNA, 874 bp, Emericella nidulans
atctctagcggccaggcagacgtcgagctagtcactagtcgcaactgtgccactgccccagtctacacaatcagacatggtcgcgctcaacatgtcggttgccaaattcagcgcccagttcagtgccgacggagtgctcttcctcagtgtctgccctggtatggtgaatacgggactttgtgagcagtgtacgtttgtctgtcttgctcaccatctggcgttgcttcccaagggtctgggatcaaagtgctaacttctctttttctttccaatagtgaccgaagaacagttcgccggggcggcggcaatgctgaagaagtttcaggagtactcgcctacctttaacggaccgagacagcctgctgattcggtgaaggacgtgcttgatgttatccataatgcaactgttgagaagaatgcgggcgggttcttatcccacaagggcgaccgcaaatggctttgaggctttgcgtaactcacaggggttttatgagagtcatcaagtcgataacgaggtatattgggaggcaagtctggtgtcagcagccacgatgtttcaggcccaatctgcctgtattttaggattctgaccatgatgagagtgtcgcttgttagtagaagtggtagcagaacggccatcgctttgcgattgcctggatctacattgaaagcaatatactggacttttgttgactctcctgcctagggtcttttctcttctatagctactccctgatatagtcgcgaccgcgcagttctcgaggttatcaggcgctgcttatgcacgctatacaggcatcatcactcggtttcggtctccagagtgccgggagttaagaagccacgtgctggcttgtggacatctaccctaagt

SEQ ID NO: 10082 - DNA, 124 bp, Emericella nidulans
agggggcgtcttgcgaagcgaccaaacagttgcagccttgtctgtgaatactagtcgaggagcctctcacgataccgccaaagcgaattaacctttatggtacgtgtggtcatgacgaactcgg

SEQ ID NO: 10083 - DNA, 175 bp, Emericella nidulans
gagaatctcgatagcacaagggcagcatagaaactctaaaaccagtgtatcaaaccggacgatcagctgcttcgtgagtaatcaagaagagtcatcctgactgcagccagggaactgcatcgtcgcaacgagaagatcgaatgagcagatgtaagtcatcatacgtattggatgc

SEQ ID NO: 10084 - DNA, 709 bp, Emericella nidulans
  unsure (1)..(709): unsure at all n locations
gtcatcagcaatcaggttagtttagcctagcgattcaacgtggacgcgaaaagcataccttcaatgattccctttctcgccttctcttgtgctatggcgtcaacgtgtgttagtcatagttaccactagccgcactgtcaggaagggagtaggtgataatataccgacttgttggaggcgtcgcgacactgcaggcataactgcgtgggtgcgcctcgcttgtcacggaagtggtcctcggtccaggatctcgaacacttcttacaggtcttcgtggggataggggtgctggggatattcctttcactggccttgggtttcaagccggccatggtgaaggctatgaaggattgaagctctgagtttggaagtagatactggtggctcaatgaaaatgccaaaggatagaagatgagtgaaagggttgtgaaaggaagagagaaggtgttcagtgcaggagttcatgaaaggatttccttcagcgtaacatcttgagcgtaacatcatcgctatggtagtgcttagtcggcattgaaggcgcaacttcatcatgtagctaaaaagtctcaccagattattacgcagcaccaaggcagaacctgaatcacagcagttaagcaagagtcatggatggcaacttataatcgatggtttttcggcttanccaagctgaaggtagatggctccatttttttttggggccgggggg

SEQ ID NO: 10085 - DNA, 684 bp, Emericella nidulans
aaaaaataaataaataaataaataaatatataaaaataaaaataaaaaaaaaaaaaactgctgtctagcgtcaggggcgcagtgaccccccgcttaaatagttgcgtgcgtgcgatttgagcgaaggctcttgcggtatctagctaggcagcagtcacacgctctcgtgctaaatcaaaatgcgtctattgtccaaagggtatcgtatatatatcacacacatgatatccggtatcaaactcctctcccctaaccctcctggttctggttctgcttaatcccattcctcctcctccacgcccaaacccccttatcgacctcgtccctcgtcatcccatccctaacaagcaaaaaagtcacacccaactccgtctcaacattgcgattacgcgcctcatcatcaaagaacaacatatcctcatacgcaatcccactcgcctggtggatccgcgaaaagtgctgcgtcttcgtggccgggaagatctggatgtaatcaaagtagtctagagctcgaaccgtccgtgctttattcgcagacgggttgtcgctaaagttgggtattatgtgcagctgcttcagcatatcgcgcgcaagatcgggggcgtgcgttcgcgacgccagcgctagtggaatcgagcgagatttgcagctggttaatatggaattcacatgtggatagaaggc

SEQ ID NO: 10086 - DNA, 137 bp, Emericella nidulans
agacgccatagcgacttcccgtcctggtcttgaacccgggcccagagtttgtcgaaggggactcggccagctcgtccactcaggtcgataacctcgtaacgctgtgaaccgaatctagaaagcctcaagtcaacgga

SEQ ID NO: 10087 - DNA, 782 bp, Emericella nidulans
ttcatgaatcagtgctgatcctggagcaggaagtggatcgactccgacagctgtacactggttcctgcgttgctgggagcgttcattgtgcgctcttgcggctgcttcggctctgatgaaaccctggcctgttttatagcaggtaacatgctgaattgggatgggatgtacaatgcggaactccagacacgacacgactcgtttaattcgtcactggagaccatcttgaaccatataacctttggataccttggtacggtcatgccctgggaagagttccataggcctgaaaccaccggcataactatatcacgtcttttagggctgggaatgatgattctagtctttcgccgtatccccgcgataatggccggataccggtttatgcctgagatttgcagcaattggaaggaggctttgttcatggggcattttggcccaataggtgagttttacctatgtactgttctgccatatactgactactgaccattggaggggttggggctattgcgtatgtagagtatgcccgacgactatttccagacccaggagaaagtgacgaagaaattaacagcctaaccgccgctatgaggccaggtaagccaccacactaaggctgcggtatgcttattttgacggtcaaacagtggtatactggctagttctagtttccattatagtgcatggcctgtccgtcccattctctacgtcatctacaaggcttcgagggttccgagttcacgaccacctgtggaagtagtctcttaccaagaatgacc

SEQ ID NO: 10088 - DNA, 1490 bp, Emericella nidulans
ccccgtagggacaactctccccagaaagctccttacggcttatatgccgaaaagctctctgggaccgctttcactgctccccggcacgagaacaaacagacttgggtctaccgtatccttcccgccgcagcgcacgagaacttcgttgaagaggatgcgagctcttaccacacgctctcagatgccaaaaagcttcagcatatccccaaccagctacggtgggatccattcgatctggacgagaccgtcgactgggttcatgggttgcaccttgtggctggttctggagaccctaccgtaaaacaaggcctgggcatcttgctgtatgcggcggggaaagatatgggaaaggaagctttctactccgcggatggcgacttcctgatcgtagcacagcatggcgtgctcgatattcagactgagcttggccgcttgctggttcggccgaacgagatttgcgtgattcctcgtggtgtaaggtttgtactacgcgctgacaaaccatatttgagatcatgagcttacggaataagataccgtgttaccctacccgacggtcctgtgagaggctacatttgcgagctctaccagggccactatcagctacccgaattaggacctattggatccaacggtcttgcgaatgcacgagactttcaagcaccagtggctgcctttgacgacgaggaaggaccgacggaataccgactgtacagcaagttcaacaaccacctcttctccgcgcgccaggatcacaccccttttgacattgtcgcatggcatggcaactactacccctacaaatatgaccttggccgcttcaacaccatgggctccgtatcattcgaccaccctgacccctccatctacacggtgctcaccggcccgtccgatcatgtgggcactgctattgctgactttgttatttttccgccgcgctggttggttgcggagaaaactttccggcctccctggtatcaccgcaatactatgtcagaattcatgggtttgatcaccggaaactatgatgcgaagactggtggcggcttccaacctgctggcgcgagtctgcacaacatcatgagtgcacatgggccggacatgcatgcattcgagggagcaagcaacgcggacctgaaacctacgaagattggggatggcagcatggctttcatgtttgaaaggtaggtcaacctgtcttttttccaagttcgaaatactaactttgcatagctccctcatggttggcgtgtcggagtggggtcttaagacatgccagaaggtgcaggaggagtataacgaacatagctggcagcccttgaagaggcacttcaaggatccaaggaaggcccagtgattctgagtaacttttatcttggagaaaaactgtgatataccagcatgaattactgaagcgctttgtaataggtttaaaacattatttttgacaagttcaaagccaaacatatcctggaagtagccacattagg

SEQ ID NO: 10089 - DNA, 1927 bp, Emericella nidulans
gcctttcttcagctgctcaagcgcatcgggggctttgaaacagaacggggtctaggtcagtaacgggccagccaaagtgaagcgtaaagggcggcgggtatcgcttacgaacaccaggcattctgctggggtatgtaagtaatactgaggcgatgagaggggtaggtatcgaaacaagacagcaatgacaaagaagacggatcctggaatgtgagccggacggaacgcagcgtctcgaccattttaaacaggcccagctctctccacgtgatgcagggcacggtccttgatctgctgcgtccctattaatttgccgatgattgtctccttttctctgccgctctgctctccacgttggtgagcctccgcttaccgactccacacctcataggaccgtgtcatttctctagcgctgaattgagcgtgagaagacgaaagctactacattgttggtacagtagtctaactttgctctgactctgtgtatgactagacctattctgggggcggccagctacaattggcgtcccactcgttgaatatacctgactcccctcatcattccccggcggatggcgtcgatcttggcttgtttacccatttcaattgtggctgtgctcatccttcatcatccaggcggtgaatggcttcgattgttttgtcactcggacgcaagcaaagaagcaagttcgtcgacatgtcgtgaaggaggattcacttctcattatcatgtttcaaacagaaccgcagaccggaaacatcctgctcatcattggacccggaggtgcatacgggcgtcagagaaccgcccgcttactcctgagacttggctaacgacggctgctggcctaaaggccctaggcttatgcgtgtggactcctgcggagttatagttcgtattaatgcccaccatagtatgaatgccagcttcaagacgacaggaacagtcagtgtacatcccgttgtcgggctcagacttcaaagcttaatgcaatagaggagcgctataatgtcagcatgatactgatgctctcgattccttcttcgactatcgtgggtaaggtcttgaatcacttgttctgcacctgaaagccaccagaaagttttcttttatggtctgacccagctgctcgaattataagcctctagccaaattcatgaaaaaagccccttcaaagtaccagcgaggttgctttccggggagattactttccggcgagattgctttcctgggtcgcatctttctcacatcccctggcaatgttgccatagttcagaagcggcccaatttccgatactggagaccatacgcgcccatggtttgtgcctgttcttgtgaaaatgccttgccgcctataactccctgggttgtgacattgggagtgcgtacaagtttaaccctccatatgtgcctttgaatgtggcttggaaatgaaagatttgagaagggaaatgcggaaatcagtattctgagtatagctaatttagttaacccaattagttgagaagttaccccaatgtggctgaataatcagtggaccgtctccgcagtccttcgtggacccctcacgtcctgtccgctgtcatcaacttgatactttgaccactattctcaatttgacggacatgagcttgagccagtcttcgccgccgacccaggcagcaaccgccagagacggatcgatatcagagcagactcctcttctggctggccagtcccagccgccggctgaggaggagccaagcaccaagcgactgcttctggttctctgcggcatctgggtgggagtcttccttgcagctcttggtgtggcctcacttgcttatcgtgcttgttaatcagtactaacattggtctcttagatattacgattgtcgctaccctgacaggaccgatatcttctgcggtcatctctaatacattatt

SEQ ID NO: 10090 - DNA, 1333 bp, Emericella nidulans
tacagtctggacactaagcacaactcgtaacccgacgggctgcactgatggatcactggatccctacgggccggccctaagtgtaccacagaccttgaggacaagttttcaaccaccttcgaagatggaactatgacatgcttgggtcacaatatcagttgccagtcaggacgccgtactttccctcggtctctcctccagtcacagcgacgagcgctcagcttccaccttgtacgggccgtcgggagggtcacactagaccgggaatgattggctctgccaggctgaaaacgaagacggccgatacagtcgttcatctgatcactgcccctcttttcatccaaaacaggagactctcttctggcacagcgtaggctgggcgttttggctcggtatcggaaattacccgtaaaacgaaaagagaggcaaaactaaacgatcatgagatggtgttggatgatgcgccctgaccgaacgcacagacgggcttccctttgggcagcatcctcggtcctcagtctcacgcagaaacgcacgaacggccgagatagggcaggttcaggtacacttgatcatcaggaaggattgactgtttgaggacagggagagagcggaataccaatcatccggggatgtgtgtgatggaggctccgagtcgggctgtgagttggggaaggatgcccgttgctggattgtcagaaaaggccgcccgtgcgtgcgagacgggaagtgttgcagacgaccgatgaggacagtgcttgataggctacggctttgtttacagccggagtggactctgtatggatcagcaagggtccacggttctcagtacatactagactagtattatgatattatctaaggcagcgacttctgtttgggattttcgtctgatgcttattcatccgattctgccctgatgccaaactgcccccagctgcacgtctgcccaacgaagcatccaatagccagagcccgttaagctcgggagccctcagaaatcgtcgcctcgttcttgactttgcgctgaccgccgaatgtctgaatcggtcaatccagagtctctcaggctgcccagtggctgctctacctttgatttgaccttttagcctttgctcctcttggaagttgattgaatgttatcttgttctaatttttctgactttctgatttgatttgaatttcctggcgagcgaattcaggtacacaactctctgccttcttcagaacgcaataaggtagttatattcactttcccctcccactccatcacctgctctcctctcgacatcgctctgcggtatcagactctgaacatattctctgcaacttc

SEQ ID NO: 10091 - DNA, 158 bp, Emericella nidulans
gccgcccgtgtgctcttccgatctcgctctcttccccgcgccgcttgttttgttgaatggatggtgcatcggcgtgcttctctctcgactttggtctcgtgtttcctgctccctgaggcgtcctctgcattcattgctggctgtttacagccctccgc

SEQ ID NO: 10092 - DNA, 165 bp, Emericella nidulans
acgggcaggattagcgcggcagttttccgtggtcgcgtagcaaggcggcagttttctcgataccttcatccagggtgatgaccggctgataacctagctcagcctgcgcacgcgtagtatccagcgtgaaggcaatgcgcaagttggcgacgccgtagtgtgtca

SEQ ID NO: 10093 - DNA, 1274 bp, Emericella nidulans
accccaaaacgcctatcttgactccgacagagcgtcctatacctccgacaacgggacctacggcttttcatcaatcatcagtaagtcactttctagcaaagtaggtagaatacacgaattctgaatgagaccaatattatggttgtccaccttcgggcatttggccaattcctcaggccgacaagatcatctggcccatccaaacgaccaaatggctattttcgccgttaagactggataatattgttcatccgtcaaatcccggaaatggcagaacttgcacttccattaacttggtagtatctttattggggaagttggcgggagtcggcctcagtcttggatacgggcctgagttagacagcagcaggatactccaggaggcctcatggcttaaggatgaacttatcagcttcagatatctagttgacagatatgtatgagaactgtcggagctcggagtctaactaacctgaactagttggcgacacccatggccttcggagctcggggctcagctagatccattacggcacctatcggagtcggggttccatcactctagcggtggaattgtttatgtatgttgttttgcaaatacgcctgaaaagatgacatatctgatctcacgctatgggaatctattcatgatatgtcctgaaatataaagaaacccagaattgtgtctttttgagctctgaattgaccatcctctatcatgtcgacctcaaccctacaacagaggcatccgttataacaggttgcactccactattatcagcgtctatccctgctacagtggccacgaaaactaacaataatctgagaagggtagcggactctttgccgctctcagtgcggcttattgcagccattgagctgtgcgaaagatttgcttacttcggaattcttaggccaatgcagaattacatccaggattaaagagacgatcttttacgcccctgggaatcggtatgcacccatttacgagagattcttatgatgaactgacataactagggcttgggcagagttgcgctacgacgatctccctgggatttatgatctggtgtttcattggtccaacaataggcaataggcactgttgctgcagaacattgatttgaagggttgcggacaataatatgttcctccatgatttacacctgtggattggcgatcttgttcccgtcctcatggcccgttgcccaggattggggcgtgtccatgactggattgctctgtctttgttcttgagaggcattgatactggt

SEQ ID NO: 10094 - DNA, 111 bp, Emericella nidulans
cggccaattttaaaacgaatacagcgaaagagcaagatatagctagagggagaacttcaacctagaaacagcagcactgaaaaaatcacgatctaatttagcttgttcggg

SEQ ID NO: 10095 - DNA, 267 bp, Emericella nidulans
gcgcgcgggtctgctaaaaaaaacaggcggccagagtcccgcctccgcgaggccacgcccccgcccgcctccgcgaggccacgcccagtccgcgccttcagtggcctccccgcgagaccgcgcccaggccacgcctccattgaacactccgtcaggcctcgcccaggccacacctccattgccctctccaccaggccacgcccatgtcacgccccattgatctcccctgagaccacgcccagaccacgcctccattgccctctccgt

SEQ ID NO: 10096 - DNA, 1728 bp, Emericella nidulans
gcgccacgagcaggagattaagtatctggagcggcaattggcccgccagcgagcggagagcatgaggtccgcattgtaaaagacgaggaagatcgctatgaggacgatatcagcgataggctacggcggctccagaggttcgaggagcaggaacgtctagaggatgagaagcgcaaggccgagcgtcgctataggctgcagaggctcgagcaggcggagcgtgaagccgcggaacaggaagaggtgcgcaagaaactgcgccatgagcggctggtggagttgcagaagaagattgaggaggaggaagagcgtgaacgcatcaagaaggagatccgggatgaggaggcgaggattgcccttgctgagcaggagaaaaaggctaaggaggcgcggatgaaggctgccgctgttgaggagtggaagcttgcgcaggagcgggctgcgattgcggagcgggaggctgcggagaagcgcgataaggagttcaaggagcgcctacggctcgagttcggtatgacacccgaggagtttgcggagtttatgaagaaaaagaatcagaaggaagagaagaaagaagagaagaaggaggaaaagaaagagaagggaaaggaggagaagaagaaggaagagaagaaggacgagaggaaggacgagctcattgagcaacgcaagtctccttggatcaaggtatgctgtcctgaacaccatcataactctaccctcctctaaccgtgcaataggtccatcgcaaatatctcctcccagaaaccctagacacatatagactcccctggtcatgggatgatgtgagttttatacatctatatcagcactacccacctgcacaatcagactgaccgttcattctactccaggttgacggcaactatctcatcattaagacgtggatcagcgaagacctgcaggacgagctcttccagcacacccgccgcatccgcgagggtaaaatccttactcagacctccagcactctgactgagctccgcgtcaacgatcgaaacaaggataagatgtacctcgttagaaaaaagagtcccagtcggaggtcttggatttttacctgattgcgctcatccgatgttgccacctattcaagctacatgtcatggctaagattggatttgatggactggaagctttgttttgttctgttctgatttggttcttcactcggcttactgatctttatatcctttgcttttatttgcttttttcttgtcattcactggcccttcagttacgaatctcggagggggtcgagtacttcggttgattgtctgcagtgcttgtcatagttgcgatttgaatttgctatctacgatacagacatgatgaaacgattttgacgatagatgctcatgtttccgtccagaccgcatcgcatcagatatccacctatagtacataccaaaatacattataccataccccacgtcacacagatgcagtagatagtgccgttagctctacaatctggcctcggcctcatccctcgcccacttcatctccgccctcagaatcaactcctcatacaccgtccaggcaagcgccgaactgagcgccttccgtccaatcctcagccctaaccccccaaacagactacgtacaccgtcttccctgaccatcaaccgcacagcacgtatcatgttcccgtacttccccggcataagctgcaaccgcgtcttaaccgcatcgaaacggttcgtg

SEQ ID NO: 10097 - DNA, 1020 bp, Emericella nidulans
aaagggccgataccaggcaataagcgagttgcccgccgattcgacttccagtcgacgttaagctgaatgtctgccattgggcaagactgagcgagttaataatattagaaaagaagggtaaatcctagatgaagaggactcaggagccctgcaaaagagcaccaagtttgggaagcaaacacaaaaaaaatggaaaggaatagaaaagaaactggtagggtatcgagcagtcttctttatacgctggtctgctaattggaagtatcattatgggccatggcagagccaataataagagagccgtgtcgtgacaatatctccatgggggtggctgaccctgcgaggggaaggtccagcatccccaactttcagccaacatggggcccctccatccagtcatgatgcccgccacctgccaaggcagcctggagagttgccgtggtcgtactcgggcatgatccgagcatcggatggagaaacccatcccgaagatacaccggcgacccgtgctagcccgatagcggacagcaaaccaggccgggtctggctcattccacacgggcaacgcagcgcaaaacaacccccacggggcgccgagcccagaaaactttactcttaatgctttccagactctgcccatcgagtcattcacggtgggcttggcggcccgttggggagatcggccagcaacggctgcaatgctcgtacatcggcttcccgtcgggatgtcgtcttgacctcgtgctcttcctctcccgagtctattcaacgtcaaaaccggccagtctctgtaatagcttcacaagttgctgttcgaattttcttcgaaggtgctgccaagaatgggcggggtatgtgtccactgcccactgtctcagagtatggtacgcccgctgctcatttgcaggtttccccgaaaagtgaccgggtgaggtatatctggacccctggtatccacccactgaagcgtgaatcactgatcgtctgttttcttaactttatagtccgcttcaggcttgg

SEQ ID NO: 10098 - DNA, 149 bp, Emericella nidulans
ccatctctaaacttcacacatgagccgtcagatcaagtcatgcaaatagtgacggatgactccagtcgactgctcgatacacgatcctctacgtccacaattaaactattccatttggagtctgagcggtccgttagctctgccataac

SEQ ID NO: 10099 - DNA, 116 bp, Emericella nidulans
tagagattgtcattgaccttctcgttggtagtggtagtagggtgatcgacacgtggaggagacgtgctgttgagcgagatgccaactagtggcgttggtatgatctggataaatat

SEQ ID NO: 10100 - DNA, 1384 bp, Emericella nidulans
cctgacgctggatcgctacgctacagaataagaagagtcgctgctcgcaaggcagatcgtgtacgccgtgtgacaagcttgagcgcattactgcgagaagtttatgttcgagagaaggacgttgtttcagagactgatgtggtgggggaaggaggggtagaagctggagcggcactgtatgggcgtgaaggggctggacccgttagtcagtgtctctcgagggttttagcgctcttgggaaagatagtacctgagtgattctactttgttgatctttcacaattccaatttcctagtttgttgctggcatttggctactaggcaccctctaccccgataggctaggatatcctgatcccggtgttgagcggaaacctcccggccccgatatgcagactcgtcgggagatttcaagcaaacccagagagcaattacaaatcagtcgggaccagaaacagacgtgctcatagtgatagatagacatatcaagccatgaataggtgttttgaggttaccacaattgacatcctgatcatgacaatggcagccctcgacgtcttcaacgttccatactctgtgcctctcttaggaagcaccgtcgttatactgatcggcttcattgccatcaaagctctacgtgttggttcacgcccgaagggctgccacctggaccgccgaccgagttcatctggggcaatacgaaacaggtacattcttcaagggtgtgcgagggtgcagatttacggccaaataactaacgccggcagattgacctgttttacccgcaatatcagtacaggaagtgggcgcacgaatatgggcccgtctatacagtcatgctaggcgatacggcgcacgtcgttgtcagcgggctgcgcgacgtgagagacattttcatcaagcagggagcaagttcccagaatcgtccgccctctcgattccagttgctcatgcgcgacggcttcttccccggcttaaacaacggagagaagtggcgacagtcgcgcagaatgtggcaggccgtgctcaacaacagtgcggcgaaacagtacttaccgtatcaagagctagagactcgccagctcctttttgatcttctcagggcgccgacggagtggatgagaccacattgagcgctacagtaacagtgtggccatgacaatggttaatggcaggagaattattgatgccgcggacccccgtgtgaaggagaccattcaggatctgtatgacttggccgagacaggcgtgcgcggttgatttctggattcctggccattcttgtggaagctgccggaatggatgttccctgtttgcaggcaggcccgcaagatcgccgcaaagcatcgtgagtacatctggaggaattattccgatgttgcaa

SEQ ID NO: 10101 - DNA, 1330 bp, Emericella nidulans
accggctccgttgatagtccccaacgcggttttgtgcctgtgaagatgctctcgggcgacatatctagcgaaacgcaacatgatgaagagggcgagggcgattcagggtcgggcgacagccttctgagtctggatatcaagactcatgttcgccgtgataacatatacaaagtcgtcctagccgataaacccacgtcgcaaaatacagtcgctctgcatcaagatgggctcgactactcgtacttttcgacagtgaacattgggaccccggggcagccggtatggatgatgttggatacgggaggtgcgaatacctgggtgtttggggcagactgcacgtctgaaccctgtcagatgcataatacctttggcgataattcctcatcgactgtgaaaacgacgagtgatactttcatggtgggatacgggtcgggtaaagtcagcgggaatcttgttacggatcgcctcaagattgctgatatcgatgtacaaatgacctttgggttggcgactaatgcgacggacgactttcgggattaccccatagacggaattctagggcttggtcggtccaatgatacttccatgggcggcaggcgtgcgttcatggacctggtcacgcaagagggggatcttgattccaacattgttggtttccacatgtcccgcaactcggacggagaaagaaatgggactgtcacgtttggtggtgttgataagaccaagttcgagggtgacatctcgtacactaacgttgttgagtcaagcatccattggagtattcctttggatgacgcgagcgtgaatggcgaatcctgcgggttcatgggcaagacagccatcatcgacacagggacctcgtactcactgtttccaccggacgatgcaaagaccatacattcactcattccaggctcgaagcaactttcggacgagaactaccttgtcccatgcgactcgacagctaaagtgcaattcaccttttccggtgtgagctacaccatgtctccaaaggattatattggagcaaacctggaatccggtgacggctgtgtctctaccattattgcccaggccatatttggtgacgatgtcatgatactcggcgacacctttctcaaaaacgtatacagtgtttttgactttgataatgaccgcatcggctttgcgcacgttcctggatctgattcacctaccacgagcacaacgacggcgacagttgcgacgcccacagacacattctctactgagtccgactcggactccactgattcatcaacttccacttctacggaccctaccgggacgtctgctgagtttctggcacggg

SEQ ID NO: 10102 - DNA, 1265 bp, Emericella nidulans
ttatcgacggactgggtttggacttggggattttcccgcgcagcgcaggccggcgtcgcagggttgttttacgtgcgtgggaccgagtcggcgtacagtattggttgcgtgcggggagcgaacctggacgctatctagactacagactctagactctggtcattctagactaatacactatgtcctcataggctaatgagacatctcaacccattcgtactcgtataaagatttatcacccgcttagcatagtgttccaggtctgatgctgagacaccttgtaacaacttctctagcctccagccgctgcccagctaattgcagaactcacacagtccagagtccaaactttagaaatagctagtatacaatcacatagcctggactcagtaatacaatacatcttatgtttgagccaaggtgctgtctggagtacacagtgcaggcctaatccggaaatcagtcactcattctaagttaccctgttctactaaggacagaggtggcgacatacgtctccttgcccgctatagagctaatttcagagaagcggtggtctccaaagctgtacataagcagcggctgttggataatcccctggtcgtcagaaatatatggtctactctctcgcaaacaacagggtcggttgctaataagaatgccgatagtggcgctgttgtggaagagtagagaaacgaaacctctttcaaaaaaaaaaaaaaattctcaacctcctattcaattaatagattcattcaccgcgaggcgtacatgtctattgcttttggctcttagtcttgtgttatgttctgcatatagaaatatagatatagatcggtgagaatcacgtgaaactgccttgcgttgtcgattctaaccacttcctttataccatgactgaaatctttaacaagcttcaaccagacccaatgttaaaccattgtccagaagcgttgcaatagtctaggttcatgggagagcaagcgaaggacttgaggcattgaaaggcttcctagagacaaaatactccggtctcccacaagctcaatatatggaggagccaacgatgaagaatatcccggcgcagcttcacaagcgcttgaatgggacggggctgttgaggccgtacccgtggtctgagagtggtagtgaaagtgagacccaggttgggagtgactttggttctcgaaatgagtctggatctaccgccagggatgcgcactttccgtgatatggacgaccagcgccaacgccagccggtcacc

SEQ ID NO: 10103 - DNA, 1498 bp, Emericella nidulans
ggaacagcagtagcatgctagtctcatagtaaagacgactcaattacacggaggacgagatctgaaccggtttcgtcagttaagggcataggcaggagatggacgagagcatattggaatagaaaggatatcaataccggtgcctatatatagtagaagcaggttagtacgatatatgtggtatataggtagttcaaaataggccagaaattccatgtagataatctagattggaagctgcctttatttgaagtccatctctatgataatcaacaatatgaaatccggaagtgttgataaaaagcaattggtgaaaccatgatctaccgatgccagaatggtaatattatctgaactagccgtagatcacgatgtatggtcgcccttgacattctaataggttggcggactgttgaagccatcataacagggtaatcggcagatgtaacactacagaataatcaaggacgcttgtttaccagcacctagtcctggtcttatcttagaacaagccaatattgtcaacgactttcctctacccttctataaaaagctttcctcttttgatctaagaatgtccttgagacatctcgaaactgacccaaaggaggaattcttggcttatttgacttaagtagaaataaggcggcgatgcaaacatcctcgggtatccaactatataaatattgtattaaacataagatttctttggtgtaagggacaataatcttgctctaagctatatattctgctctttgcacaagaacagttcttcgacaaggataaaagtgtatttaggtgtataggtgataacagagactatgttaagcaagctctgcttgtgcaaggcctctgattagccaaattctgaaaaggatatgttgtacaaggaaactatctcactcagcacttaatactgtataaggtcgataaataaaagacaagactatgtcaaggacactataaaacactacattatgtctaggttctctagccagaaccaagcgatggctattagaaaagactaatattaagacttgaatccgccctgaaaggattgcttcgaattcagtttacatggtggtggtgaaggcctttatacggccatcagcgctattggttgtatcttccaagcaaacctttcagatccggctcagtggcccagatcatagtaggaaacaactgctagttatgcttatgggtcaaacttgaatgacggaatgatgccgacttcctaacacatcgcaaacattgtccatagaggcgagtcttactgatgactctggcgcgataacgtcacctactagcatgagtcatgactctcgagactagcggtagagctgaacgaacacgtatttgaactgctctatgatcgtacaatattctatttgattgtctataaacgctctcaggaaaggaaatgagaaacggggacaactcaaccggcgttagggcgggataggccgacttgccaggccgggctagcgggaaaaatcga

SEQ ID NO: 10104 - DNA, 1366 bp, Emericella nidulans
aataagacactttccaatctcccagatggccttctcaattccttccggggtgccctgcacttcaacaatgcgttcggtggactgaggcagcatctccttctgagcgaccatacgcacacccgaagcgtcctgaatatgcttgattttcaatccctgccgtccgataatggtgcccatttggttatgagaaatcaacagtcgaatagctaaggaacgtaagcaggcgtccatgaccaagacaaagtctgtgagtacataatgggtaagacttacgatgggtgccgttgttggaaacaattccacccatgcccatctgcggggctccttccaacagtcccttggcgactagagcataagctctagcagtaccactcagagcaccagtcacggtaaggacgcgatcatgaacgccgggaaccaccttgcttacgccggccttaacgccagtctcatcgcgcaaatcggcgacgtttttacccgccttgccgatgatgacgcccgcttccttggaagaaacgatggcgcgaagagtcagcatggactgcgcatactcttcttcggtcttaggagcgacttccaaatcaccctcgtcaccaacgttgacggcatcagtcatcgtctcgtcggcgatgggggtctcgtggatgtcggtggtgtccatgttctcaagttttaaaggtgtcgtagatgaggagacaggtaggatatgacttaagctgttccaatggagtcagtaaggaagctttgtacacagccagccgtttgttccttgcacaagtgtcaaacggaaatggcgcccgaggagttttgatccgttactacgccgacgcggcaaagaatggtgacaaaactggcaaacaagagcattacttacagcctgagtagcaaagaaagcggagcgagaaggacaataagagggtcaatatggggaaatgtaatcctcaggcgagaaaacctgcgagaatcggggcgaatccagaggggtttcggcgggcgggggaaggtggaggttgcgaggaatgcgaggatttgtaaggagattgaaggaagcgggagatttgacgggaggaatagaagagaggttgaagagaggaggaaggagaaggatgaggaggggatagacaggaaaagagatggagaggacacggaggaggagtctgatgatgggggagaagagaaggtggagagggtgcaaagagggagaggatgaagaaaggcgccgctgtggtagtggttgtggttggtttggtgttcagggcgggaggaaccaaccactgcgatacctctgcacccttgctcagtgtacaatctgttctgatctctaactttttctataactttatatatcgatacttaagtacctaat

SEQ ID NO: 10105 - DNA, 1752 bp, Emericella nidulans
tatcagttgaacatatctgctataatcttgcttttttagcgtacgtcagtgcaccgacagctatcttatcgattagtaattgcagtactaagtcaggtgatggaggcgaccgaacccgcggagaacagcgacgataagaaattccttattatcccatccttccatcgtttgccttggttttagttgttagtgctttgttccctcgggtgatgaagcgcgtacttgggatctggccgttgtcgagcagaatccctgcaggagatgactgagcccatgctatttaagcggggcgcagctcaagcgacttcgtccttttctcgatttccccgcatccatactcgaactcgactcccgacgtggcgccggttgagcccttcgccttcgcgatatgtcactaccggtttgaacccgcaagtggaagttcaggatgaaccaactaggtctccatctcctacaccgacatcgtcgactcgctggaacgcgctgaaaacagcaaagccgttctcggcgtttctgacagacacattcaaccgccagcatgattaccttaggatcagtgtcacggagcgctgcaatctgcgctgtctatattgtatgcctgaagaaggcgtaccgctatcccctcccgcgcacgtcctgacgtcgccggagattgtgtacctttcgtcgctcttcgtctcgcagggcgtgaccaagatccgtctgactggcggagaaccgactgttcggaaagacatcgttcctctgatgcagtcaattggagaattacgacatcacggactccgagaattatgcttgacaaccaatggcatttcactccatcgtaagctcgagcctatggtggaggctgggttgactggggtaaatctcagtctggacactttggatccgttccagtttcaaattatgacgaggaggaagggctttgatgcggttatgaagagcatagaccgcatccaggagctgaataagatgggagctgggataaagctcaagatcaattgtgttgtgatgcggggcctcaacgaacgcgagattattccgtttgtcgaaatggggcgtgatagccccatcgaagtgcggttcattgagtatatgccatttgatggcaataagtggagtaagggaaaaatggtttcctatcaggagatgctggcccttattcgggagaagtatccaacattggagaaggtggtggatcataagaatgacacgagcaaaacttatcgcattcctggattccaaggccgagttggctttatcacgagcatgacgcataacttctgcggcacttgcaaccgccttcgcattacgtgcgatgggaatcttaaagtctgcctatttggaaactcggaagtctcgctgcgtgatataatccgacaacagaataatggcgagcccattgacgagactgcgctgcaagagctaggtctccttgaggcagctcgaacagcagcccgcgttcatgacgaaggtggagtagtcagtcaaagagaaagagagcttcttgacgttattggcatggcagtgaagcggaaaaaggccaagcatgccggcatgggagagttagagaacatgaagaaccggccgatgatccttattggtgggtaggcactttccaccacctatatatatgactgcgacgagagactatgatcgatgagttgtatacatgattcacttggttttttttttcttttttttttttcctttccttttcttttcttgacgcgggcgttcaaatcacattct

SEQ ID NO: 10106 - DNA, 818 bp, Emericella nidulans
attctgagggacgagaggccaggaaagtcgagtaggcctctggagcaccctcaggcatgacttcggggagttctgacggtgtcttggggggaaccatctcggcgtggaacatgagcgtggttggctcatcggccagttcggccatggccttgcggacgtcttctgatgagacggcggggaattcgtcaacctgtggaggaggtgagtacaaccagacacatctgataagacgaggcagccacttaccccactgtcgataaggaatcctttgaagccacgaacaccttcgcggactagagccttgagctcgcctgcgttgccggggatgatgccgccgtaaaagccgacatcaacccaacacttgccctcggcggccttgagcttcaacttgaagttctctacagttgtcgtgggaggaatggcgttcaaaggcatgtcgatgacggtggtgacaccgccaaaggcagcggcctgggtgcctgtatagaagccctcccattcggtgcggccgggttcattgaggtggacatgagcatctaccaggccaggaagcaatacgtacggggagaagtccgtgtagggagtgccgtcaggaaagtcggaggcggggatgaccgagtcgaaaacagcagtgaccttgccagtagtacgcgagacgacaatcgtggcggaggtcagacggccgccgatgacggctcgcgacgaggtgaagacggcaatggacgggatctcaccattcatcttgaaagacaatgagcttcaaggagagaacaagaaaggatcaaccctggccaaggaagattactagtggaaaaaga

SEQ ID NO: 10107 - DNA, 114 bp, Emericella nidulans
acaaagcacacagccattcttctacagacaagacgagcacaccagacctgaacatagctatctttagtgattcatggtgatgcggccaatccacgcagtgacagtagcagacct

SEQ ID NO: 10108 - DNA, 565 bp, Emericella nidulans
actcgctgcgggccgcatgtctactgcaaggcatgttattcctagtcgcgagtattttgctgtcgcgggaagtctgatggccttgagtggggcattcgatacagtcgtttatacattgacaaggagacaattgctgttgcacacggagggagggagtggcggggtgttgacagggacaggccctgggcaaggggggaggatctatgcgtatagtcaagaccatacgtttcagacgcatatcagtacgaaggggagggattcctcggagcagggcgggaacggaaatggcgggcagagtaatcgggggcgaaatctggagaggggaaagacgagatggattggatgcgctggacggaagtctctgcgaaggggaaggctgactttgaccgacccggcgagagatgggagggaaggttcgatggagcagattgtgaggagtgggaatgacagggattctaacagggataggaatatggaaatgaaggaaatggatagtgaagtctcgggcggtgttagcggggtgtatcaagagacgacgtttgagatcacgcatgaggaggttgat

SEQ ID NO: 10109 - DNA, 368 bp, Emericella nidulans
aagagctgcatcctcaactccgaattgcccgtcaactcgcggatacacgtcgttgaggaattcaacaagggtgtgtacgacattatcatcgccgccgacgaacaagaagtccttggagtgcataactacaccttgagggaagtgacgccactctatgctgctactggattctgaccttcacctttgacagaccattttgcaaagccgcctacactcgcaccgacaaacgccgcaagctctcctcaaaagaaaaagactacggcatctcccgcggaatcgacttccaaaatgttgcctgcgtcctgaatttcgacctccctacctcctccaaatcctacactcaccgtattggccgcactggccgcggc

SEQ ID NO: 10110 - DNA, 1364 bp, Emericella nidulans
tagcaaagggatgctatgtcaagggaagaatgcagcggtcgcctggttaacgcagtatctgaaggatgcgtagaaagttatgggctcatgaagtatgcatccctcgaaatctaaacccataaacgagggtccgaaaactcaagtctaagtgactgagtatcatgtcaaaatttcggtccggctcagggtccatgggtactggttcatggtgtcatccaagtagcaatgagacctacattactttaaatttatcgaatggtcctcaaagctgacatttgtacacggtaaagtaaatgaaagatgaacaatcttaacaggattggagttttgacaatcatgaaggtacttggaactatagtaagttgagcagcaaatcattattccattgtgatagcaaggactgtatcttttgcatatggctcttcccaatcaagctgtggctgaaccgccagcttgtataagggaagatcgactgactgcatctccttcctaatggttacgttcattatgtggtgttctcaaaagctgtatccttgacaaactcctaggagaccttgcgtctctcaaatggtctgccgatcgagttattgatagcttctacctttgttagtcggcctacatcgcagtcccgttagagatcccttaatatggatgaatgcatcccacttacctataaagtgcgtgaaaacggaaaagagctcatgaaacccgtagcctccagggctcaatatgaagctttatcatacattgcgggagccgccgagcgacttaaaacgtattcagatcaaatttacacatatatatgaacataggtcacctagaaatggtacactgctgctaccttgtcattaagagcgtcgcgctccttctgtcccgtttgcaccctatcctagttgtcatgataatgaaacagcgtgaagcgtctttcgtgtacctaacattggatctgtcgtgacatgagatttttcaagtctacggcaggggtggacgagagtacttccagaaactccatgaattaatcagattctagatgcctaactttgcggttaaacaacggagtagatatgcggtcagtctatgattatcactcgtttactcgatcattaaaatcaattagattatataaagagaaactaaaggtaaataatcagtacctgtcctcatctcgactgaccagcggcgacgtagtatacgtacaggtcatcacatcgtaaagtcgtcagggccatcgtctcacctagcggaacgagctaaaccgaccaaaggagatcctgaatggagctcggcggatcccgtgcttatcggcgataatactgcgtctgaacaaggcacgttagctgcagctgtcatatttcagaatgtga

SEQ ID NO: 10111 - DNA, 1599 bp, Emericella nidulans
ggatcagtggttgtgctatcatccaagcagccccaccacacaggggttttacaggtagtcgtcctggttgaggtagttatggtagaagtagtcgtagttgagctcgtagtagtaatctcagagccgttacttcggaagaacttccacaactcacaatcgtaacactcttcttctggcgcacattgcggcaagtcatcatatacctcaataacatctgaaatgacggctttgatgcgatgtgtaccaatcgcaacgcgccaccccttgtctgcaacggtatcgtaaacgcacatttggccggtatgacatgcagattccatggcgtatccaccccatgtgcagacagaactgacaccattacatgttcccatgtagacaggatctgcggtatgtccaaagtgatatgctcctgtgaactttctcgcttggggcaaagctgggttatatccaggcggggttggtagtccgagccgagcggcgggaagtgcttccggcacagcttcaaaagtgacaaccggcagcccgaaagtcaatccaaggagactagccatggcacctcccaatgaatggcccgtcagccagacattcgcgttcggatatagttctgtaacgttggagtacaagtcgagtgaggcacgataatatcgattctcgtcattcatggcttcgattatgcaggtcaaattggcattgaaggcagatttctggcaatcgcaaacctcccgccacagataggaaccgccctgaccacagcagcaactgaagtagagattgtcattcaccttatcgttggtagtcgtcccagccccatcgaaaagtgcaggagacgtccccttcagcgagatgacaatagtgctgttcgtatcatctgcataaatatgaccgcgaacccatcgttctgccagccaaaactcgtagaataattcagtttaccgttaatatcctgccagtcctcggtacctggtacctcaatgtaatcatttgctgtcatttttgcaaaagtaaggatagtcttcttatccgtaacatttggtcccgccaaagtatctttagtccattgtgatgaactaagggtgactgctgatccggcacttctcgcagccgctaagtgttcttcgattacggataaacgtcgatctgctagtcgctcaatggtaaccggctcggaggatgcaacgaagggtacgttgaaaacggcaggctcattatcttctattccatcttcggaaaccgttcgtagttgtgtgtttggtttgatgtcgagccttctgtgaagctcaggatactcgtaggctcctcgctgaacgatgtggcgaagggtctagcgcaagtaagcactctcgtacgaccggtgtaacatagctgggcatagatcttacaaattcgtgcgtcccagacaatgattgcgggtcagctgaaggcacttgtggtggaataaatggcgttgcttcctgagacctgaagtatacgggctgataagcggagacacaagacggaagaacaagagcaagagacatgagcagagtgtgacgctcaggtccatcaagtgccattttcttgtccgcctgtgaggctggtccatgatagaatatgatgata

SEQ ID NO: 10112 - DNA, 152 bp, Emericella nidulans
ggtagtggtgtggttgcactgtgtcgtttctccggatcgtctccggagttctggttgtgtcggctgtcccgctgtcttcctctcgagctctaagagttcacgtccgcaggcaaggttaccactgcgcgctcaaacctccggaatacagcttc

SEQ ID NO: 10113 - DNA, 709 bp, Emericella nidulans
cgcattgacctggccgatatgtgtggaagagggagtgatcccagaaaccttatcagaggttgagcgtaggaccggtatggtcttggtgttaggcgaagaaacttcgtcctccaaggtaacaggagcagagtcgccatcggaatgaggagaaaccggcggattctccgcagcaaaatcgtgttcagcgctcatggtcgatagatcgtgatgctatgatcaaggagaaccggtgggcggcaaagccggaacacgctctccagcacctttgggtcgtctgacaatgctcagcggctcgggaacatgaattggaaacggggaaagcgaagccggttcggtcggggagcgaaactggcgaaaaagggaagttggctgacgggctgataaacaggactgcacttaaaggacaggaggcagaagcggttgtccgggtagaaatgttcacaacgcctcaacgcggggcagaaccttgggcctctatcggttgagaaacgattaaacgaagaagctcagcgccgaacatacgcagcgttttctccgagaagaaaatcgggttcgaatcgaacagagtccaaagcaatcgaagttgggtgcttgtattccttcgtcttcttccaagttcccgcttggaatttccaggtttgttggttgggctgtgggggacggcggggaattcaaggtcagaaggcggtttaaccgttcgacatgccag

SEQ ID NO: 10114 - DNA, 575 bp, Emericella nidulans
agagggggggcctcatcacccagcttctgttctttttattgaggtacaaccacgatattaacatatatctatgattattttatactccctatgaccaatcactcatttgtaattataattacatatctcctctacttcacactataataaatttagtccttatacatctcattacttcttttaatagcttgatcaaacactaatccgtcttttcattgcaatccgctacttttctatattatctataacatactattacttaccttacacttttaaactatataactatccctatttttcaaaaacttctaatataaattttttttttatctttctttctcattaacttccaaatatatctactttaacatataaataaatctacactaattaatttactctattctcattccaatatttcaatctatcaacatacttacacaatattttcttatctaattaatatatattcctaatctatatcatctatatcaaactataacctacaacttctctttaacactttatataaactattattatcaataattacccttcaaaatataatttttcta

SEQ ID NO: 10115 - DNA, 507 bp, Emericella nidulans
  unsure (1)..(507): unsure at all n locations
attatgggaccctacaaacctacaacaagatgaggattgctttgtgaggtgcagctcgcagtttgcgcgaggcaggatacatgccttgttatacggcaacaggtctgggcggattttgactccaacataaactgcgagcgagggtatcaggttaacgagttccggacaacgaaggtgtgcagctctggacggcttcgcgctgtatgctgcattttatggacatttgagatgggatccagaggcgcgatatagattggtccaccatttccagcatcaagtcttcccttgatatattactgtgactcggagtctttctcttccccatatgcgtggttcacttgcacagcacacaatcgatcatggcctccattcgcctcaccgaactggttccatttcgaggtgggcgggcaaacannnnnnnnnnnnnnnnnnnnnnnnnnnnnnnnnnnnnnnnnnnnnnnnnnnnnnnnnnnnnnnnnnnnnnnnnnnnnnnnnnntcacagtgga

SEQ ID NO: 10116 - DNA, 1419 bp, Emericella nidulans
atttaacgtctttaatacaactgaagacagaagcgcgattattcagcaacccagaggttcgtgtctccatatccatatggcacaaacggctctctgaagtacctctccgtgacaacttccgcataatccttatcatcaacacagtaaccgcccccatcaggcccaatatgcgggcagtgttcggttggccgatactgcaccatatgctcatgcacctcgcgacaaagcagcgtgttacgacccagctcgtaagcgcttccgaaccggatatcctccgtgaggaacctgacacagtcctcgttgctgttgtattgctggttatcatcaacacagtgctgaccgtgagtctggcaaattgttgttgctagaagattccccagcgctctctgcgtctccgctgggtctgtggtattgaatatgcccgttcccgcagcttcgagaagggtatccagcaaccagccaaaccaccggaaggtcgcatcatactggaggatcttcccgtccgcgttatataggatccacgtatcaatggtgatagggacgagaatattgaacgaggttgcgttgaatgtgaaaactgtcgttgcggacgtgatgttctgattggctgcgaactgcgtgatgttataagagattgggatgccgacgaggctgagatgcgaggggtctgagaaaagaccgaatatgtattcattgttgagctcgcggccgtcaaatgtgcgtgttatgtcgacgcggccttgcacctggtgtctgggagttagtctttatatgcaaacggccagcggcatgaaatgaaggagggtgcttacattctcagcgaagacggaggtgtctgtggcattaatctgctggaggttggcagggtagaggaagttatcccagagggtattttggagggcccagagctcgtcgaaggtgaaatcagccagggcggctgttcccaccgcgagaaccagggctattgaggagcgcatattggatctgctttgattgtcccatgttcagaaacaacaatgatggcttgtcctttttatgttgtctcagctattgatcaagacagccaagaatggatgaaagttgagaatgtgatggaggaaatattattggttagtgtggtgacacatacattccttgatatccgaaaggattagcccatgggagggatcgtccaggatcaaggtttgaaaatccaagaattgcgttggctggggaaagcttctggctcccatgatgagggaaatcgggcagtgcaaatctgacatacagctgggggagtcatgcccttctttgcggtgccgcggaggataagcggggtgaagagaaccgagagctgaaccaggacgatggtattgggatttttttagcttgcgagcatgttttccgggagagatgatatagggatctgtatcacatggc

SEQ ID NO: 10117 - DNA, 1312 bp, Emericella nidulans
ccacatggagatgactaacctcatcaccagcccgacgtgcgggaacactgattggagcacgcaagtgctcagcaaagtgaaaggagaaatgataaatgccaccaaaggctgcttaaggtcaggtgtatagtgtaatttggatggggagtgtttacatcattttcttatcggagcgataaaccattatactctagccttcttgggattagctctatggattcgagagtttgctgtttttgctgtgtttgcactgtctgtattcagcgtgcgataacgtccagcttcccagcttgaagcaactcgaagttcatcatcaacaaatggctcgccatcgtgctcattcgggtgctgatgccccgaaggagccgcactcagtatctctaaaaggtatgcgaatacccgcctttatatgatctcgactaacagataagtcctccggtaagcaccgatggataggcccctccaatggcccctctgacctcgcagcctctcacggccctcgttgtcatatcagtatccgcttccagctgcaaatacgaagatatctgacaaagcatccttgaacttcccgtcaaataatgtcgatacccaattcattctcaccccaaacgtacgatctcgaattcgccctaaccttggatccgggatgctgaccaggacagcttaccctaccacccacattcggatcagcatacgttggagaaacgtttgcgtgtactctgtgcgcgaacaatgaactggcagatgacacgacccgcgtcataacatccgtccggatcgttgccgagatgcaaactccctcacaagtctcatctttagacctcgagccttcggataccaatgccaatgatggcctacagaaagggcaatcactacaaaagatcgtgcgatttgacccgaaagaagaggcaaccatatcttggccgtcagcgtcagctatactgagacgatgatcgggtacgacttccaagcaattgcgggcgggtaaggactttcccaagttgtccaattcgttgggcaccgtttttaacgcccgaccaattgtcgacctgcctccttgagctgtaccagtcctttgcctttgaagacccttgcttttttgcctttatcccccttgaatgtgccagggtctgtactcagtccatgtaccttcactgtttcccttctttgcaccttcttctctatcctccttcctattttcgaccaagcccctcttatccacattttactttcatcattttcatcctatattgttcttattcatatatctctctcctctatctcctactccatttcccctcattctactcct

SEQ ID NO: 10118 - DNA, 1164 bp, Emericella nidulans
ctcggtaatcccgaccacgagagcgacgttagtgagaaggacatgcagttcttttcgagcttgagctgccagtcgggagcaaatgcgaaggagggcgctgggggatgctgttcggggttgggcgctcagccggcggctgctgttgcctggtagagatctatcttctcttctcttcacttcccccttactcttttctctcctctttcatttttcccacttaattattgtctttgttccttttctaattagcgatggatgctcttcatggttgggatacaatttgcgatactcgatgatcatttagatataggatagttctaccaattagagttatgataatcgtatcttcgatatccatatcttcagtattgatattagaaatggatctgtattcatgtatttgatattcatgtatctgaaattccagtattacgataaaacccttgtactacccaaccacccacaacctcaggattgacagaaccttatcagtagctccgcttctgattggttgggccatagaaaagcctatcagagggcacatgaccgtctcaagctgttcctgatcgggccaataggtcccgaccccgcatggaacttggccactgcaagctcagtctcaggaagccgtacggcgaagtctgtctgcggtctctggaaggccaatgcgtgcggagttcttgctagtggtagtgccggtgttgtcatgttgatgtttccctcccctcttctccttcccttcctcatcgccctctcttattgcaccagcgcgttctagcgcctcaagcatctttggtcgcggatcatccgctgtttctgtcatcggctctgtcgctatccaagccgctttcctaccgcgttcccctgagaatcctcccctgacccgtcttggtatctggtcttgggcgatactggatgatgccgcctgaaggcagcgggacacgtcgccgcctccgctccaaccacgcctgcatcaactgtaggcgaaagaagactcgctgtccgggcgagaagcagcctgttcgtgctgtgttcggttgaatcagcagtgttcgtatgctgcagtgggcggatcaagtgggcctgatgtaagtctctcggcaggtctataaaaataataaaataaaggggggggggggggggggggggaaaaaaaaaggaaag

SEQ ID NO: 10119 - DNA, 834 bp, Emericella nidulans
aatacctaaggtcgacgccgatggcagtgtagcgcttgccgatgttgacgtcgggggggaagatgtagtgggcatttttgtacatagcattagaccagtcactccactcggggtgttcaccagggtagccggcaatgaatagaccagaggcaaagaggaagaacgccacaacccgtcggggccacttccacttctcaaggaactcttggaacgaaacttcgtaagacaaatcgctgaggaacatgccgtagacgccctgcaattggaaagtttctgatctcgttagcctaattccggcttgcaagtctggagtagtaggtacctgtgtttttggcgttgtcctggtggaagtagagggccataatgagatacacgaacatccgccagcggaagcgcatgaacatagtcgcacatgtcaagagatacaccaacatagatgtcatcagtagaggcaacaacgcccactgatggtcatcgtacgccatgtatcccgtcgtccaggtagaaaggaagttcttgccaaggcgaatgacctcctttccgaaagagtcctcaagatccggagcagcataacgacaccaccagcaatctgatcggtttgcaaccacgaacgcacggcattgcgccataatccaggatataatcattgcaattgtagcgggcataataagacgcgggggacggcggaaggcacttttgccaacagcagtgaaagcgcccagaatgtttccatttcgcgatagcttcaaaggcttcaaagcgcatacgtagccagtcaggaaagcgaagatggtgacaccgatacggccttgcacgggatgcggaagacgggta

SEQ ID NO: 10120 - DNA, 2296 bp, Emericella nidulans
gcatcgttctagaatgaaggaaacagtcttctcaagattcagggtatagaaatcgaatccacgtaagcctggagtgggcagcttcttcatgccatccacaagctcggcgaggatatccacacccagacgcttgacggcatcatcatcgtgtttgacctcgtccagtttcgcaagaataggcggcgggatcttgacgtggctaagcttcgttactcgcgtcaatattttataactgtgaatgggcatcaagcccggaatgatgggaatcgtcttaaaagtgccggattcatggttccgcagcaggttctcaaattccgtataggcgtcaatatcgtatgtcaactgcgtcatgataaagtcggcgccagcctgtgtcttctcaaccagccacggcaaatcgaccttcggatcctggatatcctggaaagaatcggcagggtggccttccgggtacgcagcaacgccgacacagaaatagtctccgtactttttccgaatgtaccggaccagatccacggcaaaggtgaagtccttgttgctgtcgtcctccccatgcatattgtactcttcactccgcggggggtcgccacgcaacgccagaatgttcctaatccccaatacctttgcttcctccagtgcttggtccactaaagctcgactcatattcgtgcacgtcaaatgtaagcatgttgtcagctgtagttggcgttggcagatctccgccaactcaagcgacctcgctgcagtgcttcctccggcaccccaagtaactgtaacgaatagcggtcgcagcgcttgtgccatacgctcaagacgcgcttgcagattggcaaagccctaaaaacaaacctcgttagtcgtgaccctttgcttctgaaggcaatcgccgaatgcggggaggaatagagccccaccatctgagtctttggagggaagaactcaagagagaagtaatttgcgccgggcggcaaagccgctatcttgtgtgtgattttctccatgattggagctatatgattccgtctgaatgtttaggtggtgtgaagagagaggaagaagaaaggggggggaagaatatgacgaattcgggggggactgctggtgggtttttgttcggagtatcctcgccccctcgaggccccgtacctcagtccggccattggcctgccgcctgcaattgacttgagatttcagaatctgccataattctgctcagggatacttattggttgatttcgctcagcatatcatgaacgagattacttgtcaaagtttcgatggcgttgcatttcgactccgacttatcggctcttctcctccgtcgcgttgccgtatagatccaccatcaggtaccgcagacccaaaatgcaccacatattcggctcagagctgctttacacgaccctgacaatctaaaccatgatcagttagtcaatagcttttctttcacaagcaactgcaatcatctcagaggccaggagctgaaacaatcccgctgcaaacacagcaaacagagttcataccaacacagccccatacatttcattcaatctccaagcggagcttaggacactgacaaccatccaattagtgctgcatctctgaggtttttgatgcttagcatcatagagactcctctgcgactgacgcactgtttgttggccgcctcataaggggccaatctcaatatgccgtcgacctgcattttgcgcgcatgccgcttctgctcgcgactgggccagagctcttctcgccgacacctgacaataccaccgagtcctacaccacatcctcctaaagacgcccaatcccgcctacgccgcttcaatgaccgtctgcctctgtttctccgcgcgtacaccactcccttactcggtgcaccggcaacacacgtaacatccttcttgattctccatgagataactgcgatagtccccttatttggacttgtggcggcattccattacgggaattggttgcctgatttcacgtctaatagcgggttcgaggaaggtatagggaggttttcgaggtggttaaggaagaagggctgggtggaggatagcgttgaggtggacgaggtgacgttgggtacagctacggagaaggaaggcgtgcgcttggttctggagtttgcaactgcctatgcagctaccaaggccttgttgcctctgcggataattgctagtgtttgggctacgccgtggtttgcgaggactgtcttgggtccaatttggaggagcacgagaaaattctttcgtaagcaatagcccgcactgtcttagtggcctccgag

SEQ ID NO: 10121 - DNA, 626 bp, Emericella nidulans
tctgtcatgtgtgttctgagtggtaaattcaaatctctccctgctctcatttggaccagaccctgctaggccactaatagttggagctttcaactcacttcttcctcctatatcctatttttattcgctcatactctccttacgttttctaattacttatactactacattacttcctatttatacatttctctatatctcgtctcttcttttaatatcctatttacttctgtactattacattatcactccttccctactttcttttattatccaaactcttcttaattatctttttcatacctatttcttcttatacccttccaataccacctcaatccctatcaaccttcctcctacacttttctactccattctcctatctcctacatacctatcacatcccctcatctattatactcacttcctctatcatacatatcatcctattctctcacactattattttcttcatcatccttatatatcataccacttctactctttttccattactccccttattctcacatccactcactactcccttcccatttaatcaaccactctctccttacttatatcactcttactatctatacactttcatctcacaacattaactt

SEQ ID NO: 10122 - DNA, 106 bp, Emericella nidulans
  unsure (1)..(106): unsure at all n locations
cgagagcntcgtatgaagttnaatangcgtataattgcgatatgttcaacacaagaccngaggtggacaatattgatgtagggagattgcatccatgaaggcgact

SEQ ID NO: 10123 - DNA, 849 bp, Emericella nidulans
acacacacgtcttaagatcggagacttgccatacatgccggctgtgatagcgtggacctgtggggtaccgaggagcagttgaatggcttcagtcttcccggttaagcagttggccagtttgcacccagtcaggcttgtgagtttgtggtcataggcatgctccggatactggcgcagaagttcctggaggatctgctcagcggacttggatggcactggtacagcggttcgcgtcatgcgtgggccatctacatccacaaggctggccttttccagcaacccgtacaagacagcaacgacttggttgtgctttggcaggtgagagatgcgccggacagtctggccgggttgcgcagcacggatcgaacatcccatctggtcaaacgcgtcgagggtatggacaatcaccagctcagtcagtcttggttgaacgttgttcgagtaaccggatagcttgttggcctcaatgaaccgatctgtcaaaagtttggtctcagtaaagctgtctacaatggagctggcaggaatctgttgtcggtcaatgttgtgcgagtcctcattattgatgccactggatgtctcgctttccgctgaagccgtctcaagatcgtcgctgctgtcgtctcctgttcgtgacgtgtcggacgccatcatgtttgctccgatacacttcaccaggctatggacgtcggtcatgtccatgagctcgtccagctcaaacttgatgctaaactccttctcaacttctcgggcgactccatggctaatagcgaatcgattgcaagctcgacgagatccgcgccaggctggatttcgacgggctcgagacccagcaggttcaaaataggg

SEQ ID NO: 10124 - DNA, 562 bp, Emericella nidulans
atgagtggacagaaacataactactcatgtttagtcaattaataattcatttaattacactttattatcatatttatatttattacactctttctaacttctttattttaaaattttcacattaattattattacttatttattacacttcacctaatataactctaacatatttaacataatatatatttaaatatttatctcttatcactcaacaatcttatccataacttaacaacttataaatccatatcacatataaatcaattctttatatattatctaatcactatatcactcaattaatctaaaaacattatactcctacacaattacaattactatacctataatctcattatttaattcatctcctctactaatactattatattaatctcatacctattaactaacaatttcatcattacataatatgaaaaatcttttctatcattcaatctaaatatacctattaatcaatattaaccatctccttctctctcaaccctcactaataccacatctatatctactcattcactctcaatcatctccattc

SEQ ID NO: 10125 - DNA, 292 bp, Emericella nidulans
  unsure (1)..(292): unsure at all n locations
ggcggcaaaacagagcgggcagggcaccgggcgacaaccccgaccagccgggcagacggcgcaagcacaccgcgcggcacattaggagccggaggcnnccaggcgggcaaccgccgaggaagcgccgcagccgaaacagccaggccgagcgcgtagggcgccgcggcgagagggacagagtccccggcacgaacaacggcaagggggccgcccacagcggccgcgggcacaagaggcccaacgagaaagccacgcgaggccccagaggaccgaccagccggaagcaaggcca

SEQ ID NO: 10126 - DNA, 2555 bp, Emericella nidulans
cccagtctctgggcggtgctacgtatagcaaaccccgacaatgtctcgttagattcatccgacgatgcctctacgcctgctgccactactgctcaaccagagtctacatcatcgacgactgatacaaaagatgaacccacagaaattgaccagcaggacagcgcagtatcatcgtgccctccccctgccgaccatcgaatgtcctaccagtcataccaccccgatgtccagcagcagcccgcctcacattatgcttccccgatcccgtcccagccacaacattccgcccccacgagctcatcccgccccgtatcgacattatactcaaatgggggcgcgccagtatcagccattcgagaaggcccatatcgtattcgtacagactctgccgcgtcttctgcttccgaaagtctggcacgagccgaatctcgtggagggtctgcggcctaccaggctggagtgcccatccgcgacaatacccatagcgaccgctcgtatcacacggcccaaatgccccccaacggtgcagcggtgatgcgtcaaccatctcgagcacgcgctgcagccgcgcaacaactgtcggggtcgccctatgggacggaaaatggtccgatgtcaagcagcgatgagtggcaggagcgtggtgccgctgtcacagtaagacaggagattgatgctaatgggaagccggtcgcgcggtacattaagaaaggggttcgggatttctccttcggtcagaccctcggtgagggctcatatagcacggtcgtactggggacagaccgtcaaaccctcaaggaatacgcaatcaagatcctggacaaacgccacatcataaaggagaaaaaggtcaagtatgttaacatcgaaaaagacactctcaaccgcctcaccgatcacccaggtgtcgtccgattatattatacatttcaagatgagcgctcgctatatttcgtccttgacctctgcaaaggcggcgaattgctaggcgtcttgaagcgaatgaccaccttcgatgaagagtgtacgagattttatggcgcccaaatattagatgcgattgactacatgcacaagcgcggcgtcattcaccgagatctgaaaccggaaaacgttctgcttgacagtcaaatgcatatcaaagtcactgactttggtacggcgaagatactcaagggtaatcaagcctctcagaattcgagcggcatcccgtcgctagactctgatatgcctgaggaggagcgtgccagttcatttgttgggacggctgaatatgtcagtcctgaattattaacagacaagaacgcgtgcaaagcaagtgatttgtgggcattcggttgtattatttaccaacttctcgcaggccggccacctttcaaagccgccaatgagtacctgacattccagaagattgttgcgctagagtacgaatttcctttgggcttccccagcgtcgcccgcgatcttgtcgagcgcctcctcgtcctcgacccaacacgtcgtctccctatcgaacatatcaagaaccatgaattcttcgagggtatgacttggggacccgacttgtggaaacaaaaagcgccccgcctgaaagcttataccccgccaccccgcgaacccattaaacttaatgggggctcagatggagacagctttccccccagcattaacacagcaccatcaaatgcgagctcccgagtaatgcccaggctgattaccgaattgccggctcctagccaattggacattgagtggtctcctgtgctgacaaaaaacaacgaaaggattctgaagttagggaacctggttgtcgtgtcatctgcagcctctcacagtcccgtctccaaaaatggggagtacgaagcgccaaagaagttttcacgattcttcggcggtagcactacgaagaagcggcaacgcctggtaatgattacctcctccggtcgaattatcatggctgctgccggcggcgacgagaaaaaagcaaaaatggaactgtctctgcttgctccgggaacacattatcgcacatctacagacgctaaaggtgtatcgtgctggatagtggatacggtatggaattccttccctttaccagaaaattcagatatcatcctgaccaatacacttacagcgcgagaaacactttgtcttcgaagacccaaagccgtcatcaagcaatgcaggcacaaccgcaatatctgcgcaggactggttggataccctcgaccgagcacgagagatggctttggcgcaacagcaaaatggccaatactcagccgatgacgcattccgtgacttatcgtctggcttctcaagccccgctaacaccctagatagggcagcggaagctccccaagaatcagctccacaaggacgggcaacccttgtcaagcaccaaggaaacgattccgaatccatcaaaggaaggaaacgttttagccggcgccattcgaaaaatggcctagctgcggttttatagaacagccatcccattgatgttttcctgagagatatccccattagttccgagtttcaagtacgacttttcagtg

SEQ ID NO: 10127 - DNA, 288 bp, Emericella nidulans
cgcgaaagcggcaggaagaaccagcagccgcaggccaacaccaaccgcaagaagccgcgccaccgcgcagggaaacgcagcgcgcacaagtggttccaccggcgcgcacgacagcggcgcagggagccgagcgacgagagcggggcccgcgccacggccaggaagagaccgggacggcaaggtgaccgggaggtccaggaacggcagaagcaagcgagacgcggcgccagcagaccggcacggagcccgcgcagaggagccgaccgggacggaaccggacagcgcccc

SEQ ID NO: 10128 - DNA, 1602 bp, Emericella nidulans
aaagaacaccgtatttgtcttctatgtctgtctcatcacgctatttatatcaatgcggcggctccatgtcggtgccccaacagcgagcatctgcaaagacctgctctgcgagcgccattacgcccagcgaggactcactcgcccggggacagacgagctcgactgcaagatcgactccgttcagtcttctctcagcatgctccgcggcgtcgtcgggctgctggcgctgctgcctggattgcttctgggggttccatatgctgctctcgcagagaactggggtattaaacgtgtcctgctactgtcggtcactgggatcatcttgtgcgacgtctggttcagtcttatttgctggtttggtcgaaatctgccgctgcagctaatttatctgactcccttggggtatttggtcggtggagggccatctgtcggcggctcgttgctgtacgtgcttgttgcggattattcgccggcagaactgcggttggtacctctccttcgaagaagatcttctttctgatgcttgcagaccgacgcggttcttccttatggaggcagccgcgtactcgggcgctgtgcttggctatacggccagctccgccatcatgaacacgcatctctgggcgtcggtcgtgctaggaccctgcctagtattttctacatttttcctggttctcttgtttcccaatgactgccccatcggggcaaaggcccgtcccgatgctgggcctgatcctgcgcctgcaccagaggccaagtccatgctgcacacgatgcgcactgccatggtccttttcaaggggcagattggtcttgtcattattcttctgggatatgcactacggtgcttgggagatggtgtcatggcgttgttgatcatctacgcatcgcaggtgtttgactggtcgttctcgcaggtatcttcccttcatgcggcgtggtctcatagatgcttatgtttgggcagtctgggtatctcctatctctacagaatgcaacccacctggtggtattgcttattctacccgttgtagaccggcttctcgcgcagtatctagggcgagcacggcaaacggaacacgagtttatagagccagcgacagggctggccaagcacttttcgcttgcccgaggaagtgctcttctttctgccattggaagcgcaggaatggctctattcaggtcgccttttctctttgttatcagtatgctctttcaccgtagcttttggttcatcgctaacaactacaggtgtgatcctttacggtttcggcagcggctacaaccaatctatccgttcaatcatgacgctttctacgccagaggaacatcgcgcaattacgtactctgttctgggaatcatggaagcggcaggtaacttggttggggcacccttctggccgttcatttaccagatcgggctgaagggcgatggatactgggtgggactgccttttgttgtgacggcagggttaatggccgcggtctgggtgatgttgtatgttgcgagggtgcatgctgtataggcagcagagagaaaactgcgagataagactagagctagattctgacttgggggaaacaatccacgatgttaccttg

SEQ ID NO: 10129 - DNA, 391 bp, Emericella nidulans
gcaaggaacggccgccagcgcgcgcgaaagacgccggaaaggcgggagcggggcagaggaggggcgagaccaacccgacggggggccgacggggccgcgcggggggcccacttccttgaggcacaacggaggcccggcgaccgagaagagggccaggaaaccacggcccggcgggcaggcaaggcgagacaggaggaagccggggggccaggagccgtcggcgaggcagacaggcacggccggagagagcgaagacggggaagaaacagagggatgaggtgcggagcaggggaaccggacaaagaggaccagcgccggaggcgaaggcgcgaagacagacgcccggagaagagaggcaacgaaacaagacaaaaccagggaggcggacgag

SEQ ID NO: 10130 - DNA, 290 bp, Emericella nidulans
gaaaaggaacggcgccaaccgggcgagccgcggaagcggaacggcggcagcgcgaacgcaggaaagcgcaggggggtcactgccggggcggaacggaaaggggccgaccgcacggaagccggggcaccaccccacacagagaaacaggggcgaaccgcggcgcacagcccgacggagagccaacgaggagccggcaggggacggaaagagagcggacggccgggcgcagacccagggggcgcggaggcacccgcacgcggggggccaaggggcgagatgggcgcaaggcg

SEQ ID NO: 10131 - DNA, 1258 bp, Emericella nidulans
cgaggctgaagaggagggtttcgagaacaaatatcagtttcatggctctctagtttctgaagtgataagtatttgattttacttcttcgtgctgagatccgtctcttatatacataatgtggatatatgcctcttcacagtttgtataatttgaggctcagccaccgcccacggggtatgcgtattcgcagcgaattgcggaggctgtgaacactgttcataacgttagttgtccatcacgccagtatactttcattggaatcacgcactccgataggtcaggaatgacgatcttcgtattcctcagcctcagccgcaccggatgagtccgaattaagagtggctgactacttggagtatacgcatacgcactaggccgcttgttcctggctagagcgtcagcgcctattctcgcactgagcccgtcgctaaaaacaagagaagagagggtagacggaattacacccctcgctataacactgttctattggccgttttcaggtcaacatctgcagcggataagcgattgccccctggtactcttcaggcagcatcgccgcaatcacagagagcagtcgctctccccagctcgagcaccaccactggtcgctgcactggcccaggatcacggcataatgagccaagaccacgagcgccattggattccgatgcctcagcagatcgatatagtcgttctgaacagcgttgggccatgaaagcggccgtaaactccgcttcagatggatcttcagggtctccctaaatagctggatggtttcggaattgatgcttcggacccgagggtcgtcactagacgattctacccacggctgcagggtcccgagagcgttcctaagatccttgtcacggttatcctcatcggtctggtcgagatagtccttttcttccatccagcgcgggctcacccgcgcccgtggccatggggtcgttgtaggcctgacaagtgagttgcccttgatgacaatgaggatgtggatcatctcatccaggaccgcctctccgcctttttcttcgcgatcgaactgcgggagagcaagggcatagatggacatgaggaaggggaaggcctggactgcgtgggagttggagtcgttgatattttctgcctccttgcggaaactcgtggtcgcatcagagcatccctccagaataaaggtgcgatgggcttccgtgaagaaaggcgacttagtcagagcgagatgcagagccgagagcatgaggatcatatgcaagaaga

SEQ ID NO: 10132 - DNA, 607 bp, Emericella nidulans
acttacaggagatctctcataccctagggctgattaatacgaggaggacaggagtgaaacacaaaagagtgtcgtaccttcctcaatgatagatatccgcactctcagagtttacactgccactcccgtactgggcctcttttcagtctgtgccatagctgcaacacttattagaggcatttataatctactttaccattagaggtaccattaatcattcatatcatttgaatgctcgattacatttccttactatactaccatcctagcatttgataactctctatatatcattttataatctataaattatatcctccacatatcctctcttccctttttttactaccattcaacacatatatcaaaccataaaaatctactactatcctactctctatatacaatataacagacgttacttacaccaataaatactattttcgcctattcaactcctttcttttctattactattaactcaacatcacttactctaattgaattctatccttctaactctatacactcctcaattttcatcatctcataaactaatccatatatattcaatgtatctattttataaatattaactcactccact

SEQ ID NO: 10133 - DNA, 311 bp, Emericella nidulans
ctttagagtccctgaggattattacccccgtaccgtaacatccttgcatcgaacgtcctatccgccgtctcctcctcaaagcccagaggaggatatgcaccgctcctcccgcaagataaggcgcagtacgaagccatcgcgtgcacctacaggaaatggactcctggcatggcgattaaacgcttctacggagaacaaggaatacactcttcctccgctctaccgtcgttacgaagacgttaatcatcgtgtgctcctatatctacaggatgaaatctctccattggaagtagagttgcgcgtgctcgatg

SEQ ID NO: 10134 - DNA, 920 bp, Emericella nidulans
tcaaaaatgtgtggaaaaaatactgcaggcaattaaagatgccaatgctacacaaatctcgcctatggagggcgaacccggcaagcgggttgtgcttacagtgaaaaggaaggacacgtaaggaatcctaaagctaatgctgtataccatgtatatcattgaaaccataggaaaattgtacaataatacggagtaccacggaatacggcgtacggtcaaacagtagcccggcattgcgtctggagatgtacaacagccttgtaaactgagctaatactcggatataccaagtctgggcacataattcatagtagttatatcagatttgaacactcagctgcatagtaatcggaacaaagtatggagcgactctagcataggacggagcagaggaccgggaactccaggaacatccgcaatgctccgttgctgattggttaatagatgactaagcacatctcctaaaattttcgggccagttgcaaagctcaacccattgtcgggtgtcgttcttcaatccatcgcgttcccttgctctttgttctgtttgtcgttttcttgcggagcagtcatcatgtcgggcctttctagaaccgccaaccttctttttcgcaccaccaagacgtctattctgcgtccccgtggtgtaaaccctgtgcaatatgcgctcttcaaagataggcagactgtccgcgcgatggcaactacctttgagcgcaccaagccccatgtgaacattggtaagcagaatatcttgtttatcgggctgtcatttcggtataaacacttgaaaggcaccattggacactttgatcacggaaggggccgtactttaaatctccttggagctggtttttttaacaaccaattcttagaccacattgaccgttgcataacaagaccaggcctcaagggggtgg

SEQ ID NO: 10135 - DNA, 1091 bp, Emericella nidulans
ctagtaacgtagcggccgtcatttaaagggcgaggtcgtggcttctcggatagcccagaacgggaaagcctgggcgcagagtaccttgcgcaacgaggatatggaagtttggttttttagactgctattggagtaagcctctcacaatctgcaatgagtcgaaccgtgcggtttctaatcatgatatctaggtacgggcgcttaattgacgacaatagagagaatctagggtacactggatgatttggttttgtatatagcaacctcaattgcacggcttcttatgaattatgcctcaagacacctcactttcagtcataatcggaagactacatgcgtaagacgcttgcctgctcttcgagaaaatgtcattattcgaagctatgaaaaagatgctttattatgccgctagacgagcacagagacagtccttcaacgacataaacctcagtgtagtgttcccttggacagctcgttctctgcaggaatacttatgtacctagctcttacgagctaatagcaattttcttccttcaacctataagttcatgtttcaagcttatagtggggtacgtagtcagcgatgccgacataacttagttgacgatcggtaaatgatctggactgggtctgtttgcacgtgagagtgcccacattatactattaatactgcagtccggcacgcattcactctgctacacttctcagatcttttccttgattctgattcttcacttgctgggaacattggtctgcctttattacggaactgatttggcttggaaaagtcaggcaaccctgtctggagggttgagtccatccactaacacaacatggcgtctccgctactcgcgctgctaagatcagtctttgtattgggctatggtttatttactatgggagtatattttgtggtggcactttaccatggctaccaattcaggaggacgactgagaaagagaaaatggagctgcagctcggtaagtactcatgtcatactgtctttcgaagcacatcaccttcaggccattagactgacattcgttcgacaagctgcacaccgactatgggacctgctcaggaaatggtt

SEQ ID NO: 10136 - DNA, 348 bp, Emericella nidulans
  unsure (1)..(348): unsure at all n locations
ggccgaagcggatgcctgggaaggcagcgggcgagaggggaggagccgccgcagcgcgaggaggcgattagctcgcggagcacccgagcgngagccggcgacgcgggcagcgccagggcgggacggggggcanngagcggccgcaggcgagccggcggcagcaggggcagagccaggggagncggagagagaggagcggcgacagggccaccacggccaggcagccccggaacgggaggccgacccggagggacgccaacagggggggggacgccgnnggcagccgggagcaaggggnnggagagccaggggggagaccagngcaggacagggcgaaacaggaggagc

SEQ ID NO: 10137 - DNA, 410 bp, Emericella nidulans
caaggggaagcgaagcggggaagggctgagggaggcccgcgacaggcgaagtgtcgccgggagtggcggaagggcggaggaccagttttttcggcaaggagaaccagaaggggaagcagaagagcccagggcaggagaaaaggcggagcgccgacacgcagcgaaagaagggagaaccggagggcatgagaagacaggggaaacagggcgcgacaggagagggccggaacaacccaggcgtgggcagggccgacacccaaaggaccggcagggaagccagaggacaggccgcacgagcgcaagaagaaggtgcacgaagggagaaaacgagggactgggaaaagccctggagacagagagcaccagagaattgaaaagaaaagagaaagagagcacgacgggccgagggg

SEQ ID NO: 10138 - DNA, 1801 bp, Emericella nidulans
gcctagacgtcaagagcaagcacattcctcgggccatacaataactccatacgccgtctaggatcccagatcgaccctcccaaaatacgaaccaaaaccattataatgacttcctctcggtgcaccagactgcacaaccaatgcgatgaatgtcgcattgcccgcagcaaactacccagatgggtcaacccatcgttcctcgaatgcccaggcagcacctacccagtgatctttaccggtacatacgtcggctcacgaactcaggccgagcacttggtcgggatcatacgttcctgcgtcttcggcctctacggtcatgacgttcccatccacgcagcctttcaacgcaccaccgacgcagacacgggcgtcaaggcaagcccgtaggtcgatataactatcgacaataaccaatcggacccttggggactgagcgtccttcctccgggcacaaagttgccagggactaaatggaagagtgctggtaagcccacgcggaatttgcttttcaaggcgcccaggctgattgggcttgctgagccaaaggcctgctacgagagacagtgtaagggccatctgggaaacgagtgatcacttgtctggttgactacccgcataagatccaaaagggtggggacatggagcaggtcattatgcatcgactggaaagccagggctttaatgggtacacccgacaccccgaatccgagcaggatcagactccgcatgccagtctgcaccgtttggactggtgggttcttacgcacccggaaattgtgatggaggatcccctgaagctgaatcaagagaaaaagtacaaaccttgcgaagtgtatatcaagaacaaagcctatgttcggaagaagcggtaggtttgctgcgatggctcagtttctcttctggtttgcctttggcttgcgcatcgcggtttgataatctgaattaggaatatggcacacattcatatactcttatcattagtagtgtgtaactcagataagccggtatcaaatcatacaacctctgcctggcagccgcggagcccaagcacttaagccgcaacggttgagattccatctttctcacggctatagtatcggaaagctcgtaagaagtctaggagaaaaatcgaccggctcctcacattcatctgtcagcgttgcatcacacagcctgctcacgcgataatgctcttaatcccctcctccaattccttcatattaccgcccaccactcgcttgtccaacggcttaccgtccttgtagagcacaaaggtgggcatagcccggatctgatgctcctgagctatcgaacgcgccttgtcgacatcaacctgaaggaacttgacgccggtatatgtctcactgaactttccaacgaccggagcaacggctttgcagggtccgcaccatgtagcaaagaaatcaacgacgacgggtcccgaagagacgagggccttgaaaatgacggggctatttgcttgttagcgggtagggatggatcgaagcggacggaacgaacttgtccacctggatcacttttccgtgagacattgtcgcggagtcagcggaacggtttcggatgaagtagcgaaagactagacggccaagcggttaggaatgtttttttgttcaactagagtacagtagcagcagccaagtgacataccgagatagatagcaagagcaatgagcagtcgagagatctccatgacggcgagaaatgtggagagagacaaacacgagcgggcgcgcggcggagatcacaggtcgaagtcacgtgggatctccgtcaatctggc

SEQ ID NO: 10139 - DNA, 354 bp, Emericella nidulans
aaggccgggaagaggcgccccaggggagagaggaggaaagagccgcggaccaccagaaggaggggaaggcgagagcaagcattgtttgcagaacggagcgcgccaaggaggggcagcccgagcgagcggagggggaagcgcaacagcggcaggcaacggcgcgacggccggggaaagcccggaaagcccagaggacgggaggcgaccgcaggagcagacccaagagcagccccgagggagagaggacagcgagccgacggcggaggcacacggcccagtccagggcgcagaatcgggaagagggaagcagccggacggatgcagaggagaggcagcgacaggaaaacaggaaaa

SEQ ID NO: 10140 - DNA, 1526 bp, Emericella nidulans
tacgatcgaaggagtggttgaaaagctgaaagtgacccaaaagcggaaatgatggcagaacgccaaaagacgtttcttccgcgtccccgccagtctcgagtccgcaacaatcagtcgaccagcagcgcacgagaaaagtgtttgactccgcgacatagtcgatgcagtcattgcgccggtgagaaattgacctgagaatatggctgccaattcctcagaacaagaattcctgcgtcctccaaggtgcgcttctccgcattctgagttcgccgtgcttcgttaactccaaaccactcctagcacacaacaatatgagctttcacatcgaaattcctccatctacaatcctttgaataccttccgacttcctcccggtcaggaacgacaataccaacagcaatatggagatatgtacttcttgcggctcgcgaagctgaaaccagcggtcgaggcggttgcagtcgaggcctgggaaggattcagtgtacaaagcccctcgcatttggttcctgccgccgtttcctgtgtactgactctttgtggattgcagattgcaggagaacatgcccgtcgcgtggaacgagtactggatgtccgacaaggagagctttgctgggttgcgggcacaatatatatggagatgccattaaaacccaatattcttgatgaccttgcaaaagatgcaagttgaccggtttaccctcgtgaggcacgtactgacagttggcagaacttcacatcagcgcctccccctcgacgaacctaccaagatcccgcacacccagagctaacggagatcatgctggaagacgagtccggacgactgcgacttacaggaagtaagcttcagtcagttcaactagcgacaggggtaattatcgcggtgcttgggacagaaaacgcaaatggagattttgaagcgatcgatatcaaggttcctgatctcgctcggcaaccacggcggtgggaaagagatgaagcgaaggcacccaaagaagcgaagaagggaaaaattgcaatggtcagcggccttggaataacggggacctcaagtgacaccctcgcccttgagctcctgacagactatcttctaggctacacgggatcatctaagggcgaagagggttctccgccagatgctagtaggattacgaggttgatcatcgccgggaactcactcggcgcgagcaccatcgaggcagcaccggcaacggatggagtaccggcgaaaaagattgcgcaccagaagaagtacggatatgacgcttcagcgtataacgcatcacctattacacaactggattccttcttggcagagctcctgcctagcataccgattacacttatgccaggcgagacgacccagcgaatttcgcctgccccaacagccaatccaccgggcgatgtttctcggtcaagggcatactgttccgcaccgcaatcggagaagacaaagtagagccgggctggttcgacagcgtgacgaatccttgggagggagacgtagagggatggcgattttgggg

SEQ ID NO: 10141 - DNA, 1407 bp, Emericella nidulans
cacttcaaggcaaattgcggagaagttctccgtcatcgaaggtgggcaaaaatctcagtaatctctaggccataacggtgacacccgaaatgcagcttctcaacggtcgctcatgcgtgaagcttccaccctggcctttctaccctcgactgcgcgtttagaagctggtttccgccggcgtgcgaggtcaacttctattctcttcgtggagttggttgacttggcctccaccaccgacgtcagcggccacgagacgcgctatcatgggttggcggcatagaatcgactaaccggacgtgcatgtcagataatcactgttacggagtaatatcccctccacttggagtgaaacgagacatcccgcgcttgtcagaattaaatcgccattggtgcctaactgcagcacgcagaaaaacccggccttgctccccagctggggatccgggaccgccggataagggaccgcgatcctgccaccgtaagactgcaatccgttctatgtgtgatcctgattgtttgcatgtcaaccgccttttctgacatcgatatcccatacttaaagaaggcgcatgctgacggaggttctttgcggatcgctggcacgatcgagatcttaaccttaactcgaggatagacagtgatcttcgaggcttgttgtacggctggaggatggactgctggatcgatatccatcagtgaccacaacgtgattcgaaagctggtagttcatagaatactccgcttcgtagagactagcgcctttgactagagccatgaccatcaaccatcgacggttttgagagcaggtggtcctcacagcgatgccggcaagcgcccgggcatctttacagcgattctctgtgcgttcggcacagctctaagcattcgtctgccaagggctatctgacaatctggttctgccattcccgcgatgatcacaggaatttggcgtccctgattcgacgataaccgccccccgcgaggtgagcgacaggggccccgaggacgaggcagagcatggatgatggaccccgcccgcccatgccttgaggcttgccaccatgctggtcagagtatgatgtatcacggactggtgcttccttttcctcaggctaaagtttgggatgaaccggttccttggaaaagcgatcaactggaccatagagcgccagaccgcgtggctggcactgtggcacaaaagcaacgacgaaggcccgcaagttccacatgctgaaagtggcaggtgcatgtcgcctcccaaactgccagacagccagactcaagcgggtcgaccgccaacgtgacctcgaataggactcgtggatggattcttcacgcttcagtgttcaactcttcatccacgactcctcttagacttcaggctaagcaggccaagagccattgtgc

SEQ ID NO: 10142 - DNA, 341 bp, Emericella nidulans
gacaaaaggggacaaaggaaggagaagcaggcaagggacaaggacaagcgaacagcgcaagaggcccgggtgcgccgcggatttcttcagcgagaaccccgacagggaaggcgacggcgtcaaggcgggcgtccagcgccccggggacggcgccaagcccgacacgggcgaccgcccgaggcgcgaccaggagcagggcacaaacgacgcagccgccggagaccgcagcaaagccggcagcccccacggacaggcccggaaaagcagacggcacgcagggagacaaccgcacagagggcccgggggccaacgaggcggtgccgaacgacggggcgccaaag

SEQ ID NO: 10143 - DNA, 1220 bp, Emericella nidulans
ccggtatggttttacgcaataaagacccggaggatattcttagggaacaacatgaagaaatgcgcgggatgtttctgcagctggccaaggacctcaagaaaatgttcgagctggcccgagcagagatcgaccgggtacgactcgcacggtgggaagaggagcagaaagcgaaagatcaacgagctttggatcgggcgattaagcagtccaccatgttgtttgaaaagcgacggctggagattttgggcgaaacagggagcgatgccccggagactacaactgatgatgaagaagtcgagactgataatgggtctgagaatgatgacgaggagggtgagagtaatatgtcgacggaaaccgaagaggaagacggggatgacagggacgatgatgtgggcctcactgcagaggagctgcgattgaaatatgcaaatttaccagataccaacccccatccagaccaatctccatattccgatgaggactctgaggacagtgacgacatcgctgctgacaatacccctggcgacacttctggcggtgtcaaccgatctccgccgccagattcttcgggtcaagtagaactcgacgaagttgacccagtgctcatagatgatagtgatgaatctaccgatatggacgatgacatgggtgacagcgatgacgatggatatagcgaggctgagtcggatgacgaagacggtggtgaacctggattactgggatttttctccgcaaaggacttaagtctcagtaatttgcatcaaactaactctggtgagggcgatactcatcaaacaggcgctgatggtgaccgcaacgaggattcatcctttgatgagtccgaattcgggtccgaagacccagacgaagttacgcttgttcctactggaccaacgaataaagacctgagcacaccggctacagtcacagcttctgcggagctggaacctgcggcaatgaccccttccatagatcagacatctaccgaagagcctatcgccatcggtactgagaccccaattgaaaccgtcgctgaggatgccgctgcgctcgctgatacagagcccgttgacgttgatgtattggatacttctactaatgacagcgttcctccagttatgtcacctgcgacaaacctcctcaagcaaattgagcggcaacagcatgagccctaccatagtagagctgcttctagcgaacatctcctggaacggtgg

SEQ ID NO: 10144 - DNA, 601 bp, Emericella nidulans
ctgagtacagattttgttcgtcatccgagctacttcgagccggagagctttcgatagcaggactccccgttaagtcttgggcagaggacgcggcagagtcctccatcgcaactccaaggagtggtttaggcgcaaatcctgcggtgtcagacatgctccgtgagtgtgccgccggtgtgaacggctcctccgggggcacctgttgcaccacagcgtccaccgactggttgaacgtggacatgtactctgggaaagcgcccttgcgcgacggacggtgccgctggaacttgactatatcggttcggaagactggcgcggaagcgaggtctgcttgcaatgctgcttgcccgactgctagcatcggccattcggcgtgcggttgcatccttgagctgctttctccactcggcctcactccaattttgagagccaggagtccgcagaaggttcacgacatcggcgagttcaagataatcataacgctcttggtcggggaaagcgaacatgatgctcttgacatggttgaccgcagcgatgagtcgagttgggcgaccatagaggttgaaggtgtcgaaagttggcattaggaactgaagcatga

SEQ ID NO: 10145 - DNA, 1618 bp, Emericella nidulans
tttttgaggtcgctgagtcctgttgttctgaagtgtcgcgacagatgatgagaaatgaaaggaactctttgtgggcaatgagatcggactctcattttggcaagagtcgcaaaggtcgaggattgagtattttgcactgggaacacaatcactttccagaaagctgcctgtcagtattgaatgtatggtcaggttctgtttgataccgtgacaatacatggtcctgccttgacacagggttatccctgctgcgtgctgactagctgcatagagtggttcggttgcccagcttgggcaaggcagccgatgcactctcagtaagacaaaagaaaccactactgataatcctctctggacactacacatttctcaacgaacaatgctgggaaaccgcagagaaaaagggtacagtctcctgccattgacaggaggacagccggagcggctaccctaccactatgtcgcgtatttcctgctcactgcgtcaaacatcctcttccttggtctctggctgttctcaggacacatgagcagtgactgtatcagaccgcagatatcatactgtaggtatcgccaatatatagacagaagcaaggctgatgtagtcctcactggtagcacccgccaaagacgacggtgccatagcctacgtgaagaagcgcctcatgcgggatattgagcataatccattcacgggggaacctcgccctgagcttgatgctgcctggagacatatacttgagcgtaggcccagacttggttatctgatatgaagtttcgtttgtactgaggctatgtccagcgatgaccaccaagatcagtgcagaagaactcgcccacctccctgacacaagcatcccttttgcagacggctctgggtatatcgctgagttggctgtctatcatgagttgcactgcgtggtgcgtatccaccccaggccgtttttgcgtatttcactctgtgcggcattgatactgagtttaaatttctgggtagaaacgagtgcgccgctatctccacctatcgcactacatgcccaacatcaccgccgacgaactcgttcgtgaaaacacccacatcgaccactgcctcgagtactggcgcgaggcagccatgtgccggggtgacacgacgctcgcgacattccggtggaaggacggacttccctacagcagggtctatagtgatcacgagtgtgtggattgggaggccttggatgactgggcaagggggaggatggtggatatgagtgattattctattctgaaacagaactagcggttatgattatgcttttagtctcctatgttgcgcagaaaggtctatgtgataagccctgtatccgaagaattcgcccatttctcagcccagttgaatacactctcataatcacgacatatccggggctggcccatccgctcgtcttatgtgtttcgcgatcaaggacttcaaggttcgtatcggccgcacacattatagtctgccggatatagtcgaagcagtgccggatatgactgggggccattcgcgtccctgtctggttgaggaagtcatcggggggagtaatgtttcgctgcaagttcgcggcgtcgagcgctgagtggtacgacactagga

SEQ ID NO: 10146 - DNA, 1522 bp, Emericella nidulans
gtagtctacctgaccttgtaataaacgacctgaaaccgggtactgtggtcgctttcaagcagctagatgtctcaaaggctacaaactggcagcccacagtgtcagactatcgtgtcgctgtggttagcgaagtcttcgacgacaatattctcaacatgcaactcgccaagccgtacagaagacaacccagggatgcagacgctgaagagggacccttcagttacagcgggtttgagatgcctggcatggaagatgacgagggagtggacgatgggtttcgcgaagtgccgtttgacgatcttattggacccaaggtgctccgcgctgccccttctacagatggtagagagaaagataccgccaacatgtgagaattagccacccttggtacatatcctcagtcgtctggagcttacccgtccaagctttcctgcagacgaagtgccacctgcacaagagcctagccaatctgcgaacgacgcgccaactgcaatcaatgggcacgaaaaccagcttgtacatacatctagtcagcgagaaatatcatatcctagtggcaaacgagttagcacgcccgatcccgcgcctctagaagacagttttgctcggtcacctcggtttgaaggttttgacgactcaatggagactaccaatggaaccgacacggtgaattcgagttacattcgtgacgaaaatcccggagaacacttctgaaaggaacgattatcccagcttctttcttcctatcctatcaacgcggcggtgacggcctccaaaggacaggcttgaccgttcagccgcagacgatcagcagctgtatcaatagagtcttcccaagtatgaaggggtttctccacctatcgccgaaagccagtggaaagagcagagcgtgactctcctatggttcccatccgttctacgaagttgatgaagcctgcaatgagcgttaacaaaacttgagtaccaaatttagcgaggccggtcaactgattagtgcatcctacagaagcggaggggactccatagaagcccagggggttccgcagagcccgcagagctcgcaaaggtggagggcgtggaggagtccagcttgatttcagcttgcgtttaaccggccataaaagacctggcttcccccatttcgcagatacccgatctgattcaatagtcgctctgatccaatctagcccttcggtatcgtctggtggcaccgctgagcatatcgcagagacgcaccaggttcgcgggaacatggtgggtttagaaaaacgatcccattacgtgaaaacagactgcaatcgtctacgtcgagtcaggtcatttgggtacttagattaagggagcatcagcccatcgcagcacaccgcgatgaaggcgggacgcagatctagattctgatatttatgtatcactatccactatgtattttatgcactgtatatctactgtatatccactatatatttatcctgtttctatgaattgacgtttgagctgcaggccttgatggtaatcgaatttt

SEQ ID NO: 10147 - DNA, 1871 bp, Emericella nidulans
tcaaggccgctatcaagttaatcgaaatattgagccagcgccgggacgcaggtgaatggcggcaccttgctgcatatgattgtgcgcgcctggagagccagctcaggcagctggcgacatcgctagcgacgcggcagatcacgccggcgcagtatcggagccgtcgtacgacgaggtacagacagcaagggcactgatttgcccttgtgcgaaatggtaactggctgggaaatacgcctgatatccgcacgatcgtccagaacggaatgacggctgctgctgctgcgtaggtgatggctgtcgcgttgggcctcagtctgcccaatgatatcatcatggacttgtcgtagactgcgcgtaggatttccggacatacccaaagcttcagcgtgtcaatttgtaccgatctgttcggcctttttatctgtagctattttgtgcttgagacgcttgctggtagcgtaacctagcatacaactgataaccaccactatgtctaactggttttccatatacctatttgtcaacaagacagcagttgctgttgtcaactaaagcaatctccgtcttggtgagacaccgcgcgagctggctacagtttccgtccatgaatctatgtttgtggaatataggccccgagatatgccggagaatatagcctacacgaaagaggagccgggagttggagtgatataagggaataccaagataccttttgcaccgtgccaattgcgggatggtactctcgtcgcctttccaacgatgacagctgatcatcggccagagcaatgtagagtgtgaaagacagaactctgagctcgcatttggcgtcatccgttgggaaaagagaactatatatttagaaagagaatgaagtacagtaacttacatccgatgattgagattctttccaccagtcagccttgcagatgagcctgatcgaagatttactaggaaagtagtatatttccatgcgaagactcagtcaatgtgcccaatgccacaacatcctgcggtcgtgctgtttgtaatagcttgatgaatccggggacgcggttgttccctcgctcgaccccattctgaaggtagtcgctgtatcccgcgtatgaaaccgtttattcaccacacactacgatgcttgatagttccctccacctacggcttctaggacatgggatattatatcttgaggatgcccctgcgcaggtcaaggtcaagaaaagtaaaaaagaaagaaactcaaggcattgtgcttcgatacctcagcaataaattataatccaaagggatcgtcctggaacttgacaacgtccgagaattacgagtcataagtagtctaatactccttcaatgctgcaattcctggtaaaggactcgggcagcaattacccgaatcccgcagcagatcccccgaggccgagatcggactctgtggacggaacaatctaggccacccaggttcttacggtcaacatcagatgcagaccctagcggcttctgcatgtaaaaatactgcgtcagaacaaaaagcgtacagtgatactgtacatttttctggaacagaatccgccaaaacgggtattctccatattatagggctgatcgggcaaattgcgggactcggccctcgggctatctcctgcgagatgcggggaactccaaagggaaggcctcttcagcttaccagaccctcccagacctcgttttgtgagccagctcactgagatatggaggaagataacggcccagactcatccggatccgcagaccagacgatccgtggccccgaggtaggccacgcctgcaattcgtgccgtcggcgcaagcttcggtgctcgagggaggtaccggcctgccagcactgtcggaag

SEQ ID NO: 10148 - DNA, 296 bp, Emericella nidulans
  unsure (1)..(296): unsure at all n locations
cagtggcgcaagaggagcagccaaaggacgagcgtccaaggccccagggcgcgagcctcaacgggacagccggagagaagagagtataatccgcggagggcaaccgcagagggaacagcagacggagccggcgcgcaaagccaggcggggacacggagcgcggcacacccgggacggaggaggccgcaccccaggcgagacaaagagcccgcgcaaagcgggaagagcgcgccgagagcggaaggcgcagagagaaggcgaaaaagngcggctgagcagactccagcgacccgacg

SEQ ID NO: 10149 - DNA, 399 bp, Emericella nidulans
  unsure (1)..(399): unsure at all n locations
agcgaaggaccgcgcgcagcggacgccggccaggagagccacagccgccggaagggggacagagaagccaagacggaaccaccgattcattcggaggagcggcgcgcaggaggagcaaggagccggaccgccagggacgagggcgcaagggcggcgacccccggcggcagacgggcggagagaccaggggacagggcgggaccaccagacgagcgangcggnagngccgcccagggcaggagagcgaggcgaagagngacacagaccagaacgagggngccggacgagaccggacggacggcgacagcgacacgcacgagagagncgaaaggggggacgnggagaccaccgcggccagaccaagaacgcagggccggaagagagccgcaggagcacgga

SEQ ID NO: 10150 - DNA, 396 bp, Emericella nidulans
cgaggaacggccgccagggtgcgggaaaggcgggcgccgccaagcgagagaagagaacggcccgagggggggcgccaagagaccgaagaccagcggcagaggccgcagaggcggtcggtaagccacagaggaaaaggaccagcaaggcagccggagccagggaggccggggcccagacagcggggacggccgcagggagcggggcaagagccgggatagccgcccgaagcggcagcggaggagccagcggccaggggaagagccgcagcagaagggggaccggccggcgagggtgcacagccgcgggaggcgccaggagggagagccagagactccacggagcgcaaggggcggcacggcaggggcagccgcggccgagagagaggccgtgaaaga

SEQ ID NO: 10151 - DNA, 1697 bp, Emericella nidulans
tattgttctctcaacgctggatttgacctatctaccttactacaggtatatccgatacttggatctagacgacctagggaatctgctaggctctggaccgtctgtcaaggagtatgtgctttttctcactgcgtacaagctctgaccgttgatagacagttcttcacacgagagcttctcgaatttgtctctcatgagcgtcttaaagatggaaataagcggcggcgtgtgcagactactgcgatcgataatgaatggattaaaaggaagcttgggacaggtcggtcctcgttccataactagcgatgtttttttgctggctcttacttacctcttgaagtgatcgttaacaaaaacgccatgatacgaggaatgtcttgcgacagtatgtgtttcgtggtcaacgtgttacccttctaataaacaacagttgcgcccgtagtcttaaacgaatggattgaggtatcacctcaactacaaagcctgaccgtctggtctggaagtacactctcgcagcaagctggcgagaaaatccgtgagcactgccctgatttcagacagctccggatttacatatggtacgatctcgtatactattgagtcctagcactaacgccgtttcaggcaagacaaaccgcccgggaacgcagagatagaagcagaggagttgttcaatgcgctgcggccaaactctttagaatacttcgaagtgcttagcttttctcatctaggtccccggtcaatgagcgcgttgagaacacagaaggactccctgacggagctgaaattgaccagtctcaacattgaaacgatacgcgaactggcctcattgggcccattgcccaaattagaggtcctgagcctaacggactcagcgccggccgcatgggacgagccattctacgagactcttgatgaatcagctgattggattgggacctgcacaaagttaaagcgtctcgaagtcaggagatttatgcacgattccagactgttaagcaaggtattgatgaacgacaacatccacctcaccagcctatcctttgccggcttcaggttacaagagggcttcagattcctttacgaccttaaaaaccacagatccctgcaatatctctacctacgcggcgaaggaagtccagattccgcccagaacaacttactagtcgagagcgtaggcgacctccacgagcttcgcgaacttgaactcaaagatgtgtccgacttcttcaccatggaacaagctggggaactcaccatgtccctccccagtctcgaacgactttggatcagcggcgaagcattcaacgattctatctggcccgccttctcgtgtctctcgcaactcaagagtctggccatatatgcccttagcaacttcacagcgggcggggtcatcgacttcatatcgcaacttggtcctggaaattatggactgagtctgtccattctcaacgcaacatctgctgttgaattcccgggcgaaatgcaggtgaagattcgggagatcttggcagggagtctggaaggctcgtttgattttggcctcgctcaaggtgcgatttattacagtcgtctgcgtgcagtgaaatcaagttatactgacatagtagcagaagagttcagcgatcctgattccgagattgaattgtcagattagggacccgccaaaaatgaggggcttcagaatggatgac

SEQ ID NO: 10152 - DNA, 532 bp, Emericella nidulans
ggtgttatttttgacacagggagtcaacccttagcgtaacgagcgcggaccgtgggcgcaacatgtacatgtgatactgagatgctctctgctaccaatttttgagcgcaccgacggggcatgatccgctcgcgttcatttcgatttatgctaagagctcatgcagacaccgaactgctcacctaaccacatgcatagtcaccgtcattaaccgacggtgcggacgaacctaccgattcgcacaagacagaatctggccctgatcttactgcgcgtttaccgcgtctggaactcggacacgtggccttccgcctgatacagcaccctcttctctttactctatcacacagcacttccgctctttctaaattcatggttcgatcacgtctagcacgacatcccctacttacattcatccccctgggctatctacctcactcggcagctcctatctacaagacccatttaactttcccccactcacctctacattattgctacccgtttctacacataacccattcctgctccc

SEQ ID NO: 10153 - DNA, 1157 bp, Emericella nidulans
gccagagcccttgaaaactgaaactgaggctcctccagacacacgcttctttgtacgcctctcaccaaactatcttgcaaagaatatagacacctttgccatttgctccagcctctgctctaggctaggggaaaacagcaagctactaaagggtgtccagtctataaagacaggatttgtgcttaccctatcatccccagacacccttggagccttagaagcacaaaggaagactatatcatccttttttgcccactgtcagatagagcgaagttcctgttagattgcctattaagttataaatataccaaaaaaagttggccaacttaccaagagccaatatactatgatccctgtaaaccctgagatactatctacagaggttactaaggctactagcctgacccttatttctattgcagaaactacttctagtgctgccaaacctaataatatctcatcaagctggtttattaacttccctgaaaacagcagagccaagctccctgtataactacctctatttggcaagattaccaatactcaacccctaaccaggaagaccaagactatacaatgtacacactgctggatgtggcataactccaggtcctgtgcctgcaacccccgctgccgcctctgcgcgtctacacagcatactaaggaaggttataccaactcatgcactggcctagctcctcacttctgccccccaaggtgcttgcactgccatggaccccacccagcagactataaactgtgccttctcaggcccagcaaacccagccagcgctgtacaaagacccagcaagctgaaatacgcaagatctgcttattaacactcaccaaggctcgtacagagagccagtgctgtatacaagccccatcagcctccaacacctcccaggaacaggctagttcggccgatatccaacacctgccttctcccctccgtccaaccactcccccccagcaaggcccagcagactccccacctgttacaactagggcagtacactttgccactccacaaccacaaaaccgttttgacatactaataagcgaaatcctatgagttccaagaaccagcaaacagggcccctctcaatactccagctgaacataggccgcgcggccgcagctcataaaattaccta

SEQ ID NO: 10154 - DNA, 495 bp, Emericella nidulans
acctcttcaccaataaagccggtgccttcttgtagaacaacaactcgatcctttccggattcacagagtacatccgcgaacatgcccttactccaacctccgacaaatctggtacccccattaaatacctcctggacgcctactccggctccggtctcttcacgataacgctctctccgctattcaaatcgagcctgggcgttgatgtggccggtgactctattgtatcggcgcgcgaaaatgcgcgtgcaaataacttgcctaatacgggatttgccgctgctgatgctgcggtgctcttcaaagacgtgccctacccgcccgatcaaacgttactagttattgatccgccgcgcaagggatgcagcgaagatttcctgaggcagttgctggcgtacggaccgaggagggttgtgtatgtcaactgtaatgtacacacgcaggcgagagatgtggcggttatggtgcaaggggatgagaagtaaggtatcaggt

SEQ ID NO: 10155 - DNA, 1142 bp, Emericella nidulans
acgccgatatgtgtgcgccgaacaacccaccgaaacgcccccaagcggcagaagaggaacccggccatgcagcgaaaggagaagtcaaacgagtttgacgaagtcctacaagccgacgttgacagactactgaaaagcaagcgagacggcagcccagccgctgccactcccccgcagcctacgctcccagaaccctttacagagatcgaagtgacagtcgccgaaatatcctcgacgggtgatgggctggcgttgtccgaaaatggtgaccatgtctatgtcgtccccttcactgttcccggtgacaaggcccttgtgaaggtcgtgcggcacgtcaatgccctatcctacagcgtgacggactttatcaaggtcattgagcccggtccgcaacggcgagacgacgcaattggatgcaaatactttggcaaatgctcgggttgtcagctgcagatgctgtcttatgcggaccagctggcgcataagaagcgcatcgtggagaaggcgtacgccaacttctccggccttattccggaactgattcctgccattggggatactttcccatctcccctgcaatacgggtacagaactaagctcacaccgcactttccacctccaaaacgcaatgacgccggagagccccaagtaccgcctattggcttcacatacaagaaccagcgccgacacctagatatcgaagactgtccccttggcacagacatcattcgagcagggctcaaaagcgagaggaagaaggtagcggaaaatttgcagcagtacaagaagggcgctacgatcttactgcgcgaaacaacttcccgcacacccaagagctcgacagacaccgaccctacctccgccacaaaacccaccgtaatcacctacgaaaacaagaacatgccacaccaagaatcaggcgacgtcatcactctggatcggccgaactatagcgaagagaaacggtgcgtgacagatcaaaacgcacctcgttgagtacatgacgatacctttcaccattaagccgtgccttcttcagacacaactgatctttccgattacaggacatcgcgacatgcctactcaactcgcaaattgaccccataatactctgagctactcgtcggcttacatacgtttcg

SEQ ID NO: 10156 - DNA, 1494 bp, Emericella nidulans
  unsure (1)..(1494): unsure at all n locations
tactgaggcttgacgacggccttgaggtcatcttccagcaccttcgtaaagtagtctattgcggtcagagcggatacaagccgatttgaaggggtaaaccttactctgcaattcggaacctcggaaatatctcaggatctcctcccagtccggcgggttatcataacggccaaggttgggcttcaattttccagaaagaatttttaaagctgtactctttccaataccgtttgttccaacaagaccaagaacctgaccaggacggggcataggaagacggtgaagcttgaagctgttggcggagtagcggtgggtgacctgactctccaggttggtcggcaggttgatgatatgaatagcgccgaatgggcatttcttcgggcagataccgcaaccaatacagaggcgctcagagatgaaagcgatcttggattcgggagtaacctcaatgcaaagctttccggtacggacaacggggcaggactttttacattcttgacgacatttctagatggagaagaagagtcagtgactaggccgcaagactgattggggcttgtatccgctcaccttcggcttgcactattggacgcgtgatataagtatatgacgttcatgcatagttagcggggcacacgagactcactttgtcagtactgacaatagcaattctagcgaaagtaagaaagtcagttacgaggcgatctcggagtctgcgggggtaacctaccgggtaagcttgtcggacatggtgcttggaagtaaaaatcgaagacgcgagtgaccagattgaaaagtaggtcgataaatcaagagaacaaagtcgacaatagcggaagctggaccagcgcggtagggccttcttagggacgattatgcggacctcaagcagacgataccagatatccgcgcagcaaccactagaatcaagaagagggagatgttgcgtaaattcgtcgaggaggggctcttgagacagaaatctatgccaggtctgattgtgggcacctattgctgcctcaggcatagaatacttatttcctggcttactgattggatcggtagtcatccttgaaaactgcagcggaacagctgttaatccgatccgaccacacgtgatacgttggcaccgctagtcttggaatggactcgcttgcgaatccgctaaaccaaactgggactggtaaaaaagtgcagcctgagggctcatgccgacngccaattccctcgctgggactcgcccgtncccccagccgacgtccaacttttttncctttacactcctcataatattcttagcggncttccatcattcctngcttgntttcaacgntaatcccatcacttcctccntttcccacctttttnntatttttttttttacaatcttcctaatttcagggcacggcccaactttaaatggattttttttttctggggctcttacgggggttccccggccctttttttccccccgaaaaggttttttttttg

SEQ ID NO: 10157 - DNA, 952 bp, Emericella nidulans
gaacgggcagcgcagccttaatcaaaaggatatcaccatcctcgacaatataatccttacccttggtcatgactttaccagcagccttgaccgcggcttcatcaccatactcccgaagagtgttgtagttgtaaacaattgcttggatgaaggtcttttcaaagtcaccgtggattacaccggccgcggctggtgccttggtgttcttccggatggtccactggcgaacttcatcagcaccagtggtgaagaaactggccaagtttagaacctggcgcatttgcacgatggccttgggtagaccagatttagtgccgagcctcttgcactcctcctcggcttccgcctcggtctcgaactgggtaagacgctcctcgaaagaggcggagatgggaaggatagagtctccaggggagttggtcttaatccactccatgagtttaggaatatacttgttcttctgccggatgtagtccttctcgctcaggttgaccaggtagacaactggcttagcagtgaggaggaacagagggttgatgacttcgacctgcaatgtctgttagttctgaaggaaacataacatgcacatgaagcgagcagaatcgagtgatggtatcagatagggtttgttctcatactgcctctacgttggaattaaaattgaggcattcgacgagctgggttaaatcgagcaaagctcttattcatcatacaagccggaaagacagggcaaatagaaaaaagggtgaaaaaaaagcatacctctttaggggtccagtcaccatgtctgatgttcttgcccgcctgcaagaactcgagaaccttggctgtggtggcctcgtcttctcttagcttcttcatctccagagactgtccaccacgtctcgtctgcttcttcagattctaaaacaccttctcgacgaattcgatatccttgatccgcagctcctcg

SEQ ID NO: 10158 - DNA, 682 bp, Emericella nidulans
atgcttattgctagcctgctacatggagattatactatactgaccaactgcagagtttgctccttaatcctgaactttcaaagcgacactgccatcctcaatggtaaataatctattccatcgatgcccccgttctactattaacgctcatccttccgtttacttattatcctaattctcactatactcacctctctctttcctcctctaatatctaccaactccttctcatcactcgctccactaacatttatcaatattatcatctcataatcttaatcttaatatccattctactattaatatcacatttttcacatcacttactaattatacctccttctttctccataatccatctcctattatttttacatatctttctacgtacttattctactctctaattccattacatttattcaattccatcatttctactcaaccttcacactcctcacacgcacactcatgaccccaccaacttacatactcatctctcatctatactctaatatctcatactattctatcattccaccactaacctcttacctaatcactcttctctctaattcttccctgtcctactagtacctactactttctacttctttccacctcataactcttctctctcttaactctactcaactattctctcaatctctctactccctac

SEQ ID NO: 10159 - DNA, 2186 bp, Emericella nidulans
ccgatatgcctcacgactataccaaaccagatcctcagtttttcctgaatcggtacgtcggtacggcatggtccatcctaccaatgcaatcgccggcccagttgggggcgctcttgcttcctgcctgtgcggcgttcagccataatgcgccgccgccgacattataccctatcctgctgtatcaactcgcaatgggatctttggcgacagcggcaagaagagctatcggatatgctagtgcaggaaagtgatctttttatctccgccggagcacacctctcagatacgctagacctccaattaaatatcctcatgataagtagccctaacttcctgtcaggatctaagctgatgttggcgtatacattcagtattacagggagatcggcaacttcgataaagcatatgcgcttctagggccgacagcgagcaaaatctatgcggcaggcttccatatcgagccgcgggggccggaggttgaaaaactgatccacattctcgttggacttgaggggtgcgtgtccattttttcatcaagaacgctgctcgctgcgatcctctgacagtctgttttcaggtttatctgtatcgccctcggtcggccaccaatcctcggccctggcatccaggtttcccatgagaacgagtcgaccgacgcgaaattcttcacaggccttttcgccatcctaagcccatccctgcgtgcgcagaacaaccctgcgaccggatctgacgagctatgccatctcatctggacaacgcaagcttgactaaaggcatactgggatgagtatgagccgctcctgcgcacgggcaaaccgagccacatcgcccatggaatatagaggacacgatgcgccttaatactaattgtaggtgtcccatgcagtgtcgatggttgacactgactgacggagatataagtatacgaatacgccgttctcacaaatatgaaaccctttcttctctatatggggcaccagtgctcagcacttagcagagcggcttctccagcttcgcagtcttcagggggaatgggcgtaaacacaggagccctcaccgtcacggcaaggctgggggatccctttaagacggccaatgacaacgcaaaaatggcctcagcaactgattgcatcctgacatcggccaaaagtatcatctcgacaatttcagaactgaggcaggggtgttctgatgccaaggtacgccgtttcttcatactattactcaacatgaagataactctaacaagtctttctataggatctccccatgcattctttcttcctagaagcagcatgcatctcgctcatcgcgtacggcgcgtggagcaacaatcaggccggcgtatgggatagcatagagctgggtgttcggtgtatggagcagttgcagtatcagcgcgccgcagcgcagaggcttgcaactgtcagaacggcgatggaacagactgggttaaaaaggcagttgtgatttatatgcaactttatatgtacttaataatctatagaggttcagacatttatggcaagacaatacagaaacctttcgtcagagctgcttctcaagccatgccaagctgtaacttattcgacttgtccaagattctatgtccaggtaaaactgactggtagtaggagcagaacggatgatttcgcatttcgtgacttttgtacgctttgaattgctggggtgtctataaatgaatccattataggggttcctctcctcgacgccttaaacagagtgctaacaagctcttgagcatctaacgcaatttcataactacaagtataccgcataccactacacacgtccagatttccttcctgaccggctcaaagcaacaatttcttccgttaggccgtgtccaggtcaagcgagcccagcctttctctattcgacaaccagttgactcgttttatgttatttgaatctttatcgtgcgaccgaggacactccttttgagcaccatttccgggaataatacgctatgaattcaaggatcgcatatattactaccagcctgaagcagcaagtaatgtttctgaaacagcaaatatcaaaaggccgcttcctgtagtgtcctgacttttcaggtaggaaatgcgcactccgcgtggtaaaagcattttcatccaatttctacataaagacatccaattgcagagagcctgagagcacag

SEQ ID NO: 10160 - DNA, 791 bp, Emericella nidulans
atcgaatacgatgtcttgtctgtgcggcgagagatgtcagttcccagatctgtgcctgtgacgctgcttccaaagctgtcgacgatggattctgtgggggctggtagaagcggtctgcgggtggtgatgcccatgacggagggaggagtgggatatgtattaattcgtataactccttcaggcagccagaaagttcatggtctgccgactttttccctctcccagacacctgaagctctcttactctctcttttcatccagagtgaggagggagatctgaagcagttgggcaacggggaaagattgggctcggggaagggaagggggcagggccagggaagtatggggtgacctgagccccgatgttaacagaagaagtgctaacactgatcggttggatcgatgtacagtcttcaaaataagggttggtcagggcgcgaacggagagagtggcaggcggggtgtggggaggtaaggaatgtaaggctgaggctgtcaggtataaggggaaaggaaagaaattcaagcgtaccagcgcagatgaattgatgagggagggatggaatgtaggaggagcagctgatcggtagatagtctcaaggagggatgctgatggttgtgggtggtggatggaggtgaattgaattgaggcttgctggacgttggacgaaggcagactttagcggctcaccatcccaacaccagccaggcgaagaattgctgccccgcgtgaaaaagacacacctagcaagaaagagaatgggagcattacccaaatgaatcacgaggtc

SEQ ID NO: 10161 - DNA, 1033 bp, Emericella nidulans
cagctgataagacgataattaacacgataattaagacgataaatataatgtcctctattccaatagcatatatacttgtatgccgatgccatcagattctcggctccatcctttccattagcaactccagtacagctcatctacaccttctggaacttaacgtgcttcattcccaatcgatctaacggcgaaaccatcttctccctgatgggcgtaatcgtactcttgaacccctccgtgtccctcgcctgctgatgctgctcataactctcccagccaagaaccaggaaatgaacaaacgcctgaccggactcactcttcccatgcgcaaactctcccggcctctcaacctgcccaagcagaaacgatttggggcgcaccttctcctccgcgtcttctgaaagggtcttgcggaatgtggtgaggtgagcgacgagagatgagcggtcggctgacgagagcgaagttgggaaggccagaggcgcgagctcggtcacggggtttgagacaagcgtggatgttgctggggtgtcgtcggagtcggtgggtgtgagagttgtgaagagggttgttatttgggtgttttcctcaatatagggatcgagcggggagttcgtttgttgaatcccactgtgggcgtccgaccagtctgctactcattaggagattgtttcatcttcttgatatggttgataattgttttgtggattgggccggaggatgcatttgtagggatgctgtactgaccgatcgcccaaacgataacgttcttatcctccttcgtacgaccccatgcagaaccaaggtgtccgctttgttgtgttgttgctttgaagagctggagaagggcggcgcctgtgtcgcttgaggggttctcaggctccacggagctcttgggctggaagtaaataaattcggtgacgtgaggcattctgcgttgctctaatggctcagacgatatctccctgcttaacttctgatagatatgctgagcgatctatttcttttcgcagggtaaagggttgagaaatag

SEQ ID NO: 10162 - DNA, 961 bp, Emericella nidulans
cagtatgtcatccgataccttcaagcgacaccacccgggtcagctcagagccgttgctggagcctatggtgtgccttaccttcatggacagcacgcgccagctcctgttgccgcaacctatgcactatggtgtccgcaaactccctacgctggggctggtcctcatcagcctactccctacggcgcaccacaggctgctcagccacgtggtggcccgacccctgctgctcccgtcggcggcgctatgcccggccagccgttaactcagcagatctatatcccgaacgatatggttggcgctattatcggtaagggaggcgctaagattaacgaaattcgacaccttagtggcagtgtgatcaagatcaatgagccacaggaaaatagcaacgagcgtctggtaaccatcactggtactcaggaatgcaatcagatggcgctgtacatgctctactcaagacttggttagttccgcttctactctctttacttggcttccttgtttaaccagctgtattacagaaagtgaaaagcaccgcatttagaccgctagtagtttgtgtgcgtgttttcccatttgcgttgtctatgaagagcttgggctatctgtattccgacaaaaattcgtttgccatggtggtggtgatcttggtggtttcattagtggccttgcatattttctgttgtactattgaaaagcgctccctcgaagcttcagccgtatcgtgctcgatttgaacagactatatgtaacttgttgttgcgcataattatggatttgcttttctctttcaattccccttaacacatttcggtatagatacttatcgagcggcccactcgagcggacaatttgacatcaccaccacgattcctgccgatgacatcagcctaaccccacgcctggttcctctcgagagagctgttctatttctcaacctttacctgcgaaaagaaatag

SEQ ID NO: 10163 - DNA, 557 bp, Emericella nidulans
tcaaccgcgcagacctaacaatggtcatccagcccatgactcctctctctgtgaaggccgacaacgacagccggtgggatatctcttcagtttgaacctgcccctgggcaccattagtatgcccccagaccaatcaacctcttgatttattagcctctcccccagtctatcccggcctcttgactcactccttgctttactggtgtttcctcctcctccctctcctctttctccctcctcctcttatcttttcaccatttctaaactcactcactctccaactcatattttctcttctcctcgatatcgacttctaataactacctctactctctcatttactcccattctcttcacactcgtcttacttccttatatcaatctatctacatccctacatcctctctttcctctctacaccctctctacgtattctcacacttttccactcctacactttctctatttcctcacacttacctcttcgtctttctctttcacttcctctcaccctcactattctattcctacactctcactccactctcattaccatc

SEQ ID NO: 10164 - DNA, 1174 bp, Emericella nidulans
ttggatgggcaaaaaaccgctccctcccaaagcggggagttttcaggttttccttaaaggctacaaagacgctaatcttttcttgagagagcatccgtggccagatcagacgaacaccggcttccgtgctcaggacgctccgaaacgcaagaagcgcccctggaatgaggcttgtcgaccgtccgggatacaatcggacgatgaagacgagggagaagaggacgaagattatcatgctcgcacaccgtctccacaagaggaaagcagggagcgacgattctactggacggagaatctcaaacagtcctttagggaagaattggagaaactggttatcctggattatattatgcgaaacacagatcgtggtttggataactggatgatcaaaatcgactggaaaacagaggatgtctcgattgtggcggagccgccaaagccgaacgagcaccagcaggatgatgacgaccatttggttcctccacgaccagtttcggtcaactctgacaaggcaacctctccgtcatacccatatcggcgacatgagacgatgcaagctgtgagtcgtacgggaactcctctgaattctcaggagcctcaagcgactatccagattggcgccattgacaacagtctgtcatggccctggaaacatcctgatgccgtgcgtcgcctattaccatcataggactgtatttatgctaacaattgtctagtggcgaagctttccctttggctggctgtttctaccagtttccctaattggacagccattttcccaaaagactcgagaccactttttaccgcttttgacctcgaccgcttggtggagcggtacgcaaatggctttacggcgggttttctcacaggatgacgacttcaaagagagtatgtttgcgaggcagatcgcggtcatgaaagggcaggcgtggaacgtggtcgaaacattgaaacaaccggatcatggtccgcttgagctcacgcgaagaacgcgcgtctgtgtttgggacgacctggtagatgttccggttgccattcctcttcgagggccgtcaacggaggcccagcgacgtaagatcagaggttatgatgatcgctacgacccagacaatgaagaaatggacataggcgctgctatgtcagtagctgatcaggacttgatgggatttcaatc

SEQ ID NO: 10165 - DNA, 346 bp, Emericella nidulans
ggccgccagcgcgcgcgaaagggaagacagggagccgggcgggcgaagagacggacgcgagagagagaacgggggagcagcaggacgcagagaacacggcgggggttatatgaccggggcgccgaggccggaaccggcgagggcatggcaaaaggccccagacggccaggagaaagggcgggacggagaagagcacggcgagaaacgagacgacctcgacgagagaccaggacaaggccccgcaaagccggcccccccagaagccggcccgcgcaaccgcgatcacgcggacgacaaccaggccggcgccagagccggaaggcagaacgcgcacgagacaaacaac

SEQ ID NO: 10166 - DNA, 310 bp, Emericella nidulans
  unsure (1)..(310): unsure at all n locations
tctatttgtgtgtatctctgtttgtctgtgtatctatatatgtatctcgttctatatctgtatgtgtatntgtatgtatctctgtatatatatatgtatctatctgtctatgtctgtgtgtctggtatctgtatgtgtagttattgtgtctgtgtatgtctctctatgtactattctgtcgtgtcttgtgtatatctatctgtctcnatcntntgtttgtntccgtctgtgtgtgtatatctatgtgtatctctgtatctgtatatctgtatgtatcatctgtgttgtatctatatgtgtatctgtatat

SEQ ID NO: 10167 - DNA, 1334 bp, Emericella nidulans
tttgggttgactcatcctggccggcttcggagttcccaaagtacgtccggcgagggttgtggttccggctgaatacgaggtgcgttcctagtactatctgcagttggttgcttatctggtccagctttcagtttatggactccgaaagggcgaaaagattgtcgaacgggcatccaattctcgaatccagtcaagttttgaatatgccatcaacttgccatggtacttgcaagttattagtctctaccattgattgtctgctcgttccctcgttccaagctcgaccaacacgtggtcgtggcaacttggagaccacaacctaagacggcataactttacttgccttaagattggtgtattaacagatatctggttatctatgcatcctatgctacgtgcgaaaggaacttgctcaaatctcagcgcatgtgctgaatagtatgaggtctcagattagccaggcctcttgtctcgaggttaccgcaacctatgacacgcatcgacaacgacatctattgtacgagaaccgccgcaaaagctccagcgaggccgcccatgagcaaccaaccgggggtgttgaaggtagcggcgccagtaaactccgggtcggacggggtgggggtggttgatgtctattggagacggcaattagcgtatagctttctcaagggaagcgcaaagacttaccgcgctactcggagaggtatgggtgacaggagtggttgctgtagggatgacagaggttgatttcacagtagttgagtcggccgttatctccgttgatgaagcgccctccgaggacgatcctgcaacagtgctggttgacgcggtctcgctttcggtctcgttggaagtggtagtttcagttgcggtagacgcactggacggggtcgtttcaacaggagtcgcatcgagtccgcagttttcggcagcagaggacacagaattgccgtagtatttccaaatgtcatacaccagggcgcagtccagacaatcgctcagcatactcttaaagttactggagtcgcaatagccatccgagcgtgatgccgtgattataccgcctagttggggccgtctgttagaactgcgaagttgacaggggattagagtacttaccgcagttggcgtgacattcgtactctggagtgccaggtgcctgacgcttgctcaggggcacaaagtcgggatactggaatgcagcaacagaagccacaatacaggcaacagatacgacactgaaagctctcatctttgaaatataacaaggttttgcgccgatgatccaaaaaactgaattcgtgggactgaacgctgaggatatttgtgataga

SEQ ID NO: 10168 - DNA, 1052 bp, Emericella nidulans
acagtcatctgatatctgcttctgctgctgtccatcgatacacgggatcggctacgagtctcacactggccaccgtccctccagggtctatgaggccacagttcaccgagagaatgaggatcgctggcacaacccagagggtgcagaggagtaatgtagcccacgaggcccggttatgggtcttctgaggcgtgaggcggaggtatatcccgacgacgcagcattttgtcgtgtagagggtaatgagatagaggatgtcgctcgtgatgatgagctggtgcaccactgttaggacctgccttcttctctacagcctttgggagtggtgttgtggattggtggattggtcggtctcggtagggacgggccactcacaacctggataatatttacgtctccctcgtcaagcaaatcaatcgacgtcccgaggccttttgcacaggcttcaaagatgagcgttgcttgaacgacggcaataatctgaaaaggtgggtaggtgattgtcagatcattctctctattaggctcacagctatgattaggcttgtgggggcggaagggtcgatataccgttgctcccagcaggacgtagtcgtccttccccaacggcgggtgcagggcgagcctcacatagagtcggatcaagaagctgaccagcgagagaacgagtcccagcgcaacgacgataataacccaggcaccgtggtggagatcgtcaaccacctggaatggcggcgagtagcctggagggacgtacgggccgggcatggctggagtcgggacagggcggcataagcattaggcggtccagtagaggaaggaggatgaatggtggaggtggaggggcccaagctggttttatttcttcagcattactctgtcctgcttctgctcggtatggcaggctggggcatgatcgatttacatggccgggcccgtcggtggaagcaaggtcccagcagtcaatcactcattgtcgatactctcctatctgaatggggttggttctatgctttctctttttggttcttacaacgtgcaggagaaacaac

SEQ ID NO: 10169 - DNA, 600 bp, Emericella nidulans
acgatttattaatagacacattccccgttaacaccgtcctcagacattaatcaggacgactatattttcttactctacatccatcatctccttactatatttcccttcaaactgttaccactatcctcatatttccccaccctcataattctcctcaccatcctctctcccaataattatttcctacactacttttacataacattaaatcttccaccaatcttccctcttttaatccaccactatactattaaataacctcacaaatccacaatatcttatcaccatactctttgacatactctctctcaactacactcatattttttcattttacatcaattacacaccctatttctaatttccctgccattaaccatcccaatatcccactttaatcatgatattcactaatccacttctctatccacctcattttcccataccctcatccattattatcatttctctccctcaaatcactaatccataactgcctatccttattactatatccctaaatctactatcatttctataactctagtaatttcattttaccctataaccttttcccccattatacacctacccactcta

SEQ ID NO: 10170 - DNA, 576 bp, Emericella nidulans
ttagagcaatctgggattggccattgctcggataggacgtccctggcagaaaccggtttgccctgaatcactgcacttctccagaatcctatttccttctattcaattacacggacttctgttaccgctctctacttagttgcctatgcctccactcccactatgtcgcctcttcatattttctcacatctacccctcctctctgcatcttcctctttcttttaacttttcgacatcatatctctacttctcacctccactactcttttctcccttctcctcctctattacttctccctctctcacttttcctctccttcttctccctatttattcatcctacttccctactatttataccctatcttctatcacctcttttctctttctctatcttctcttctacctattcactttcttatcctcattccttttttcatttatttattcaatcattcactctgatgatcctaccttaattccttccatatcaatcttcaccctaaacccgtaatttaatccaccataacttcttcttccatcctatttgtcctatcctcactttcatctcacaca

SEQ ID NO: 10171 - DNA, 106 bp, Emericella nidulans
aatgatggagttacacacttggacttccgttagactccaacaggtcgatcgagagacagttcagatcccgtaccatcgcccctagcggcgcagtcgccccagtggc

SEQ ID NO: 10172 - DNA, 1461 bp, Emericella nidulans
tcgaaagtcgatagctcgagcgacaggtcaatcgcgttgtttgtcaaggcgaaccacttgcactgtgtctggggcgtcggagctcgcgatggatatctaccatagcgttctggtagtgagtgctcgtactcgggtcgccagaagggcccatcaaatgcccagcagttgatgtgacttttctcccaaggcctcgatatgtcgagactattcaggtctatagttagctctgaaatggacaaaacgtcagtggcgagcggggatatacagtgatgccggtccccaagagcccgtcacgctcgacaatatctgatagacccgaaggagaatcatcgcggcggtgcttgtccatgaccctaccagaggagttgtctagaaccaagacctcatgtggttgggacagcgttggcgaaaacaggaagctcggcagtttgggtcgcttgagaggaagttctagtgcacgcgacgtttaccgcggcgccggatccctacatttgattttgccgtttcataccgcacaggccgggtcatgcattaaggtattgtgtcattggtctcgattctagtactaaccagaaacattatgaagatccttgagcatttaaaccagaggatcctacgtcgtgatctctctgcagcgcaattttgactgctcacaactcggagaccccttaagcttgcttaatcgagtactcacagaggacaatcgcgaacattgcgcagaatgttacggccggcattacattctcatggaatcaggttggtaaccataggctctgtaaataaatcatccccgagtatgtttgctgcgacgatcttccgccttcaggaggttgcataacgcttgcaacaggagtcgtgagcccaatttcgcagagcaggtctaggaccttgatccctgacgtgaagaaccaagatcatggcccttttggatcactgcctgccattaacaagcgtctagcgacttgttctcctgggacgcaagtattgtagaggtagcgacacatctgcgtatgggcattcttgtcgcatcgagattcttgattcctcaaagcatcaaaagtccaatttcagctgcattactttttcagcagggtcaaaacagtggcataatggatcctggggaattcagtttgattggctgattgtggcaaacttgttgccataggttaggactgggtttgtacctccttgagccgtcaggaatgtgatcgtctacaggtttcctcagcctggagagtattattggtggacggcaacccctggggttaaagtaaccccccatcttgagttttaccagtgttccctaatggattgtccacttggcgtgggctttagtgtgttactttcttagtggtgtcccctctccatattccctttttggccgtcatcaatcttctaaaccctaatttccatgtgcttctactggcacctcccctcatctccttccccttatctaccttc

SEQ ID NO: 10173 - DNA, 1491 bp, Emericella nidulans
cgggcaaagtcgtggttggatagggcgagcaggggggcggaaaagacaaacaagaaactaacgaacagacgaatattaccttacggtccagctgccttttctgcttttatccgccttggctgtagatcgtctcggaccggcatatgttaagtagtgctcccctggtctgggcttttgcggggtatctacgacccaagaccaggttaagaacttgggatatgtgctggcagaccgctccttgcatggcgcagtagacaaacatccggggctaggcaaatgtgctgttggatccaagacaaggtcttggtccgacattccgcgacggtggaaacttcaacacccttacaaatgaggagtaatcttgcaggtggtaaacaagtgcatttgaatccttcaaagcaatttcccgcaccggtctgtctctgcctgacggtatctcttctcgggaattccgagtctactttccatcggccaagaccatctcgatgacctttgcatgttggagcaggacctcgtccttcaaccgcctgcctatcaactgaacgtggcatggtgcgccctcgatttcgtctggtttgtctgcggcttatcagcatctttgaatgcggctgcggtgcagaaacatacaatcagggctatattgcacgtcacgaataaactcggcgtcggcggctttattagcatgcccaaacgggatgaggcaggcaggatactatttggcttagtttattctttccatcagtagaatgagtttcttacgtcgaccatattccaaatcaccgtgtaaatgttcttgccgtacgtatcgtggagaggggcacagctctggtaggcaggggctaagacaacatcaactctgttcttcagccaggcctgccgcatcttcgccgtgatttgggctttggcaacgttcaaatcgtagagttggcgcaaggtcggctcggggtcagtgccctccacgttatatatcatgctgagggacggaatgtaaggctcgccgccatccttcacaatacgcaacggggtgcggtcaggatccatgttgaagaagcggaaggctaggtcacaagcatccatgagtgatgggagttcttcttttggcaagtgcacaatccgatggccagctgcggcaagcttacgagccgccgtaatcagggtccgctgcatgcatggatgtagagggagagcagggtcctctgggaggatcccgattgtcagcgaagacaccagcttcagcggttcgaggtaagggaatccaagggagttgtcatccagattctccggatgtgatgaaaccaccgtcctgaagaaaaggtctgcgtctcttgtggatgtgcaaaggggcccggtcgaaactgctattcctcctgccatgccgatccgtcctggcggggtctggccggcaaatggaagcctgcctacggacggcttgaacccgaatgtaccgcagcacagcgacgggatccgtagggaaccaccgacgtccgttcc

SEQ ID NO: 10174 - DNA, 1118 bp, Emericella nidulans
gcggtgtactcggaggatgcggcggtagagcgggatgggcgggaggagggcgagggcttcgctgaggctcgcggccgagccatgttcgatggggcggcgtagaggaggcgggtgaagatacgcattttcacttctttttcgaagcctctagatgttgagtgattgactggtacttggggacttttaggcttagacttggagatggatgacggagccgcggtcggactggagctcatcaagcggagaaatttgtctccgcattaattaatccaacaactacctttacagatatacaacacccacctcacttaaattacgactcactactcacaaaagaaaagatgcttccgactccagacacctcgcatgtctccttcgacacaatctacgagccctccgaagactcctacctcttcctcgacaccctctcctccgcctccgaatccgcctggctgaaatcacgattcccttcttcaacgccatcgcctctccttctcgaagtcggctccggttccggagtcgtcctcgctttcctaacggcaaattcacctcttatcctcggccgcgcggatgtccttgcgcttgcgacagacgttaacaaaaacgcctgcgctgcgacacaaaaaactgttactgtggctgtggaagagcggcaatcggagatagataaggatgcgggtgcgcaggcggaggcaaggtccgtctgcctgtccgcggttgtaggggacctctgcacatccctccgcgctggaagcgtggacattctcctctttaacccgccttatgtgccgacggaggaattacccgctataccgtccacttctgatgctgcggcgaacgaattggaactgtcacggagcgcaaaattcgagcgcgactcctactacctctcccttacctatgctgggggccgggatggaatggagacgacggacaggttactcgagtcgataccggaggtgctggatccggatcgcggcgttgcgtacgtcttgctctgtgcgcagaatcggccagaggaggtcaagggtaggattcggggatggggaggcggttggagggctgagagtgttggaacagtgggtgcaagccgggtgaagaagttggtgatgtatcca

SEQ ID NO: 10175 - DNA, 238 bp, Emericella nidulans
cccgtgaagaacgtggacggggctgtcatcatgttcattctcaacttcgaggacctggcccagctcctggccacgtgcagcagccgcagcttgtcgcagcggctgttgtcccagagcttcctgggctccggtgaggcagagtgagggtggtggtgcgagggacgcatgagggtgccctggccgtggctgctctgactcctggccctggtttcagagggctctcatggcaggccacggc

SEQ ID NO: 10176 - DNA, 1167 bp, Emericella nidulans
tcagacactgaactagatttccctcatgaccgaggtttctccatcaccagtcgctcctctgttggccaaagggacaaacagaaacatctcgccaactgcgatgcctgtaggaaggagggccagccgacggatgagaaatctcagcaccttctttcgaatgttcagggggccgaggccgaagatgactcggtgtcggcacaggagtcgctaccggagaagagtcaaaaattccatgcgcggatatccattggtggaatgagctgtgcctcttgctccaactccataacaaacgagattcgccagcttgaatttgtggacgatatcactgtcacattactctcgaatagtgccactgtaactttttgggggccgcggtcgaatgttgaacaaattattgaacagattgaggatattgggtttgaggcttcgctggacgaggtcaaccaggtcgataccgagccgtctcaaactcaaaatctggggtatattgcggagatttccattgggggcatgacttgcggctcctgctctggagctgtaacgcaagggctgaatgagctgcctttcctgactaatgctgtggtcaacttgatgtctcacagtgcccaggtcgagctggataatccagacgatgcgcagctggttgtacagaaaatcgaagatttggggtacgatgcctcgcttgtcaatataacaccaaaggcagccgagctgggctctgggcttgagaaaagaactgtatcttttcgcgttgagggcatgttctgccaccactgtccaaagaaggtctatgactccttgaaggagataccagaccttgaaattgatgacatgttatctgtcaagtatccgatactgaaggtcacttacacccctcgctcaccttcgcttacggtgcgaactatacgcgagaagattgaaagcgcccacaatgcctttaaagccgcagtttatcatcctccaagtgtcgaggatcgatctcgggagatgcagcgtcatgaaagatgccgcctgctttaccgtttccttttcgttctgatggtggctattcctgaattcatagtcggaatcgtcttcatgagccttgtttccaaggacaaccatatccgacagtatctggagcagtcgatgtggtcaggcagcgtgactcgcatggagtgggctctc

SEQ ID NO: 10177 - DNA, 397 bp, Emericella nidulans
ttctttcaaaccgataccgaccacctagaccgaatgacacgcgtatagaccgagggcgggaaacgaacataatgaaactggaacaaggaacacccaggcaccaagaaaagaaaacacaacgtgcagacgcaaactgagggacagaaaaccgaataaggcccgaagaagtagggactcgggggagcggaccccaacaaaaagtgtcccaccaagccaacatgagagacgagcttcgcataacgagtgcgacagagacacggcacccaaaggaaacgaacagcgatcgctaaactgatggagaaactcaaggaggctcaacacctaccaacaaccaggtgtaggcgggcctgacaaaaaccacaacgggcggcctgggggccaaggctgacccaaacca

SEQ ID NO: 10178 - DNA, 177 bp, Emericella nidulans
aaccacgcgtcgattattgatggtgtgcgtctgtgcaaagcgaaacgctatcgctatgccaacaacgatatgcaggagctggaagcacgtctgaaagaagcgcgtgaagccggtgcacgtcatatgctgatggcaccgatgatctgttctcaatagaaggcgtgattgccaacctga

SEQ ID NO: 10179 - DNA, 1661 bp, Emericella nidulans
acagctcgctaggggcactcctaaggaagaagctgtctgtattatataaactccataccagtcccgttgagactacaccatgtcgacaaagaattgcaatcctctatgcgcattggaattgcgaatgtgatgaagtgcagtattagagatgaccctgattatgcacgtcaacgcgatatcacaaccaataatgaaagatatgaagactagtggtaatccgtatatgcagtggacaagagcgtgaaaggaaacatcttcgcattgagaaaacaggaaaagactatagcaaggaaagatgttctaaagcactaaaagcaactcagaggatccgctgacttaaggcgctttggctcgtctcatttagaaccactcgccacccaaccagcggttgaagaactcaagggatgcctcaggctggtccatgggaaccatgtggccgccaccatagaggcgcatgaaggtgaagttgccatgggtcttgatctggccgatcttcttgccagtgtgttcgttgtcgacgatctttagatcctccatgggagctgcggcgaactccttgtggccaggccattcaagggcctcagtccaggccttgtttccgagccagttgcagatgaaatcggcatcaccagcatagatgagaacaggtatctgctcaagaatgccagggacaaggcggtggtaaggtttcatccagtcaccatggaagaggaagttgcggttgatgtcaaaattgcaggagtcgtaaccatcaacctcggcaccgacagccgcacggacttcaggcttgttcagatattcggaaacgtaacccatacctttgtaacaaaggttactctcgtcctcgcacttgccccgaacgtcgtacacgttctgtccggtgcgctgataaggagcgaggagggcgttgttacagtatatggaggcggggacacagacccaagcactctcactgttgtagcaagactcaatcatagactggcatcgaccaagagcattgtccatggagcggcagctgctctcatccaacacagcaggatagccaccctcgccacaggccatggggcggtagtattcgtactgggtgagaccgtcggtcaagccgttgccgattaagacggacttcaggttgatgttgcgcttctggtgagagaggatctcagaagtaaaaacaggaatgtagtggccagcataggattctccagcgatgtggaaatcctgctcggcatactcaggaaattgcttgaagaacagagtaagcagggcgtaaacgtcctttccagcagcaacagtgtcgctgacagtactgccgctgtaagagtagccaacgttgacgggctggtccaagaagataacggaagcgttggagttccacgcatacgggttataaaccggcttgatgttctcatcaatactgctgggcccaagctccatgaagagtccagtgagagaagaacagccagggccaccgttcaaccacagaaccacaggatcgtttttggggtcgtttcgtgactcaaagaacccttcagctcgttagtatattactctcccaatcacgacaataatatcaacttacagtaaaacaaatgtttatcattttcattgtcatccagataccccgtgtattgcttgacatcggggtcgatcccagggaagag

SEQ ID NO: 10180 - DNA, 458 bp, Emericella nidulans
ggtcagtgcaggccagcttggctggctccacccaaccaaaaaccaccacagtcgtggtgttgccttcttgccaaagacaggggatcaacaagagagggtgacaggccaaatgtctggaagatagccctgctccacattctctgtgatcttgcaaaattgcagggtgtcaccacgcttgcccaaccaatcatctggaggctccttgaccagaggtagattgcttggcaagcccagatgtcggcctaggtcagaaaccatgatgaagtcctgctttgctacatgatggatttgcaggtcagggtggggagcctgggtctgtgggagtggtccagtttctgagtcagtttgaggttccctggggcctggggctgtctcagtggcagagctggaaaggggaactcatcctttactccagatggcagtcacttgagccagctagatgaatggtccgttgagtc

SEQ ID NO: 10181 - DNA, 913 bp, Emericella nidulans
cccctgcgcgttcagtcaaatccatattattatgccctgctcgcacgtctagattagataatatcgtagtagtagcgacagtacgtgacacaatcgtgtccatattccaaacgaaacacggcgaaattcagagatcactgtgttcccggcttttgttcccataccagcgtatcctgggatggaacgcccccatcaggtattttgagagccaaaagacggcatgaaaacaaagtagatcggagtcgcagatgcacccatcatggtgatgaaccgggcaaccgaacaaacgaacgaaaagaaatccatgtcacggaaacgcaagacgattgacgcaacccattggtatcagaaaaggaacccatgccacacaaaacgaccataaccaaacaccctagtctagcgagagaaacgaaatgaaaaatgagaagcggaaaaaggacctccgataggaaaagccggtacctctatggtcataactttggtgtggggaaaaatatttgaaaatggaaaagcatcacggggtatccatcctgttcctcagccttgttttgccggatcatgagaaacaagtcgagggcacagaaaatataaaaaaaaggtttcagggtatcaattctctgccagcaaggccgagacagaaagaagaaagtagcggaaggaatattaggctgttgtacaatggatcgtgacccaatcgggaagaaagaatggtgccactgtgtgatgtgtgtggagaattcgaaagccgaatcgtacacaatccttcactccaggcgaaggtttagtggccagggtattcaggatagggcaggtcgattgaaacgattactcttcgtcatcgcctgaaccatccctccttcccgcccttgtggaccttcttgtggcgacggaggttagagacaacggaaaagtg

SEQ ID NO: 10182 - DNA, 150 bp, Emericella nidulans
agaccaccactattatgaagagccattatactacagccaatactcttacagactacacgtatgcttgggtcacaccagtcagacgtgacgtcttacgtcatgcagcaagcaccattcgcttagggtaaactcagacacatgcagaacatc

SEQ ID NO: 10183 - DNA, 1332 bp, Emericella nidulans
cagagatagtccccaggtaaacgcggggtcaggacagctcaaactgggaatcggtggagtgcagaacctatcacgacaatgttggccagaagaaattccccagctcaacatcacgagatttcgtattcacgattttaatggtgatacatcgaaagtagtagcatctggagcaagctaccttggattgctaaatgacaaacaggaatcactacgcaatctctcaccgcagcctcaaagcaagatagtcacctacaagtgcccgaagtctttccttctagtctatcagataacgacatatgcaagacaatcgcagcgaaaaaaaaaaaaaaaggctctaaattcaagggaactcttcaggggctcaacctgtggtgaaaacgaatcactcgcgaagcaagtcatttggcttataacaatgattccgaaccagctgcaccaaagacgagcatatatgagggatatcagacagtctcgcagactaagcagttatccccatgtcgatcaacttcacttttgagcagcctagcgctgcatacaatagcattgatgtgcataccacggttcagccccggatacaagcggatactacgtatattctcaccgcaacaaagccatgggctgcccttgactggggatgttcttccagacccatttcctgttaatgacatcctctcggcctttcctggccttcagtactgccattatcaacgactgcaggacacgcttgggagtttatcttatccgcgggacgaattggtttggtataacggttatctacgggatagtgcctggcataattgcaatgacattatccgacagcgtttgacgatcttacgacctggcatttgaggttggctggttttgttttgcagcgcatcagtgcatacggcagttacggcagtaatcaagaaatactcctactagatatcgctgaaaaggaacgggagtgcgtatggaaccttgccctggacacccattgagccattgacccttcattacaaacaatccgagtttcccaatccccaatggaagtaacagaacagataatagagtagatcgaggcggctacgagatcgttccgacgacccgaggacttccctcggatactaaaatccacgtgaccttctaggagcttctgccgccaagaaatccggagatcgagaaacgcctggaaaattttcgagactttggcttcatctctcacctccttgttgtcctcccttcttgtttacttcatcctcttcatcctccttcttccatccgttctgctccgggagtcttgatcggacagatacttgtgtgcttgatatccgcttttaccttgttttaatt

SEQ ID NO: 10184 - DNA, 1796 bp, Emericella nidulans
cggggcctgacatcgcaaatataattacaaaatcaaccaacaccaagtcgagtatagatcgacaatacagctctgcgtaaaatataacgccaagatatacgctaaacctgatcgggagctatggttcccatcttggcatcattcttcacgactcgaccctcctttcactctataattcgtttttcaaacatattactgctgacatgcccttttttacatcagcttctacaaagtagctcttttacccaagtcagctacatatagaaatgctagctcaagagctgtgagataacctgagagagctgcttaatcgcaagcatgccctcaagtcgtagatccggtcgcttgtccggtgtacggaagacctacacagttgacccatttgcggaaaatgacttggatctaaccatctttggggaagaggatagcaagacaccgcagaataagggcaaagggcgagttcaaggggacgatgactctgacgaggaattccaggcacaagaagaggaagaggaagaggatcctgatggtgatgtatctgaggctgaagaacccagtgctgaaaatgctggcgaaggagtcgatgcagcaactttcaaaagccgtcgtcttaaaggcttccaaaagcaggtgcgactcgatcaacccaggtcaaccaagaagcggcgtcccgacggcgctatcgtgctgactggtgatgagactcattctcgaggagcttggaatccgcttgaacatgcagggaaatcaattcatttgcaggtgacgtttgggctcgatgagagggatctcctggctgttctgtatacgagggataggtggtcaagggggattgattctacgtttccgactcgggtgtcgttggacgaagcagagagtttgcgagattacaagtatggtttgactttcggagttgagccggatgattatgaaaaggagaaaacgagcagctgggactggtattatgacgatgatggtcccggagggcgattcagaaaacgccaacgaatcgagcagatcaatgagcaagaagcatgcccgacctttttgcctacaccgaaacagggaaagcatactgtgcttatgggccccgctggcaaccaaatggagttcaatctgaaccagtacgaggtcttcaactttggggatgcgtggggagagctcaagagtcggaatcagaaggaaacatccaacaaaaagaaacggcagggctgggtacttaatattgggcagcgcatccagtgtttggcctgggtgccgaaccaaagtggccgtgaccagtttctatctgtggtagctccaatcacgaatgagcaaaaacagatgtatctagatcctttgaaggactacgcagccgcagcatttcggtcctccgcaccctacccatgtgccctgcagatctgggcgttcaaagctagcgaggatggcggtctcacgaaaaccattgatatgaacatcgagcccagcctacggttgattttatgtaccaaatggggcgacttaaggcgaatggcctggtgtcctattacccgaaagccgcgggatgaagataacaaaggcggcttcagaaatttagggctacttgccggggtatggggcgatggttatgtccgagttattgacgtgaaagtgaacaatgatcccacaaagaccgaattttgtaagttttgcggttgtatcaagtggtggatagacactaacattgtgaagacagaatcgatgtcccagtgtttgaggcgcggcccccatccaaaatatgtacatgtgtggcatggatgtcttcgagtgacattgtt

SEQ ID NO: 10185 - DNA, 515 bp, Emericella nidulans
agcatttaaattaaaactcctgtaataatgataaataacgcagaaacatattgttaatatatgttatgcactgtttgcgatgagattgattaagacagaccatgtcatagggcataatctgtccgagttatagctaactggttaatgcgtaaaaataaaaactgtattacaagttcttataaatactgaacgctgatagtgacgttaccatccagtttgatcgtttcatcagaaccaagaatagtattgtcatttaccgcagcatcaatcagtaacgggaaggtgaccgctgtaatagcaacaggtgtcagttcccctgtttttgcaacagaataaccgcgctcgattgctgagcaacttgtcagcgagcagaatgcgccattagatgaggctttccatgtgggggtcgctgctgaccagtggtcagtttgaatcaggtcgacaggaatttcacctgtatcgccgccgcgtgaatcccccattagacctgcaatccaatggatcagcgcaatttt

SEQ ID NO: 10186 - DNA, 1661 bp, Emericella nidulans
tctgtgtgaactctggtctagcatggatcgttcattcgctcacctgcaccgagttcagccagacgatgacgttcgccaaaagtcggagcagtcctcactaccaagagaaaatggcgcgggtctcgatgaagcgtcactggagaggcttggaagggagcgaccaccatttttctcgggcgcgtggccagaagtcgccttttgcttctccatcattatgtcgcaaattctggcggtaagctctggccatccttccaatatagcactgcttagaacttggctaagccaccacaggagtattacatatcaggctcaaatgtccttttaccgacattgatagaagagttggattttccccacgcatccgcgatttggccgtcaacctcgctatctctagccgtaacttcaaccttgcttatcttcggtcgactcacggatatgttcggtggttatgcaatctacattgccggagccggatggctgacgatatcgtcaattttatgcggagtctcacagtcttggctcatgctagtcattttccgagctctgcaaggcctgggtctcgcggcatttctcccctccggtgtcatgattttagggaaaacgtatcgacccggccctcggaaaaactttgttttcagtctctatggcgcctgtgctgcgctggggttctttatcggtatcttcttctctgggctctgcagccagtatcttagctggcggtggtatttcttcattggcgctatcctatccgccatcactacgttgtcatcgatattttacatccctcgtgacttcaaagaaacgaggggcaatggtgcaactatggactggaccggattggcattatcagtgtcaggctcagtcctcttcgtcttcgctatcgcccacagttcctatgccccggagggatggcgcaccccatatatccccgtctgccttgtactcggcgttttgcttcttgcggcgttgacctacgtggaaggctgggtagtcaagaatccgcttctgccaggggacatatttgccgtaaagtacatgaagccacttgcaattgccctgctcttcttgtacggaagtctcggtgtatttctcctctacgccgttttatagtaagttcttactctcgccgtctccctagacctcactaactcgtatccagcatgtctgacttcatgggcgccacccccttccaaatggtcgcctggaccgtgcccatggccgtcggcgggctaatactctcctgcgttggcgggcttatattccaccgtgtttcgggtacgatcctcctcatgatatcctgcctcggctacgttggttcaggcttgttcttcgctgtcgtcccgcaaggcggcaattactgggcgttcatatttccctcgatgatttgcgggacaattgggattgatatctcttttaacctcgcaaacattttcattacgactaatatgccgaaatcgaaacagggcctcgcgggggcactcatcaattgtactcttcatatggggattgcggtgatgctgggtttcgcggatattgtgcataccgagaccgggtacctgggagctaggaagagctacaaagcagtcttttggtacgaggttggattggcggcttttggactagtcgttgtagcgctttttgttaggattaaagaggcgaag

SEQ ID NO: 10187 - DNA, 845 bp, Emericella nidulans
ataccatgcagcaatgagatctgcggttccatgggcatgctatatttaccccttggctgtcgactagtctgatgtgcttcagagagccgcttgggggcccaggtacggctgccgaaaacggaaatttagaaccgccgcccgccagtctcgatagcttggcgggctactatccgaaataaggccaagcttcgaacgcacgatgcaaattattctcaagctagtaactgtgaagatgctagagtacctaggtacacaatgattatcaaatagtacaatatactgggttgattcctggccagcacaaggatggagtgggaaacttttctgggatggtacgcacaaaaatccagcattaaatgcgagtaatgatgtgctaattatcaatatttcaaaacatgagaaatatcacctatacatagtgacaggttgtgggtatccacgagctcaacaataaatccaaggcaagcaacaacagctccaaaatctcattaagacatcattctacattcttcagggttaacgctaggcgatgacgtcatggcgtaaggtatcaaatatgcgatacgcttgacaataatcaagctcaaggtacgtgggctgtaggaggttgagggcctggggcagggtctcttcggagagcgcccattgtgttcagaacagtggtgaccaagaacaagaccctacaagccgcagttagccacggttccaacgtaccttcccaatctgagagcccacctaccatttgaaagcgccgaatgcttgttcaggcttgcatccccggcaccgggacccacttgagccaaccatgggcatcaccaaggtcaactgccagggcaaggaacccg

SEQ ID NO: 10188 - DNA, 1041 bp, Emericella nidulans
gtgattcagttgtgtgcaacgacaagcattgctactatatagtgtttttagagttttgctcggcccagccttctagaattgcttagctcctcggaatagttacccgtgcatcaaaaaatcgtgatatgaagacattagactgagtctggatatgcattatgtacgggcataaagcaattatcttgaaggtatactatatattatttttgattcgcttcaagcacaattttggtaagatacgagataccgtatccaagatccagttcggcggctgttgcctctctggtggcgcatccgttgcaagttacgagagaaaaacctcaaacttttccggcccacttcggaaacagcaattctccccacaccttctggctctgagactcatgattgggctggtagctctataccatgccatagcaggcaatgacatatgcggccaacaccgaggaaaaagggcgaaaacttttccagaaggactggtcgagatggtctgaacatcgagccagcgttgcatccatgattcatcgccatgagggatccggtaggatctcctcatctcgccttgttttccttacataacatctttgatttaatgaatccatgactggtgccatttgtcatatctctttatctctcaacatactccgcaggacgggagagattctttaagagtgcagtcctggggttctgctgggtccctcgcctcctcaaatcgcttcaattccgcgtgtcctagaacagaagtcagagtctggtttggtggagtcagacctgacattttcttccacgcgaactgcctcttcttcctattttccacctcacctggatatcctctgatctcccagcaaacaccttcgatcctcccgcttctggagctctcggcttttggactgtctaggcccagtcatgtcctccgagcgcgacttcaataacgcggcgtccgatggaggaaaggctaagatgatcgacaatgaagctgtccaggtcacttgcgacaattcgacccggcttggacagccgatgctagaagatggcccgtcg

SEQ ID NO: 10189 - DNA, 173 bp, Emericella nidulans
cagaccggaaatcaccgctctggacagggacatgatacggattgacgtgacgataacggtctgccacagcatatacacgttgagcgagcctttggtgctgccgcacaatcgcagcccgcccatactagctaatgagctggtccgccccggtattatgcggagcgccagcagca

SEQ ID NO: 10190 - DNA, 1043 bp, Emericella nidulans
tgacggtcatctgggaaaacctccgatgctatgactttaactctcgaaacgtctattgccctccatggtttgatgcgggccgtccctcccaagcagcacgcgcccaataaccgtgaacttcacgtggacttctacacgatcatcggccgtgccgccggtgacaaggaggcgatcaccacacgtgtggcccatgactccgaccctcagactctgtacaacaaccgccaccttgttcttcgtggtgagactgcttcgtcagtgatgaaagtcagggctgcgaccctgaaggcctttcgtcagacattcgacgagctgcgcatgactgaagtaactccaccggccatggttcaaacacaagttgagggaggaagcaccctattcaagttcgactactacggcgaggacgcctacttgacccagtcttctcagctctatcttgagacttgtattccgtctctaggagatgtcttttgcgtctgcccatccttccgtgcggagaaatctctcacccgccgccatctctccgagtacactcacatcgagtccgagctagacttcatcgaattcacggacctcctcgaccaccttgaggccgtcatctgccgtgtcctggagatcgtcctagccgaccctgtcgccaaacccatcattgcgcaactcaaccccggcttccagatgcccagccgcccattcctccgcatgaagtactccgacgccatcgagtggctgcgcgagcacgaaatccccaacgaagaaggcaagcctcacgagttcggcgacgatatcgccgaagccgcggagcgcaagatgaccgatatcatcaaccgccccattttcctcacgcacttcccggccgaaatcaaggccttctatatgaagaaggaccctgaagaccgccgtgtcactgagagtgtcgacgtcctgatgcccggtgttggtgaaattgttggtggaagtatgaggatggacgactgggacgagctgatggccgcttacaagcacgagggcatggacccttctccttattactggtatactgacca

SEQ ID NO: 10191 - DNA, 1180 bp, Emericella nidulans
aagccttgtacatgctgttctatcatccacttgtcatattctattcatgcattggatattatgcattggatatggagtcatagcgtctgctcactgggaaaatggccctatcttgcgtatgagggagaccacatcctaacttgaagttgactactctgtactaggaagataaacgctgttgattattgattgtcttcgcctgatagcaaatatgtatagcaatgaagggactaagaagccaaagttctcgcctaatgttctataagtacaaagccccctttccaacgatctcgctctagccaaactgcgcccttgagtaagtgtaggtaaagataaggcgacacgtatttccaagagagcaccccgtcttctctaaaacagtggaaacctgcaacgcttatggaccagtaggacctccagtggcagtatttggcatattctgctgagactcgttagaattctgcccacgcgcagttacatatgtctcctgcgtggtcgtgttcatcgtcgtgtccgcatttgcagcgtctgatggattgagctctcctgactcctctgatccgcggcagcaacagagtgtggactttgctcgctttttgacaagcttccaaagatccggtggctcagtctcgagattgtttgtctgagccgcgcttgttccttggggatcggttctggccaccaggttgtgactgggttcggggcaggggatatggctttcaaagggtttagcagacacttcctgtacaattccattgtggatttttggaccaacggaaatctggcctcgaacaaacctgcctttttaggggggggacctctgctgtaacagcgtgggagtccactcccccccagggggggcttaaatattgggggtttttatctttggcttttttttccccacgcgaatatattttccttttggggtgaaaactgccgggggaaataattatgggggggggctctttaaaacccgggttttttctgggttgttttctcaccaaaaaaagggggggttcttcttgggaggggggggggtgttcctttcaaaatttacaacacccacattcgtggggggggtgctttataatgaggcgctttgtttataaaaaactgggtgtttcacaccaaggtggttggggggagggggacctttaatcttctcctctctctataaggg

SEQ ID NO: 10192 - DNA, 1076 bp, Emericella nidulans
agtgggagcaatgataacacaatccggatctttgaccatgcctcacgcgcagaggttgcctgtctacgtggacacgccgacttagtcagaaccgtccaagcaggctttggcgacccgcctggctcagaagaagctctaaagctggaagctctagcagttgaccgagaattctggaatgcccagagatcgggcgaacgagttgatctgggccccgctgccttaagacgggccggccatatccaagacacaactggatcccgcaacccgcgagacatcaaggcactaggcgcctctatcccaccaggaggaggagggagtaaatgggcgaggattgtctccggctcgtatgacgagtccataattatctggaagaaggacaggaagggtcaatgggttgtgagccagaatttacgccaggccgaagcggctgctaatgccgcgtacgtcgcgcactcgcatccatcatcctcacgtcctggtcctggcaatgccttcgctctcgcccagcaagctgcactagtgtcacagggccaggaccctttaacccatgcacacgcaacaccgtctactttcgcagcaaatgccatagggactcagcaaagcagttcatcctcaaaccctccgtcttcagcagcggcccaacaggcagaaccaccccatcgcccaacaccacccccaggtcctcccctaaccaacctgctcgctgccgccaactactatacacacccccgcgcccggatactcgcccaagccgcaacgccaacaagccgaatcttcaagatccagttcgatgcccgcaagatcatctgcgcgagccaggacccgcggatcgtggggtgggatttcgtcggcgacgatgaagagcttggtgaggcttgtcagtttttcagggggttatagcatccgatttgctggggtggtgttttgtttatgcgaattaatcgggataatagtactcttttacttcttgcatcattgtcttttttcgtcatgcctgcgattatggtgttcatgttagggttgctgttattgtctcatgaaatcccttttcccctggttgtcatgttcttacatcc

SEQ ID NO: 10193 - DNA, 974 bp, Emericella nidulans
ataacaggtcaaccgactgaaacttcgctacgggaaggaagagggaagaacgtggtttcaaaggaggagctggtggaccacgaaggcgaccgttgcagagccgacatggtacactggtccaaaccgagctgaacggcaggatggcagaagggggaggttacacacatatgcttggacaagcaactgccatgcttataacccttcccacagcgatcgcagcgaagttcgggcctggagcttttcccttcgcccttgaccatatgcccaccctcgctagcccggcggttgcggttcttggtgctgatcggctttccgggcgcaacacttccatccaccgcggtctgggctgtgggtgcgctttcgtggagttggccgggagaggtcttacgagcgaccatcgaatcccgactagggctgttgatgctgcgggaaaggtatgaactactgaaggtagaggtagccccaaccgagctagactctagacctttccgacttccccggcgatgagcaggcatggcaattgccacagagtctggagagtccttcagtgtagcagcaactgcggcggcggcgttagcggcggctgtggtggtcacgctctttcggcgagtcacccgatggtttgagttaacggcaccaagggagatggagtgggaatggtggcgaggagcagactgaggaaacgggcgagagagagatagttcctgttaagtagagagagcattagcgggtgtcaatgtcagaatgtcagacgggcgcgaaaaaaaaaagacacgcctgacaaagaagaccaaaggagcaaggtaccttgaatgaggccatagtgggtcgtgggctttgggaaagtcaatcccagaaagcctctggagagatgaaagccaaaactgcctgattctgaagttagtggctgtctcagaagagctgaagtccgcgtggaatgtcgagctgggtaaggaaataataatgggagtgcg

SEQ ID NO: 10194 - DNA, 1275 bp, Emericella nidulans
tgcataccaactctcgcggtctgttatctgtttgatatcctgcggactgaaagcgacttcctggggctgctgaagaggaagatccattagagggatctccagggtcgacctgcacatggcttggcggtttgacgttaaatcgtttgcacagcaaacgggtggggtagaacgagatgacggtacgtgtcattgggccgaacatgccaatttttgcagcttctatcactgggtcctgtggcgtttcgctgggtttactgagtaatggcgcgtccgtatctgtcttggcttcatctgaagcgcccttgggacctgaagaggcggacgtgaaccgtgaggccatcacgcccgatacgggcttgaatacctctgctgctcgagcaaactcctcgagctctgtaacccattcgtttgtggtaaatcctggtacgcgatccggaagggtatctcgaagcccagctcggatttcgaggaacgtacggtagcgggttcgtttggattcatcctcagaatatggcatccaaccgctagcagcacgcgtcagagcttgaacggctacttgcttgtctagcttgggaacaagatcccagatgtctttctgcctctgtgactctgaaagttcgtagccctttggggccttttcgcctagtgccggcggcaggtccgttttcccggtaagttccgcaatttttgcccggccttctggtgtcatccagtcgaagattgactttgcgggtaattgatcctctcccaatatcgctgcccgcgatacaggatctagagtagatgccctcgctgcctctgcggtagaaacgtagctcgcggcatcccgttccttcacaggcgtctttttagacttccaatccttggggatctcgggcggcgcatatttcttgtccgatgatagagttagggtcgaaatgccgtctgcgagtcggaaaccatccaaaggaagacggccgtcatggcatttcctgaaacctgcagcgcctttcgcactggacgctttccttggaataaagaccggtttgttgctcagaagagggttggcagagggcaggcctctcgtatcatccgtaggctttgttttgctcttcttcttatcaccgccaatcgtgcgattgtacgaaatctggggacccagcgagtagggatcctcgtcatcagacccggtatcattgagcacgccaacgccgaatgctcctcgccggggtttctgggcctttgaccggttaggtttgccggcgttgagtcgccgtccgaagaacggatcatcat

SEQ ID NO: 10195 - DNA, 1642 bp, Emericella nidulans
cctctatggacatgaaggactttagtcagttaccatgcacgtagagacaatggcttggagagttgcttaggaacataccatccaattcgtcaaagtccgaatcatcgtcgccgtcgtcgtcgcccgactgcttttgttgttgctggctgggttcaggcttcggcgcttctgttgaagcgggtgtcgtagttgactcttgtgtatttgcatctgattgtactgtagtggttgtctgctgctgtgtctgctcagggggaggctgtgagtcgcccgcagccgacgcggttgatgccatggcaaagagggacggcgaattgagcgcgcagtcgacgaatcacgaacacaggtcgaagtaacgttagcgataataatagactaaagagagaaagaagaatgcaagcttttggataacttctgctgcatttgttggttgcgtcgattccgggatcatttcatgtgaaccagcagtacggagtagatttggcggggaaccgacaccgacagccgcggttgcttcccgtcttgactgcgccgtcttgctctctcgattctcgatttctactgtacaacttcattcttgaacgagctgcatcaatatacgacacctatttgccctacaagacaagatctgatctcgactcagcagtcttggactatgaatcgtcgtctcgaccggattggtcgagaagcttccttccattgttccgtaatccttaccccagccaaagacgctgctttgggattgactcatccagaccaaacatcaagaacagaccattcaaccagctcgcattttgatgacatcgggatgatgtagactagtagcgattgtgaatgagactgcccgcgtgacggtatattgcttttttgttgctggatctcgccggtgtcagagaggagtatagttcatcggcgccctcctgaacagggcgacaacacgatgatatgcaaaatctccccagacggacctcgccgatcagccaactgactttaagtcattttctactgggaaattcatgctgcgtttttgctttttttagccccggagcgaacgtgcgattgtcggaagacacctttgcgcagtggtgtaaggtatagatgatggtatggtaccttgtgtctcagattattctcgaaccgacggttttcgagagcaggcaaccggctttcgcgttgtgcccctttgcttgaacccgccgtcccggacggacactcgctcatccttcagggggtattgaccgtttagagtgggttcgtcccgcaacttgtgaggttctctttctcctttccgctcttcctgttccccttctcctaagttttcggtatcttccaccccccttcttgcggatgtctgttcggacacctacttttttttcccttcactttcttcttttcctcacgttccttttcttcttctttctgctttttttctaccctcattctacccccctttttgtcccgcaccagcttcacacttctctgtcttggcatatctttcctcactcccctcgttggtccaaggcgcctctttttatctcgtactcctctctggcgtctacatttccataccacccccttcccttatgctctcctttattctaaacattttaccctccctttcctatttttctcttccctcttc

SEQ ID NO: 10196 - DNA, 1830 bp, Emericella nidulans
ttctttgctgtcctgtgaacgaaacggacagttccgcttacagcatcgacagtgagaatcccggcgctctgtgtctgtaaggaatgctcaaagctcatgaattggtcattcgcagggctgtcagtgctactggtagctgacttcaattctccgacagttagaggacgaagagcgtataaagtccaatagacataggaagcagccttgggcccctgactgacaacttgtttcatcgcttctccgtatgcttcacttaggctttgcggaaggtgtactaatgctctttcgaagaggctcttttctgtatagcgagctagaaggtcgaggtgtatcttggcaaggagaaagctagtcatgttagcgaacaaaagactggtcagcgggaggaggatagaaacatacactccatgacttttctccgccaccatgctcacaacatcatggtacatttgggggctagatttccgcttgagtaggtcgacaaggctcgcgtcgctctcaatcctcgagatagcgtaaagctgaagatccgtgcttggagctagcaccgttacgcgaggagagtttgaggcctgactcacttcccgcaaggtaacgagaagttgtacctggtccggaagcttttggagccggccgagtagacgttccttatcggaaagcatatccaacccgtcgatgatgaaaaagactttcgagaacctatctacctcagcacgtatggcgttctggtagacctttggcgaagcctttactttcatcaaggactcggagtggtacagggaggacgatgcatacgagagactccgtttgcggtagacgagttgcgcgaggatgttctgaagtatatcaagtgtagactgttccttctgcctctcgtcctggcagaagataaacaccgttgccacgtcaggagacgtaaacgttctttgcagggaatctataatggaagctctgaacaggtataagcatgttacgattcacagcttctttccagtatgcactcacgctagaaatgtcttgcccgcaccagctgccatagttatcccgttagcatcctgctttgtgagagatttgatatcagaacttacgtggaccgacacagtataatgttttcgtagagcccaacaaccatcgtttatactgttcatcatcgaagatccattgcccagtcccttttagccgccgattacacaagtccgcaagcataataaaattttcggttgtaagctgactcgtgatcccgaggacacgatcctcgaactgaaggtcgacttcggacctgtgcgcaaagagtcagaacgcatacgcattgtgcaaaacaacgcacttccaacgcacccgactccacctcccctcctgacctaagactagcccgtattttcttatccaggaacgatcgctcactaaacagaggatagttagcgaccacttagccctttccaccttttggactaagtaccccatcctccctcggattcggcttgatggacagtaaccacatgatccctgcccggttccaatgcttcaggaacgcctgtccaataggtgcttcttttgattgttacccccactcctcaggttgaaataaagctccaggctctctccggcctaaactttccggatccatcaggcaccaggcgtggggtcatcagaaatgctcgcttttttctacacaccccggttttagtctcaatcgcttggccttcccatgattcttctgctgtggcaccctggcgtcaccctttagtcctatatatcttctttctccttatacgctcccctgctctcactctcattttcactcgtcattcctactatatactatctcca

SEQ ID NO: 10197 - DNA, 3083 bp, Emericella nidulans
tagtatagggaaaataagaagaagagagagagatagaaagtgaaataataaaggagagaaatagaaaagagaagagaatatagagatgagaaaaaacataaaagaacattaaatatacaagatgaaagatggtaagataacagaaagggatagcataaagggataaggaagaggaaccttaaaaaaacaatgtttgaaccaaagcctttttaattttaaaaaaagagcaccctaggtctagggtattaccccaacggaataagggataagaccagcttgtttgtaagagggataacctcttccggggaaagataacccatcccagcacaataccgaaggggcataggggtgggttaaaacatgttaaaaaactagtcatgaaccaaagcttgcttgaccgggggaataccttgtttaaactgaaaaagtggtctggcctggtccttgctcaataaatcaaaatactttagttgcgtttgatctctgccgttagtaccaagctgagtgacaatgtgactaaagcggctgagcagatcattcgtctgggaagctgaaatcattctttcatcaaagtgcgcctcaatcgtaactgggatatcggatatatcactagtaacgcactcgacggtaagggcataaccgtcgaggttgagctctggaacatgaccatgctcgtacgctaggagcttaccatgtacagaactctcacgttcttgcgctggttgcacggcgaaaagatgtggaagatcgatctggccaacgaagcggcgaatgttctgcaagcctgtgtgctcgaacggtatcatgtcgacgctttgcttgtgaaccatggtgagatattgattgatcgtttgttccgggttgatatgcacatgaactgggacagttgtaattgttggtgccgccatgtccagaatgccgggaactggcgcagagcgcccagagagtgcaactccaaacaagacatcattgccaccgtaggcggagattgccagtgcccaagcagcccttagagaagaagctagcgtattgggccctccaactgggcgaatttcgacgctcgagctcaacttctgagtaggctgtggcggtacgaaagcttgtgaagagaggggaacggtgccccaacttttctcttgatctgagactgccagaacgacttagcggcctttagatcttgttgacctatgtacgagatgaatcttgagaatgcaggagttggagcgagctcttttccatcatagaggagtgccacgcgtcaaacagctttcttaaactgtacccgtcgtatacactgtggtgagctgtgagtacgaagtatcgcttgttgccgctgtaaattaaggcttgtcgcaccaagggctggccgtaaccgacagactgttgtaggtctttatccaagtactgcttgaggttcaggtctccaccccacgcgacagactcacggactaccacttgaagtccacctgactgactgggcgcaatgcggtacgcaggattggtgccttttgggtcagtgatgaccatgcccgtttaaatgcgttagtatcaacagcttcttggattcggaaaacccagcggccaatataagaccctggttgctgagtggtgatagccatgagaccttcttggaggggtgtacatggatacacatcctcaatatcgtggactgcaacatcacataactttgcaacacggagaagttccctctcactgacagaagcctctgtctgttgggcttccttccaaagcccaaaccgaggaatatcctgtacgtcccggcggcgccccatctgagcttcaagatgagcggccatctcctgcaacttaggataccggaagacgtcggcaacgcttatcgggatgtctttggcatttgccagggaaacgaggcgcatcgcggtgaatgagtcgcccccgcagtgaaggaagtggtcttggacacctacatggtcctggtctacgttaagcacagtggcccatagcgactgtaacttcttcttcataaaggtggatggtgcaacactcaaactggttgaaagggagtactggaagaggacattacccggcaggttctacagcatctgcttgatcgtgccacggtcaagttatgtagacgttgtctgagggaggtgcactaccggaacgaaaagccaggtgaccatgtactagggtaggacctctagtagagaggcctgatgctgtgacaatgcctttggcaggtgaggggcgttggggaggaatatttcgtgaaatggggcggataacaaatgcctctgaaggaaatcatcgctgagttccatcgcaacagaaatcattatgttgggggaattgccaccaggggtgataaggcttgccacaagactcttcacagctggcaataacttcttaacgcggtactcaatctcccctatttcaacgcgctggccacggaccttaacctgggagtcctttcgagcttggtagatcaagtcgccgtttggagactgacgaacgagatcgccggtgttatagaatcgatgaccttcaagtctgattgccttcgcccacttagggttcgtgacaaaagctgccttcgtcttcttcggatcgttgtgatacccgcgagccagtaacgggccttcaacccagagttcgccgacagcgccaatgggacaaatggattcgccgttggcaattacccagacgctccccacaagcggtcggccgatgttgagtgcctgtttcttttggacgagagctgcactgcaggtcgtgtaaatcgagcactcactcggaccatatccgttcaaaaccttgactcttcccgctgccttggcgtgctcctcaatcatggcctccctgacggcctctcccccgagaattaatgtggtaagacacttgatgttcgcaatatccagcaagctagccccagctggagtaacctgtgcgtgagtagcaccataagcctcagaaacgcctggagggtggatatgcgctcctttatgatttgacacagaccacccagcagccgaatagtgccccagtatcactacgcctgcatcaacgtgtagcagttaatggcgagaacgagtccgggggaa

SEQ ID NO: 10198 - DNA, 969 bp, Emericella nidulans
  unsure (1)..(969): unsure at all n locations
cgtacgttttagctggagaccaacagcggatggaatgacatcaagacaggagttctccgagtacggcctgttttggcaggacttcgactcagagttacggaggcagaggtagtagaaggcgacattgatataaacgccaacaacgagtcggggaatatcgaattcagccatttaaggccgcactcggtcgtacgttgccgcattccatatacagtggaggagcaccccgcgacgctctctgcaagggccgaggtcacataccagacagaacaaggacggttctcctactcgtctgcgcataacgttgtctctgctctgccgatcagtgtcaatgtgcaggatgtcttcaaacaggatgtgctgttctcgcggttcaccgtcagcccagccacgatgatcccgctttggctatccaaatgtagcattcctagttcggatgtctatgaagtgcagtcgaacgtcggcgacaatgttgccatgagggtattccccaagcaaccggcctcgctgctctacaagatccagccgcgaaaagacatcgttgcctctcctgggtcgaggagagccctgcggctcactgtcgactttacctgtgtggatgacgagtgcttcgacacggtggagaagacattcaaagaaagcatttccaagagtgaattcgcacagtacacgagcctcctcacgccacatctcgtcgaagccttccgaagccagctctcaccccctgaaagggaggtcatcgggcttgtcggggagatcgaaacgtgccgtacgcggcagtccgtgggaggattggtgagcgcgctgaggagccatggacggcctagggcttggtaagcagtgcatgagaaggagtgcttcttgtatttggggcagctatataccagatatctgatccttttttcacgaacgtcatcgacgggcaatatatnccgcgcattcgaatccagcggctacgagactcgctgc

SEQ ID NO: 10199 - DNA, 115 bp, Emericella nidulans
gaggcaagctcgatcacacgcgtccaatcaatgcaatacacggtcgttctagcaactccccagttgataggccgcacccagcattcataggacacaggtgctatagctgtcgact

SEQ ID NO: 10200 - DNA, 323 bp, Emericella nidulans
gcgcacgagcccccaaccatcttaggtttgttgtccggcaccgtcacctgcgggcaatgaatacatcacctgacctaggaggtgggccaaacaaagcattgctagtgagccaactttcgcaggggtgtccaaaagcgcctaatgacgtgagtacggacctagtgggaggccctatagtgccaaccgtcaatgacacaggagatggagctacatacggcctcgggcaacatatctggaccagtgctcaggtactaacacggggggactgtctaggcaaccaatatcgaagtattgtgatgcgcggatgacccaccgcgagaacc

SEQ ID NO: 10201 - DNA, 1277 bp, Emericella nidulans
atctgcggcggttgtaacggggacagttttgagaaaggccgggatacgatcggggacgatcttcgactgcgcggagagtcgagcttgaaatctggtttgatgttttcgacgacaaaggccaatgacgcggtgatgatgcgccgcgaccagtcattttttatgagggggatcgggtatggtggttgagcttctcttgctgggttctggcttgcagcagctgcgttctcggcgccctgactggcagtgttattaggcttaggtctggtcttgtctgaggcttcgccagcctcgccctcgccctgagcgagcctatcacacttgagagaagtatcggacccttgaagccaaggcggattgggaaacacgacacagaagtcgccggtacggagtccaaaatagagaatttgctcgagagtctcccagctgaggaggtcaagggcgagcctgaaccctctgtccgcgaggtcggtcatgtagaagaaggccccagacacggcatagcccagcgccatatcggccatggccaacttgagcgagaacggatattcaggctcgtacccggggtacgggtcgtagcccagcgcctcgagagtagcaggtttgagagtcgtcattgtcagcatattcctgccgtagaggtaatgcacagcctgttcccatgccttgatcattgtaaagtgtctacccgcaaaagccttgatatcggaacaagcgtggtcgttcttcaggatgttggtgacgaggggactgcgcgccagaacacatttatgagcggtcatcacgatcggccagaactgctcgtttgctgactgtagggtaagggtgatgtcgctcatatggctgcactccatcatctggatcagggcattggacagttcgaaggcggcttgttgggccaacgtcttggtgtcttcggcgccccccatcttgcgaacgggctcgatggtttgcgaggcagttggggaagggggtgtcactctaacctcaacgcccgagggcttttcaggagtggctgctgaggcagcgatggtggttgtgttaggttcacatttaccttcaccttcgccttcgcctccacccccgcgttcaggtggaggggtggcaggggaagacccgagtgagagcgttttcgactcctcttcggcgtcggcgtcggcgtcgacgctaacactcttctcgactggtttggtctggcaatggcagcaatcgcctgcgtggtggatgcagcagcacgaccaccgaggggggcagccgcagcctgaaacgacaggtttgtg

SEQ ID NO: 10202 - DNA, 2844 bp, Emericella nidulans
tcctcgatgactcgaacaagatctgaggtgaagccatagaaggttggattgtaggcattgcgagcccagtacatgagctcagacgcaactcgaccgataagcggtacaggctcaggcgcagtttctttcctgtgcgtaattgattcttctgcctcatcttccgcatcatcggacgaatctccaagagttgaatctttaagcataggtgaggatggtcgcgacgagtccgacgacgacaagtagcccgtatccgatgcgaggacgtgaagcaagtggtagacagcggagaaaccaagaagtgtcaaatcaacgggatccagcggcagctgatcaaaccaagtcacggctttctccatggtaaatgactcgggaagtgaattgtcatggcgggaccgtgcggtgaatatcgcggcaatcatggcgcaacgaactgcgatagaaatctcctcgcggacagataccgggagtgacgaatccagaaagttgaacgtctggttctgtttgcttttggacttctcctttggcagtgcggcaagaacggccccaatgttcttgacccggtcctgctcaaagaacaccgccatcatgaccagggcgcgggtatgagcggcagaaggctgtggtgccacgtcaagagcgagttgaattttagccttgaacatgtcacggctcttttttgcatccggtccgcgagcactagcctcaaaatacttgagaagagctcgctgtagaaggtgagaggaccaccatgccgcaagtgcatctagagaagactggattgccggatcctcttccaccacgtccagaaaagcgtcgtcgccatcggatccttcctgtgtaggatcattccaggtcaaattggccgccctttgagtgatgctatcgatcatcacgtcctcactttcacactgaagtaaagcttcgagatggggcggaagtgcatcctcgtggtcttttggcagtgctgcattcatcttccgtgccaggtcccactgatatttcgcaagcgaacgggcaacatcgttagacactcgatagctccactgaccgggaacaccgactctccatagtaggatgcggcagtggagtgccttaagcatcatcctcatgggactccgcggtaaagttcctgcagcgaagatcgtaagcaccagtcggcttttgctgatttcagcatctccgccagagagttgtgcgtcaattgcaatgtcccaagttttaacgcggcccttctcatcctcttccgtgatgccagtgatggaggaatatagcttccatcctagcagacaccgtagaacgtattcaaaacaacgtgaagtcacgacataccattcgtggaaaaaccgatgccttgggaccccaactcgctggatgctggtcaaccacgcttggcgtctgaaatttgacgaggagagcatgacacctggggttgacagcttggacgagttctggtgccccggacctgagttgaacagatatacgaacacaatgaaagctgacccaacaacgagaacagcaaggaagaggaaatgtaggatggctttcgcatgccaggacgaccagaaactccggcccattatctcatagaaaaggggtgggacttcaacattcctgaagtaattgtatgggatggccaacaagcctttggcggttaagtcggtttctttctctttgcccaggccctcgaaaaccataagtccggctagagtaccgagaacgtacttattcggatagtatgaccgccgacgaccgtttccagattgagtagacacgctgtttgaactcggacactgcatataagactgcgaccaaaggttgtctttggattgttcggtgcgcatgcgtttaaacgagtccggtaactgaatcatccctgctgcgggacgagaggacgacgacgaaggctcaatgggactttcttccggattcgagaaaatactgggagacgagcttcctgcggactcggtagaaacagtatagttgctaggcgacgagacagaggctgcggatgtcaaggattgatcggccaccttttccaattcgcgaagtctaaccttcaaggcggtattctcgtcttccaggcgcttatttcgggtctccagatgccgaatgtaatctgtcgcttttgaaagaatagaagccttgttcagtttgtttgccggcgtgacaccctcatcctcgtcgtccagaaccccgttccccttagacgctcgcagactgggaacactatccctaagctctgctattttctcattcaagttcgcacgatatcgcttctcgatgacattgtgggctcgtttcttagacggtaccttctttacctcctgtaccatgccactgccagctgatccgtcgtcgtcgctccctgacttacgcttttgcccagcgcctgtcgagagaggagatccggatacaacagagtttgccgaaaaggtatctatgccatcttgaaaaaagctttgggtagagagaacgccgctacggtcctgcgctgggaaaggttcgaaagagatattcgtacagtcaatgggaatgctgggagagaagtccccagatgggaagaggtcgatactcttattcccatcagagaagggtggcgatgtgagagacggcgataacggcaagttcttgttgtctgggaaagcctgctcatcccatctcatccattccgtccaatcctgccctgtatcatccgagccggagtcgccctgggaactcttcctacccctcgactgtgcgggagagaagagttggaaatcactgcccatactaggggccgccatctgaagcaagatagaatgctgtgaccatggaccgtcgcccggttaaccgtggtcgtatatc

SEQ ID NO: 10203 - DNA, 136 bp, Emericella nidulans
tagttactacttatgcagcctatgagctccttgcacaaggctatgacaaaccggcagcaatgatagtcgggagaccagttcacaacgtcactgatatctcccgaagtggtcatacaatcatagctaaacattttga

SEQ ID NO: 10204 - DNA, 2341 bp, Emericella nidulans
tcgagttgttcgtttccataaaaccagaccggctcgcaaagccccgaataaggcctccggatgcagttgacattcacaccatgtgagcaatcttgagccccaggaaagaatttctcctaattaattcctgtcaaatattacctttcgtttctgtgaaccgtgacattacatctgtatcaagctccttactctagtgaaactacccttcaaactctacctcctttctcatcttctgtctagcctgtctcatcgatccttcctctgagacacggcttaattggatatgaatatcgtagaaagcattgtgtgtcattaccacttagatgcagtgggcgtatgtgtggacggaaagaaacctgtattcaagaagccattgtgaatgttgaacatgcatatttactcggtcagaccaggtaatcaaatctgctggattgaagttcttcaggtggctaaaagactttgaagtagtaggtctactgtatatcatctttaacctgcagggagaatgttttacacccttatatgataataaagcaggtcataatggaatgccatgttttctatgacaagatgcattaacagtcactaaatacagtaaaggacacctctaagttactgtaagtcaggagtctacttcatatgcgggacccctcaccttaatactccgatacctatacgcaagaaaatgtagagtagggaccgatccggaatatcccgtctaattgaaagggtagggagtcgaaggggaactggcagtgtccgctttgcgctctttgagattgtaaatgaaatttgagatcacatagtccaactgcggccgtcttgctcattgccaacgtcagctgggagaattttcgttgatgttcaatctactgtgacgaatctctagctttgacgtctctccgttcacaggagtctctttggtgggaagtttccctgcggcttgctccgaaattcttgtcaattcggtaacaaaggattgaccccaaaaggcactagttagaattagcaagatgattctgtttaggaccagtgaaaggagaaactaaccttgtgtacttgttgacatatttatccagtttcgagaagttaagcgctcgctgttcatcactcatcgtcacggcttcatggtaagccgctgcaagctcctcagtattccaagggttaacgattatgcttccgttgagactctgggcggcaccagcaaattcagacaggactaacgacccgtggcgcttctcctgggtagcgatgtactcgtacgaaacgaggttcattccatctcgggtggaagaaacgacgcatgcatcggacacggcgtagagagcaatgagttcatcgaaattcaccgatttgtggagaaaatggatcggcataaattcgacagttcctgattacagtcagaatgaactcgctgcatatagtgaggacgactaaccaaatttcccgtttatcctgcccaccaattcgttcacaacagccctcaaattctggtattcttctacatcttgacgactgggaacggcgacctggacaagaaccaccttgcccacccattcaggatggtcactcaggaatacttcaagggcatggagcttttgaggaacgcccttgatataatccagccggtcaacgcctaccataagcttcacgccctggaatttctgctccaaagttgcaatacgcttttggactttttctttcttcaagccttccttgaatttctccggatcaatgccaatagggaaagcgccgcaagcgattatctttccctggaattctatcccattaggagtggttggcagtcccctagaaccaatattagcttctatgccaaacagaatagacatagaatcgcacatacagcaaccgcgagcaagcactgaggaaatgtctcgtgtagtcataagtgtggaaaccgatgaggtcacagtggagaagtccaagcaatagctcgtttcgtaccggcagaattcggtaaatttcactgctggggaatggagtgtggaggaagaaaccaatcttgatgattttcttggtgtttccaatttgttctgggagcatttcatgtaggagcattaaatggtagtcatgcaccaaattaaagcggcatccctgacttggctgcaacagcctgtgcaatagaccaattgctttttatagcttcccagcagacttgtcaatggatttccccgggtgttatgaaaagtggcaaggatgggtctggtaacagactatttgcagcaatgcccctttgctgattggggagactgcttgaaacccatgaatgtttctgcagctatatgataaaacggaagcgttttttccttaccgttttaaa

SEQ ID NO: 10205 - DNA, 820 bp, Emericella nidulans
catggtagttgagataggcacattcggatcagcccgggacctatgctccaggatgttaatccacatttgttggatcgactgcgcggaggtgaagcttcgttcagcttccctttattcacttctgccccgctggcccctgatgcacacagagcccaactaatcttctttctttggaagggatcattcatgctgatggttattatttagaattcaaggagatccgcaaggaatggaaagctcggaagaaggaggaaaacgcccaacgcaaggctgccgaggagtatgagcgtgccgccacccaggctgcgctgaccagccaggttgaaccccccggcctgtttccagacaaccttgaagacttgctgttacgatggacgaccctggatagacgtgaaatttgcgttgaagtaccagcatgttaaacaaggtcttagacaagataggtcaggggtaccgagtctttctgttgagtggaggcggaaattttagcatccacaacagtttactggtgttgtggatcctcttcgtgacagaagatttacctctcttctcacctctccgtccaccggttggagagcgtccatcctctacgtagttgaaacagatactcagcctgagcttcttcccgcggcggaacagacccgaccacatcacgagttgtttctcaatggcagtccagtttatatcggtgttgtcgaatcgcttggtcaagtcacgatgggaacgatcattcactgatacgacaatctcggtgtcatcagccctcacccgtcggttgcgggaaacctttcgtcgaaggacgttttctaacttatcctct

SEQ ID NO: 10206 - DNA, 128 bp, Emericella nidulans
tggataaacaagttgcttagcagtgagtgtgtggaaattgggaacggcatagggtgtcggtatggattgcgataggaggaggagaagcggatgagtagatgtgcttctgcaaagtcagacactgcgtt

SEQ ID NO: 10207 - DNA, 2034 bp, Emericella nidulans
tgaaatatgtcaaattccacgcgttatactttcaagaaatgtctgcgtacacaactccctgtaggctcactttaggattcatatcgagggttgctcgacctccacgtaccccttcctgaaggtctttatataaaaagtgcttgcaccggagctttacgctggccgaccttactaggcaatcagatgttgattcaaatgttcaacccggacatgtacttccaatcactccggaatacgcatgacagccctcccctcaatctctgatctcccaagtcgctgtataacgtcatcaatctgatcaaattcaaaacactcaatatgggccttcaaatccccagctacagccatctccatcaactcttccatctcctcggccgtgccggccgagttgcccacgatagtcaaacctgcacactgttaccttccaacccgaagagtatcaaagccagaacaaggaacactgaagtgtagtgagcgacgcacctttaacgatcatgtcaaatggtgttgccggcagccggaacgcgagatttggtatccccacacaaacaaggacacctagccgccggagtaagcgcatactttgctcgtaggcggcctctccattcgctgtgcagattactgcgtgggcaccaaggccagaggttagttgtttcacagcgctttcgacgtcgtcggtcttgtagtctaggaaggctgtggctccaagggaaaggcagagcttctgtttcttttcaccactgttgcgttagggttagcgacttgtacttgccctagaatgatgtgtctttgatttagatgtgttgacacttacctgtcaatggctataactctgagccctttcttgactgcaatttgaacacccctagcaaaaagaaaatcagccttttcgaagtgcaaagaagaagcgagtaaattaaaccgtacatgtgtcccagaccacctccggcaccgggaaaaacaatccaatccccgggacgagtctttgttttcatgatggacgaatacatggcgattccggctacatcactctctcttagcacctcaacacacttggttttatagtcagcataccacataatagcggcgcagcttcgtcaggggagagctgcggtgggatcttcgttacgtgcattgcaggactgacgatgtattctagagaagatcagtaatttacggaaatggattctatggccactctgaagaggacggaacgtggaaacgcacgttggaaggtccccggtacattctattgataacatacgttagcaccgtcagaaactggagagtcgttatattgcaatgaaggatcaccataccgcaccagcattcttctgattcgggcaagccgtattattcctctcgcagatctcgcactctaggcatgagctgtacagccacctatagatccagaagacgaatcattatcactggttgctagtgacctcacgagtcgaacactcgaggaaataagcacccatacctaattccgactctcctccccatccaagcaccttcatctacaccgtcgcccactaatgatcaaatcagcactaaccctcgataccatacatcttgcctctattcagctgtggtacctacctttgacaactttcccgaccccctcatgccccgcaacatccgtcaacattggtgtctctccacgcacgctgtgcacatccgagtggcagacaccagagaactcgagcttgacaagcagttcgcctgctgcgggggacggcatcggccgatcatgtcctgatcttcgaggcggtggtgagcgctgccccagagaggggagaacgcgcggcttgagtccgcgcgggtcttctttgcttccccccctttctcatcccttcttcttccccgttcctctctcatctttccttccctttactgtcacttgcctcccttaacatattccctccatctactcctttctattcctcactcccctcattcttccccttacccccccattcctctaatcctctccttccctttctctctccctccccacctcctcacctcccc

SEQ ID NO: 10208 - DNA, 468 bp, Emericella nidulans
gtgaggacctggtaactgtcggagagggcgatatgctcgaggtcctggagcagcgcactgtctggttggatggtgtggttggtgatactcaatgactgactctttagcaagacgctacgttaggattgccatatccggagcacaggcaaatgaccgcgactgagatatgaatgatacaacgcggtcaggcgccaagagtcgaccactgctaaaaccaagcgatggcttacagtttctttttgagcaccatgagtcgctgcatctggagctatagcacctattacagtccgaaagactcaatgaactgcgtattgacgcgggccaatatccgtcccaggctgctctgttatcctttggagatacgctagatcaggcgactctgcgacagacctgagccaagccagctggatgtccactcccaatggaggcctgatacgacataaaatcacatgctgtaccgacgtctga

SEQ ID NO: 10209 - DNA, 239 bp, Emericella nidulans
  unsure (1)..(239): unsure at all n locations
gattgttgagtgctgcatggtcngctacgtagctttgatcatgagccatcgtngtcgaggtcccngtctgcgtcgntgagaaggtnacatgtctatagcgaggcgatacagacgtcncggctagcancaatcttagtcagcgcatatcattcgacatcgacgatcaagcggatccagctccgaaggttgcgctangcgngnacctggatgcggcgagacgatgatttctagcgtatgcg

SEQ ID NO: 10210 - DNA, 110 bp, Emericella nidulans
  unsure (1)..(110): unsure at all n locations
ccaacagtagactagagaacagtagtgcggtaggacacggacccgctacacgtggacacgagcttcagaggcgatgctantctctggacaatcaggcgttctggacattt

SEQ ID NO: 10211 - DNA, 1280 bp, Emericella nidulans
acacttctacattcttccacttttcttgacacctatactccgtaacttcgatatctatacaatgacacggaaagcagtaatatacagctgtgaggttgaagcattcacttcggagaagctcatcctccgcggacatcggtcagtggccccttgctcagcgacagtcgttcgcttcccagaaagttggttatcaaatcatgagcgggctctgcatcttctcgacgaccgaattgtgaaatatgaggttcaagggctttctcaatctccggaagagtttggtccatagttttcgcaatttctgagtttagactttgttagtaaaatggaaaatgcagtcatcagagcccaaagagatcttaccaatactttcatgttcccagatattggccttcattccgacaccgtaaaacgcatgcttccggaggaaagcaagccatgcttgcacagcttgagagttgccatctttgatctgaattaacctgcggacggtaatacgttcaaagttctcttggcttttcttgtgtacgaaactgctacggggaaacgtccaccgctcgacgattttcggtaggggcactggaccagaaacagggagattcaggtagtaggcagcacggatagcgaagtccgcaaagaactcgagatttcgcacactgtacgatcttaactgtaggtcgcaaaccgggagaccatattcggcttttcttcggagcggccgcagatacagtgcttgaacacttctcggtaatcgagcgttgatgttaagatcagttaaacgtgctcccctaggacagtgttaggagaaggtctgtctgactttttgcacggcggttcgaatggaaacgagggagaacaaaccattcattcacagttgaatcagcgtgtgtttgggtttgttttgtgctgtgtccgtcagcaatgaaaccgagtgcacactgaaggagaggctaacgtttcttcttccaagctcttttgctcaggtctggttgtttgagagggcgaagacgcaaccggctcttctgcgcgtgcttgctctgctaggcccgactgagcgtttttggtgttccttagctgactagaagtactgaggagtgctcgcgtagccgtagcaagctggtcaagaatgtcaacatgaggccgtgtgggctatagggttatattgtacctgaaatgcactgcccgttctgagaagaattctatggggtgagaatagtgacatttcgcttcctgtaagatcctaaccactgagatagaatttctgctggactcgtcggtgttga

SEQ ID NO: 10212 - DNA, 1502 bp, Emericella nidulans
tctaagatcttcacctcatcaagaagaacagaatagtttcgtaatggcagacaaggtgtaatttatttcgtcaccactgggcttgtcgtctaaggggtttcctacactgcacacgcgtaaagggcagccgtaacgagccaaagctacatgaggaccccaccgtattacttccatgaatgtgagttcaacacaagactaacgtcactggcaagtgggttcgatctctatagaacttttgctatatcgggttgagatgattattcgaagtagacaacctgggaaacctagactcactactgcggtttaaatccaattggcagagttgcttagaaaaaagtctgtctctacaggatatacattcaatcagggccaggttatgacagtgcattccttgaattcccaactggaagcccaagcgtgatcagtatgatgcaagcgcacagcacttagaggatgtcggtgaatcatgagtccaccaacggggtacaaaccttcttctggtcatgataataatcctcataaaaccagtccacgtaaaccgctctgcacatcttggcctatcaggcgtctcggcatattcttcaccatcgcgaaattccggcagcgccgcctcccattgcgactgagaatgaggcagccacggcttcggcagcggccagtcactgaaatgaaccagatacgcccgtgaaacttccaccgtagcattccactctgcatcttggcctctgaaaggtactggaggtggtccttggtgcgaaactcgcctgtcagcagggcataccgtcgatgcggtaccatcatcgccgagtcggcaaacaggcgattcagcacctccatgtcaaacgcgtccgaggacctcgcttcctcgatgatgcgctcaaaggtattcttattcggctctataagcattacgtgtgacccgaacatctggtatttgataatgctgtctgcgtcgttgagccggtaggcgcgagggacggccacgggggcgagaggagaggaagtagtggtccatattgttcagcaccatagagtcggagtcgaggaccaggacgcggatacactcggtcaggtcgaaggcgtaaaacttagttagactcttatgccaggtagggtcgccgtttgacgttgagagcacccagactggtcgcagtttgacgtgcgggtattgttggcggattcgagtcagggcgatctgctcgcgacttgtgccgggctatataatagggtcatcagttagagattttgcgttatttatctcctttttaattattatctgtgccgtgctgaaggcgccgtcaggacagggccatgccgaacctcttcccagtcttttggatggatcacaacccggtcaaaatgggtcgcaaaccggtcgagccgcatgaagttcatcatctgcagtatcttagatggtggaatccataggggatcgtgtgctggtactcgttcttcttaccgcattgcacaagtagtcgaaattcgtcgcatattgaacgtag

SEQ ID NO: 10213 - DNA, 319 bp, Emericella nidulans
aggggggactttcttctgatgtgcttagggcgtaacataattcttgagtccaacgactgagtccaccataactatgcccacccgctgcctagaccctccgcagtgcctgcgccctgttggctttcatagtcgcgatacctggatgtgctgccactatcagactgttaaggagaaagctcacccctgcaactgtgtgggttagacttagaccctacctgcccgtcgaatggctgggctgcctgcattgcacactgactgtaccgcccggaccctggctagcacagaacgacgaccagcacgtgtactgagtccggtatca

SEQ ID NO: 10214 - DNA, 291 bp, Emericella nidulans
  unsure (1)..(291): unsure at all n locations
ttctaccctgttatccgattcaccacagcgcgtattggtctcttatctcggcatcgaggtactgttgcacatgngccatacagagngtntgcttccgcacaggnacgcagttgtctcttcaacacnaggcttacncnactggggtcgnggtncgagacacgctagtcatttngttgaggtngattacagatagataagttgtatcgatcagctgttcgtncgactgcttggcaatctcaaaatctcagctcngtgcgaagcnagctatcgataacagatccttgtcgggca

SEQ ID NO: 10215 - DNA, 943 bp, Emericella nidulans
cgaccgctcacgtaactaccagtgtctgcaaagaggtatacggtggcatcagcgatatcacgaacggagccgaagcgtcccagaggttgcgctctctgagccttctcaagctgatcgcttgggaggagacggtccaggcccttgtgtagttagcatcagtcaccaaaaaaaaaaaaaaaaacagcggcaaactcacctctgttgaggcgatcggacccggagcaatgacgttcgatgtcacacccaatggcccgaattccagcgcgacagtgtgggataaggcgtcaatgcccgctttggccacggcaacatgggcttggaatggggttcctgtgtagtggagcgtagcgctgacaaaaatgatgcggcctccagttcctgctggagatggcttcactgcaagagctcattgtgagcaagatggatgatggaaaagagtggccaacatacatgaattcgagtctaccctgtgtttctttgccgactccacaagatgtggaatcgtcgccttgagcgtattatatgaccccaacacgtcaatctccatcacagacctgaaagcgttcacggaaatctggttaatagacgcgagaaagttacccgccgcgccagcgctagacgagagatggtcagcgagcgaagcccaaggacagccggagtgccgcatacattacatagtcaatcgccccaaactccttgacacaacgatcgactgcgctctgcaaactaccgaacgagcgcacatccacagcaccaattcctaccaccttcgcacctggccgagccgtggcaatatcctgcgccatcttctccgttttctcgacatttcgcccgacgatacatgcgtccgctccgagatgaacaagtgcgcgcacttgcgcactgcatattgtgcctgctccgcctgtgcaaaagacgaccttgttggcttcggggggttagc

SEQ ID NO: 10216 - DNA, 267 bp, Emericella nidulans
  unsure (1)..(267): unsure at all n locations
gtgtaggtggctgcacagaggtnnagcacatcgagcaaaccnncaggggctgagatcactggataggataactgncgagcttgttctaggcacgtggaatacngcggaagccgcccatctcttccacgagatctgtcggntgacnaacagtcgatcatccaacgacgatactgatgcacatgctcctgactactcatgagngcatcctgccacagcagttcatacagacggttgccagacccaggcatccgacncatatagtttgca

SEQ ID NO: 10217 - DNA, 1713 bp, Emericella nidulans
cgaccatcttccctttcctagcgatactatgcaccgctcacactttccatcgagcttacactcactctccaatcgatggagactttgacaattgcgaagtaatgttgtttcattgaccgcgttgcagaccagtgacgcgagtacgcgcagatggcccagtcgcgcaggctgacattaccagactacaaaagtcaccgcaacacatttttctaccgcaagatacatcatcattgagtgaccttacgctgcggaggctgtctgtcgccgtagccaatccttcgccccgtgatacttgcagttaaacgtcatgaattcgtcgggtttcctatacagtctgattagtccgtgttgacgacgccaagagcggtgcctacattgtgactgttttcgcgcctttagcagtacccggttttgctgcctgccggctataggcttggatcaggcccgcgcggttgtgtcggctacggaaaacgtcctgcaaatcgtaagactagagcaaggcttcagcgggatcatactacttcgaaaattcggccgatctcttcaccagaagggctgtcagcctgttctgcaaaaaaagcacccagtgcctcggcgtcctcaattgcctgactcgctccttgcccttgggttggtagcatcgcatgagccgcgtctccaatgaggagaactcggccgcggtaccaagtgcgaagagggttctaccaccaagcgaatcagtacaaactcggtatcaggcggtgaagtccttacgatgtcgtgcaactgccataatccgaggtcccgcgaatgcctgagcgagttagcccgcgctcatgacagtcgacacaagcttacttgaaaatgctgatgatccagtcagggaactcagaaaatgtgtctagcatcttttctagactaccttccgagacccaggattgtttcgcgttgggatcctcattcatccgctctgccgactgtcagcgcctggtagttcattcattaagagcttgcacgtaccatcagggagtagggcaacaatcccgaagacttcgccttgccggccagggcccatgatcagacggcagtcatgtgctaccatcatcgacgtgaagggacttctagggttgatcttactgcagaattctggttcttgctcttcgaggatgtctgaagggatctgtcttgtgagcatgattcaatgtatcacggacacccttaccatgaggcggtacgctacagccgttagctattgcaaaacacctttttagagttaggtcataccggaatggcctgttggcaatggggtaatctcgtcctccaggacatattttcgaagaacactatgtctgcttactgtcagtctgaacgcgaagggggacttgtacttacatgccatcggctcctatgatgacatcgcctcctatcttctcgcctttctcagtctctacagtcccattaataggatcacagtgaaccacgcgagacgagactctgatctcgaccgcctggccttccctatcggtcgccagtgcggctcttttcagcgcatcatgtaggtctcttcgatgataggctatccgactcgctccatattcgttcgttgttagagggacctcgttgactagctctccatctgttgagtaaacacgaaatccctcatccaccatgccccgcgccccttctagcactttccctagcccaaatgtctcatatacgatcctaccccgttcg

SEQ ID NO: 10218 - DNA, 1366 bp, Emericella nidulans
tctagtgtatgcttggcagggccacaggtagactctgctccggtaacggcaaggctatgttacaggcctactatttactcgagaagaaaaaaaaagaaaaaaaagggaaaaaatgaagaggaccgacagaattagtattatatgcatcatcaagcttcattagcattaagagcggctcttaggccacatggtgtataagcatcagcccgtcaactacccacgcaaaaccagcaagaacaccactgcggaaaggaacgcctgcctaggaattaaggggtgacaagtactatattcgacatgaagttagtcctgtttgtgtgcggtgccatcccgtctacaactggatcgtcatgagtcatgcacaagtatttgtagcggccaagcacatggctttcggaatgcgggcacgataaagcgaccacaaatgtcgtgttcgtcgcggaagtgaacccttgaagtcaaagcggtattagaaccacatgatcccgaccataagagcgaccacaattgccatcgagctcccacaaatatggtctgagtcgcgtcggaacccggcatacttggactggccagtagtcatctcaagtgaattgggcgatagggtccgttgcgaatctatctgccgtggggtttggcctggctgatctagattcgtgctcagtgactctttagtcgaggcacgatccagttcttcgaagagctccaggtgtctctgctcatcgcttgtgtgcggggcgggatatttgggtatcagattttcattcgggttatggactggcgatcgagtcgtccagatgcccaagaaacgtgctccggaattgcagacctgctgccatgtctcacgtaccaaagcgggcaccctggatggccaagaatcatcgttgaaacgtttcgctggcgccccatcggacagcttttccggcgtaggctgatgctgcaaaattttcgaggacaccggagttacggacgtattggcgagagtcagcgtagagtgtgcagtagtatcatcgacgtgattatgccgcggcggcagcggtcgagacatctgctgatcatcccagcgcctgatgaactccttgaaagcgctcacccctcgcgttatgcttgacggccctttagtcgccgagtaagtgaggggatcatttccagcctcgataccagcctcaaacagactccgcggaggcgtatgtgccgccgactgatgcggccgagcatcgcgttcattgtcactacaggaccaataaaagtcgccaaaaaaccatggcctgcagtggctgccggtcacagccgaccgcgatctggaatcaaccgtactagaagcattcttgacgcggggggaggaatctgcaaaccggtcagcacggaa

SEQ ID NO: 10219 - DNA, 2462 bp, Emericella nidulans
ttttgtacatctttattcaagataagaataatacaagaggagggggggtaggggattattttttaacccacccttacacgcacaaatttatatggctgcacagggatgcctagtggcaggggatctccctccaggagaggttggtataaataatagtatggagtagaaaaagagccgaagctcagccgctgcatttatcttggaccgtaagcttactccaaatcaccctttttgggattgttctcatcacatcgtcagttggttggcctttccccccctacattgggaaacgcgtatgctgctctgcggcacaaagactgatcgattggaaattggtgcaaagcagactcacagccttgcttcgcaattacaaagccgattcagcctttgaccgtgccgtttgtgtcttggatgattatttattgcaggattaatactgcacctctctgccagtcacaacatttccctatcaacatctttctactcggcaaaccgcacgccatcagttaccacgcgttgcacaatggcatctcgtagcgaaaggcttgcaaagttttttaccctggttctcagtggaaagcggcttgtctcaactgtcgagaattttacgttgctgctagaagctatccaatggcaaaccgatcatgctgcctgtgtcgaacgaatcgtggcgagccctccagcaagaagtgcaattcacgccggaattcgtctcgatgtcagccctgagtttctgaacaatcatacttctctgtttatcctttatctttcccagcccagtgtcaagaatagatgcaacggccagtttttgcaggagctgttggaactcattttcgatccgcccactgtttggaacgccttcatgggggcgttccaagatgaactgcttacagaacgagggatggaagcttttgcatggctgttgattgagctgctcgcacatcagtctgtcggccagatcaatgtggtcgctgacgctcaaaatgtggcagacaatggcgccctgctccgatccttatcccccgaaactcgcagatatggtcataaactgcagcatatactacaaatcaaagcaagcaacatggtggttcataatctggactactttccggggggtcgacacgacaatgaccacgccgacttccgccgtattgcaatctatccaacctccagtgaattccattccaaagagaaacctttctatcgtcgtgccgatgagattctagagctggctgagaatacccgcccagtgatgcatctcgataaccagtttcgccttcttcgggaagatatgttgtcggagatacgcgaggagtttctggccgctcgcggaaagaagcaaaaacgccgcacggccacgttgctcgagaagctggacttagtaaacgtgttttacggtactgataagagaggctctccctgttctttagtgatttcgtgcctaggaggattagtgcaactcacgagcagggaccgtgatgcacgaaaagcatttctcgagaacgaacagagctttcttcgacacaggtcatttggatgtctaataaggggcgaggagattgtttctttcgcgatggtggataggcagatcgattacctgctcaaaagccctcctagtgtcgtgttacgcgtgataggagatgaggctgttagaaagactttatcctattttaaactttacgacgatattcgctttctgctggttgatgctccagtcttcgcctacgagccgatcctgagacaacttcaagagaaaatcgagctccccctcgcagaagagctgttgggatttcaacctgttgacgtcgtcgctccttcagggactatcccttcaacagttattgagtccttaggcgatcaggaaaggacactgcaggacatactcgggactgaaaaacctctctccctagacccttcgcagatggagtctctgctatccgggctcacacaacgagttagtcttattcaagggccaccaggtagaaattgatcttcgcgtttaacgtttaatgactaatagttcgacaggaacggggaagtcatttgttggcgctcttatagcgaaggcgttgtacaagcacagcaaagagactatcttggtgatgtgctatacaaatcatgctctggaccagttccttgaagacctaatggatatcggcattgacgagtcggccattgttcgtttagggtccaagtcgtgccagcggactaaaccgctcagactttctgcgcagcaagccatccgcccccggaagagcaaagccacctggagcatcattgacggattgaagagcaaagctagggacattagtgaagagcttgacatggctttcagtgcctactccagcttcaaattaaattatgacacccttcaggaataccttgagttcgaagagcctgagtttttggaagcttttgtaccaccgcgtgatcctgacggaataactattgtggcgagaggc

SEQ ID NO: 10220 - DNA, 557 bp, Emericella nidulans
aatgacattattacgggtcctatacctggcctagcagccgaagatgtacctattcccgatcgcccaccgtcaccagaggtcattcctaccgagtctgcagagcctcaatctgtttctgacactatctatccccggaataatgacgctgaaccaaaagaagaccgttatccgccgccccatcgatatgtacctcacaatgacaggccgcaaacgcccacaagctcttcacctatgcgaaggaccaggagtggcgacagaccttcctccgcgaagagatacctccagctgctgccccaccgcggccggacgaggtttcccatgccacagctccaggacgtcaggagcttataggtcgccattcttcagaacaacaggcccctggtaccgtgccggtgtacaaaaacgtagacaagttaaaggaagaacgtgaactagctgcacaagaagtcgcgttcgagcgagactacgttgttgtggagaagcgcgcagtcgaagttaatgcttttgcagatcaattggcatatgacccaaggttccacggtaaacaaactggtgct

SEQ ID NO: 10221 - DNA, 245 bp, Emericella nidulans
  unsure (1)..(245): unsure at all n locations
cggctgcttctgtcacaatcggaggaaatgtatatgctctgcggcgactttcgagaaagtgcgtacgaagaacagagtcgctanaggcagaggtgtcantgncggacatgagtgcggaggggttctcaatagctgcattgtagagctggaccgcagcaggcatgatcatggctagtaatgggaacatcaganacataggntcaggacgcaagcgaaggagatctgcagatatccatcgggagagg

SEQ ID NO: 10222 - DNA, 1229 bp, Emericella nidulans
acgttctactgatcgtcagccacagaatgaattgtcataaccgcaaatggacgtggacgcacagaatgctcagtagccggttcaacaggatagaccagattccatttcccaaaaagtatgtatagacttctttcaaaaagttatccaagttctccacattcgcccacatccacattgctttcatcttcggatttaccaaggccatattagggtggccggctgaccaaaggcttctgagttggttccgtcgaggaagatcgtgtgacggccgttgctccctggtgttatcccaccgaatgtgttcgcgacgaggagaacgagcagagcgagaaggctgcgggtcggagaagtgatgcgaaggcggaggaggaagtcgcgtcctcagatactcatcgtcatgttggccttccatcaggagagacgcggggacatcgtcatcgtggtcatcgtcaaggtcatcctcgacaaactcgggccgcggtgttactgaacgcatgaacctggggttgttgggtttgcgcatgcgaggcccggaactagctgagcgttcccctctttgtgcgatttgaggcgtcaagaacgtatcgctcgggctcgaagatccctcccgagtagcatcagccatagcttcttcgagttcacgatcgctgaagcgattccccaggttgacatcatcatcataaaccaagccagcgcgttcctctacgtccgaagcatcggaatcattgtcatgttgacgtatcgtctcgtatactgactggccagtttggggaagcaagcgagacaggacgttcgaggccatcatgttgggctaaagccttcctgcgcagatcttcctatcatcagcataacaagacagtatagatatatgtttgcggcctcaaagccagaatcattctcagatggccgtcatcaaacgatgtagatggtagatagcgagctgcggagatccgacaaatggagctagtccagagggtgacgaaggtgatagaactaagcgttgggaacggatgaagggttgcctctccggctttcagagacaccgatggtcaaatactgtccgttataatatcgtgacaggtaacagcaagtggcagctgataaggctatgagcagccttgatcccatgacattgatagaagctcgggagccgcagctgtgggcacgcggattatgatgcaagctttaagagccttatagcctgaggcataaacaatcatgtgatctta

SEQ ID NO: 10223 - DNA, 1461 bp, Emericella nidulans
gccctcatgggtggaaggacaggactagaccgagtaggcagcgcgttgtccaaaattggaggcgaggacggcatagaaaaggacggttcaaatagaccctggtaacgagattcctcgggcgatgttgtcgtcggttctacagaaggatgatcgtcgctcatggcatatggtgaattgtactgattgctctggctagtgctctgcgtcgatgattctcggagaaggctgggaagagggcgcgcgcgacggggcaggtggttcatatctgaaataggcgtaggcggacgaacgggttcttcgttcgagttctgagccgcagatatgagcgggttgattggcgtggggcgatgaatacgaacggaagctcctgtgctagccgccactcttaaagagcttggttgtctctcgatgttcaagtcggccttgccaggggcatcggcccggtataatttggcccttttcctaggctgttgttccgaggactcttcgcagctcccataccctgaatgtattgaatccctgcggttggactttgcataagaatggaaatcggcatcgcgcatggatgcactagatgaaggacggataacgtcgctctgacttcgctcaaggtgttggggccgtggtgcggactgttcttgttgctggatcgggaattgacttccaggcgtgtgaactctgcttaccgtgcttaaagctgactgtgcaggagatgtcggtcggtacgattgatgagtcggtattgacacgatttcccttggtgtggagcctgcgctaagaatctgatgaaacctttcaataccggaatggtccacgggggatgatgcttgggcagcttgctgggatgagggcgccatcaagccggggttttgacgcaagaaatccgtccatgcctgtgcatcgaagtcgtggggaatgacattgctgagctcccggtacttctgcatgctatccaagtattcacgttgcaaggctgtcgggaccggcaccaatcgcagtttaacctctagtgtctcctgggcgcctttcgaaaataaacctagcacatttttgcagacccgaccggttaccattgtctttgatcggtgagccggcgcattcggggtaggagaggacgaggccagaacccatgatagcattccctgtcctacaaggggtgtctcatattccgagtaatcgtaggcgtagacggtataatcctgtcccagctgagcgaccaactccggactaacaatacgttagcacacagcgcagaatacctccaagacctagcacccacctagcggagacaatagcttgaatgcaggtcttgagctcgatcactccaatgtgtgttttctcatcagggcggcggtctggatatcgaggagatgaggccatcgggctaagcaatttgtcttactatcgttgtcgaaagtatagagcaccttgactagagtccaaattcacattagtgcgcct

SEQ ID NO: 10224 - DNA, 1203 bp, Emericella nidulans
ggcctggagcccggtcgtaggcaattgaggcgatcccagatcggggagcccagcagttccagcaacatggatgatccctgacaatttacatgggcgcaccgaaacgcacctaagaggcatcggcacacaatgcatgtctgcagtagactatgcagagtgggaaattccagtgggaatttgctttttctgataataaaaaaatcccaaaaatcccaaaattgccagaattgccagaatcgactaattctgaataattctgcttgggaattttcttggaatttcctgaaaatctggaaaggatcacagcttgtttttgctttttgcaccacatcccacacggcctgccattgcctgccatttgtagatctgctctccaataaggtcgtctccccaggtctccggccccggtcctcgtctccagtggctccgatctccatatctggtctgactgctctgagtgcagtgcatacaggagttgagtttatcgagtcacccccgatgcagtcagaactcgtcagaactcctcagaactactgcaggtgctataatcgagttattgctgcggagctcttcaactctgataaaggtctggtctcagcgatcaagctcagcgatcgatttgaaatactctgcgggctacctttttggggcctgacagaacgcacattgggctaagggctagtcgagtcactagtggagcaccggggcgatccaacactaggagacccgtccgtctacgacaggacttagcagcctctcgcttgaccccctccagggatgttctttccgggcccagcgccagcatctcattgcctcaggacttttgcttttgccgcgattggcatcaggatccgtacttcgtaagccctaatttgttctgccatcatcttgacatccgcaagctgtcagcacagcaaactaaacgttccttccaaactaattgtctatactaggtaatcgtccaaatcagccacaacctggatttctccaccgcgctgctcctccaccataccaccggaatgatcctgtctcgatctctatctctctcgaccttataatctggctgacggttagtcgacgagcagtcgatgctcgactgctcgtgactgcttcgcatctccgcgggtatggtccggcatatctgggaggatctagtgtaccctggcttggggtcatcgacgatggtttctaagcggagtccta

SEQ ID NO: 10225 - DNA, 1407 bp, Emericella nidulans
tgatataacccaggtgagtcttcctggcaacgcattaagtaggaatgaataacacacgtaccccttcgtagtctctgttctctgttcctgcggacatgttgatgggtgaccaccagggtcagatagatacaatcgcggttcagattccaactgaaatcgataagaaggtaacgcgcaggtacttaaacagacgacgctctcgagaacgcctattccatggcaggggtttctgaggaagccgagagatgggaaggagagggaaagaagcggcttgaggggcggatgtttggaatgagcgcagaacagaggtagaacgaaattctagccgtagttgaattaccaacgcaaaaaaaaaaaaagaagcagggattctgaaacagacaagaatgagcaacaatatgcaatgcaaaggaggggcgttggtggaagaagagtaccagttgtgctcctgaggccaattattagtcttcatagcgcagctggggaaagcttggcatcgctctaggatctacatctatcttttccaccctcttctgtatacagacgcaatctatgctatggctggcctcattcgcaggcactcagatcgcagaaccgcctgtaacagcactgcggcatcctgatcttggctggagcgaacacgcatacctacctgcacggcaatcaccagtggggttcaccttgattctagtcgaagcaggcttttatcattcttccttgttctcactcgttcaagggaaaggtacatataagttatcatggcaaggaagcggcctctgacgagtccagttcttcgtccactcatactaggcccactcatgaggcaagggaggagttcttatttcagctgcagagtgactgttccaactctagccaccgtcctgcccgcaggggatccagcttcttcaattcggacagccagtctaatacccgcgtcttctggtcctcatttagcgttgtttcttccaccctagcctccagtgaggtacagtctataagcgcctggtatagatacttgcagtcttccgccccatctagcatctcctggatcttctcgatctccccgcggatatagttcaatcgctctgtcttagtcaaattcggtgtcattgtatggcttgacttagttggatcaaaggtacacatcaagttctggtgatagaaccataatgactgatcataaggatcgcacaaggcgcgatgaataagttccagctctgtacgcacaacgctcgtcagtcgcgagtctcactttattgtctttgcttttttcgatcaacatggaaggtcattacgtaccgtcgtcaagaatctgtttgcgctcttcgtcgctggccgacttctcgctcagtaaccgctggataagtttagtacggtaatgccaggcagagaagttggagaggttgg

SEQ ID NO: 10226 - DNA, 766 bp, Emericella nidulans
gttcaacttgtagggttggttcctcactggattttattttcgctcggagtgagcatcacacgtgattcttcatgttactaaaccccagtaaacgcctccagatatacacggaggaagagcaaaatctcgagaaaacgaattgcgagagagttgacacgtcctcccggtctgacaacgcgttggaatagggtattgcgtattctcgaaaagatgtcgtgtctccagggaaccaattacttcctcattgggaagtattatcatgtgatcctcaaagcatcaccgtggcaacggagcgctaacgtgtttatcgataaactcgaaaaataaacgttcccgccttgggaggaaaagctgatgaactcgaccatttcaacgaccatcgacacccacgacagcccttcggaattcggccgctcctgactctcgctttaggtctctgcaaaatctcaaacgacctgtgtaaatttcgaaatccaagaaacgagaccgcttgtcaacttcgaccagtaaccacgtcgaactgccgctatggcggccaccggagatttgattgacttcgatatcatcgagaaccagaaggagaatatccagtcactacccggaggccgttctgccagggagctggcccgaatcttctctcctcgtgaccctagcgataaactgtcatctccttccccaaacgacaccaggacccttaaagacgctatcagacgacatactgagccgaatctcaggcgatggagaatcagatgatcctctcgacatg

SEQ ID NO: 10227 - DNA, 737 bp, Emericella nidulans
gtataccaaagagaacgaaagcagaagcaaatgagggagatccaggttgttacagtagacagttgtggcgcacacagggaggatgactcagcatccgacctcccgaggtcgtggagcttcagcggaagcactacgcgggtctttgcggataccgcaggcggtctcttgtatatgtatatccggtagagtatcggatattgttcacttgggtaggtagtagcggtcattaaatataagtcaaacattatgcagctatattgcaaatagtaatgtagactgtacaatccagaacgtcaacagatccctatcagcccaaatctcaagtcattgcgtcataatacaaagcgctaattgtcaaaattaaaagtatgccgaacaatgtggatatatatggcaagatgttaatcattatacgaggatcagagactagttctgtgagtctccgtccccggtaatagtccgttcggtgcgtgctgggagaaggatgcccatgcacctttatcggattctcgaatcggagaatccatcgcgagcggtactcctagaaagtctggggggacggtgtgaacggatgggctcacgtcagacaaagtaaaactgcctctgtttgacgctggatattgctggggaggagggctgccactgctgctgcggagactgccattgaaacacaccccaggcgtcacgtcgaagcttcatgagtgcgctcaacgacatctcgtcataaatagtagtaa

SEQ ID NO: 10228 - DNA, 373 bp, Emericella nidulans
  unsure (1)..(373): unsure at all n locations
atcgggtatggctgtagaacgtagagccgccatgacagggtgtgagaagcatgaaacaggtgataaacttgagctgaagtagggattcgattctacgacgggtccgactagcaagagcaccggatgccgactgtcatgcattaggggatggcgatgatccgagcaccagactaccttgctctagaggtgatactgaccggacgagaaagatggtatgaaaacacgcagtgaacgaggtagtagaacgccgactgataacaggcactagtcgctatctgtgatatcgagcctagaagcactacatatnggcttcttgatagtttagatgctcgcgactgcctcgtcactgagcggactgagccaggcacccacg

SEQ ID NO: 10229 - DNA, 1361 bp, Emericella nidulans
atcggagcaagcccgttttgattctccaattcccatttttcaactgctcgccttagcgattagcagccgtgttttattgccgagattaaaagcctgtctacatctaagatatcaaacactgatcttatcgcctttctccatctcatgcacccccttcggcccctccgataccaccacttcctcgacaacctccctctctccgtcaagcacccaatctctctcttccttggccagatactcccatcctttattgttgacaccatatccctccaggtaaacttttttcctgagcccaccgatcctgaaaagaaccgcatacacgaaccccgcagccacaaaggtgagaatccagcccatcttaaacatattctttgcggctgcattcacggcttcaggctggtattcgcctaccaggccgggtaggccgagcgcaacgccagccatccatgcaaacacagcgagataattgatcccagaccagaaccagtacagacctgatttcgtgccattgtacaatgaggcaacgtggatgttgccgttgcgagagacgtagtccgtcattattatctgccacaccgtcagtcagcgtcttcacatcttcaggctagagggggttcaaagattgaaatccctacagcacaaagcggcgccataaaaatgttatagcttcccaagaaactcaagaaagcacccgcactggcaagaagcttccacggcacgacgcagacgccgaggatagcgcatagcacctggccgcgtcgaatagtcaggaaccgcgggaagagacccgtcatatctgcgccgaaaggaatcgagttcccgccaaagttcgtcccaaattggctcacgaggaaactaaatgcgactatccatactgcgcagcgggagcccggcgtccacgcgtggtcaaggatcgcggagaggagatcccagatattccctgcacaaaaatcacgatcagcatctcaaagccaggaaagggaggggatgtcgggcagagtaaatacagtatgcagtcccccacttcccctggatactggctgtactcgccagccccaaaaagaagacgacaaccttggacacgaacaccgcggcaccctgcggccaccccgcgtctctcggcttgcgacaatagcgcgcaagatctggctggttcacgagcatcggactcaacgagcccatgatcacattgatcccgtccatgacagcccaccctaaattcgcgcctgagggagccgtgctagaagcgaggtggatactggagatcctgccccatgtgccacgcaccatccgaagagcccgaatgtgacaaagggcatcacacgcctttcaggctgaacaaccagtggattttggtgggg

SEQ ID NO: 10230 - DNA, 107 bp, Emericella nidulans
ccgcgcccacgttcaccagcgccgagttgacggagatagacttgaaatcaggggtgcagataggctagcactttacaacggctgagaccagatttcttggcgttctc

SEQ ID NO: 10231 - DNA, 1905 bp, Emericella nidulans
tacatgcaaagagggataaattttacaatttactgcattctttcttgcacaatgttacatctggtaactgggtgttttagtattgcatggcgtggctaatcacggctgacaggttgctataacctcccccgatcctgagttccatactgatgcgcgggaatacttcacacgccacatgcgcatacttgagcggtgctcatctgcctggccaatgccagagatccaagcccagattgactctttacgacttgcgttttccgctaacattaaccgtccattcgagctcaaagccacttttccttacgggagcccttcggagccctaccaacccagccctacactggagacacaatacaacccgcaacccaaccaaatatccaatctacaagaaagagccgccttccatccttaccctattactcctccaatatcggctggtactgaagactctaaagccgggactccccagcttcaccctccagcattactttcaacgcattctgtgcatgcagagggcccattagttgatgagagcagttgggatcccactcgtatcatcaagtaagaattgcctggccctgtatttcattccgagactgattttttgcttatagccaatgggacatggcattttcattcagtcctgctgtgaattcaaattcgccgccaatggcaattcctggaacatcggaagggttgcagcctacaattgcggatcagtatacgctgcaatatcagcagccagccaagcttccagttacacaagcctcagcggtcccgcagccacagatgagcgggcaaccagtggttttcacggcgcgtgactggcagcaaagtgtggcaagcgtgtatgacccgcacggcttgaaaaggagatggaactactctgttgacatggaaatggagaataacaccaaacgacctcgttaaacattctgccttgtgactgtcctaaaaggtgctaatatatgtacaatgccacagtggacatgaatgagactcaccatgatacccctgatttcaatcatattgcctcgaccatcttgactctattcagtagaagaagccagcctattcgtagaaaattgcacgggcgtcttgtatatctggctttggggtgtgcgccatcaccttgccggaaattgggattcactttatttgtgaatctttactttgtttgtcgccagcctgtggtgccagataatgcagctacaatgcttgttcaaagcgatgagttcattgagtacagaacctggccaccaccttggaagaagaacctgcctacatgtaggccatatttgacaacagaatagaccgtagtagccaagtaccagccagacccttatgtcccactgataggtgcgagggaaaacagcatatatagctaattttcgcagcaaacacggccagatttcggtatataaaatggagattcgtacacaagaaaatctgcaaagatggtcttaattagctcttaaataaggtagtatgcctcttctaggtccatgtcggtcacacctctagcaggaaattccttatctcggctaggtaaaaatgatgcttcagctgcgctgaccaatgcctatacgctcctcgcgagacctaactatcctcgctttgtcaccaggtagaggcttcagttcgtcgctagggtcaaagttgacacgggtgccattttgagcgggatcgtgaccactgtttcgtggttccagcttgcgcagtcgctcctcctcgaacattgtgagatcatcagaggttattgctatggcggtaggcttgcggcgtatcatgacgaaacccttgtcgaggatggtgatgttgctagtttgcgggaacattgtgctgaagagacgaatactatgggttgtatcacgtgattattccgtcgatccggtggtgaatctt

SEQ ID NO: 10232 - DNA, 767 bp, Emericella nidulans
  unsure (1)..(767): unsure at all n locations
gcttcgtgcttcattcgaccggagattgacctccgaagtccgacggagtccagtcctaggggactcccgaaggacatcaccctgggacagaccggtgatagcttataaacctcatttgatcgcattctctggtgacagtcgcaatgctatttaactgtgccagacccagggccacaagtatccaccatcagctccgatattcacgcagtcttttctcgagattcaacagtggtagtcctaaactggtcgacaccgttaaaatgagcacccctgacatcaccctatacaccgataacactcctaatgggcacaagatccccattattctcgaggagctcggtctcccctacaagctcgagcaggtctccatccagaccggcgagcagaagaaagagtgcgctgctcattctaattctaatctcatcagctacagaggctaattccacagatggttcctcaagattaacccgaacgggcagatacccgctctgactgacggcaagcagcgtgtcttcgatagcggcgccatcctgctatacctggccgataaatatgacgcagagggcaaggtcagctataagcctggaacgcctgagtattatgagcagctgagctggatcttttggcaaattggcggccttggaccgaggggtgttatgtcacgccgacgagccgtacctccatctgatgattataataccattactgacgggaacctgctaggcgccgncctctncttctcaacctttgccccgtccggttcgact

SEQ ID NO: 10233 - DNA, 116 bp, Emericella nidulans
  unsure (1)..(116): unsure at all n locations
gcatgcatgacgcagcgcatgccaacactggccgaaaggcggagccgggattacacccatcngtcaccccagatgactatgacgaccatagaacgtgcgaacaaatgctcagggcc

SEQ ID NO: 10234 - DNA, 1012 bp, Emericella nidulans
ctcagtagcaccacttgttgcgtttgttataatcaacggaattgctgaacggtgggttcttctccactattccgactgttgtagggaatgtctttggctcggcgagagtgagtgtggcaatgggtatgattgttacagggtgggttgggggatatttgcttgtgagtgccttgataaaaccgtgaatgcgtcatctaaaaatacgaaactgttgctgactgtcttagggcgcgcctatcgcgggatacatcctggacgcttccggcggcgagcagggaggatacgaagcgtacagaccggccattttctacgctgggtcacttgcttttgcggcggcagtcttagcagctgcgatacgattgaaggctgatataaacctgaagaagaggctgtagaaagagagggtagcctgaatcaagaggaacggcctcattttatgacatggagaagcaacagtcccagctaccagccgcacttgcttgtagctttaggccggaatgcatttgaataatggatgactaggcttgttgcttttttggaagatcaaaatctaatttttcaagagaccccctagcatagatatcaagtgtatcttgtttgattagtacctaattatttattcaactccacctcatttacatccggtcacgtcgacgaggagcggcgcggataatgttgtccacacggaggagaagctattagacggttagtcggggacttaaatgagcgtgaaatattatcttacctcagctgcttccgaagcagacgacacaacagccttcttcaatttgtagctctccacaacacccaactcgcgcatgtcggcaatgccaccgccaggctgtgagcagatccagcccagagctcgtcataccgttgttgatcgcggttcgtagtcgggtaacaaggtcacttgaatcgagaccggcattgtcggccaaaattgtaggaagctgcttgagagcatgtgcgaacgaatcgacagcaagttgcttcttacccgtggtgttct

SEQ ID NO: 10235 - DNA, 1217 bp, Emericella nidulans
gggaaacttaaacccaaaccaccgggtctaaggcccaggcaggggctaaaggctgtttcggcccaaattaaaaagggaggagccttcggcaaggtcctggaaattcggccctcgaaaagatccaaagaaaaggttcccaagcccgccaagccacaaagcagacatgaccgccttgcgcgggagccgaacatgttccgaagaaggtgcttcgacaatgttgcctaatgcaaggaattggtccttcgggactgcggcgaagtagtcgatgttgcagagcatataaaggacaccgacagacccaattgcgacgggggcggcaatcttcaatgtacgctcggggttcttggtttcgctcagggcctgaagacgttagcttgagcaatggtcgagagtaggatgggaccatacgtaattggcattcgagtagccgataaacgaccaaatgacattatacaatgccatgacaacaccatatccgcttccagtagttccctcaaaggcattttggaagttgtgaggcgtctcaatcttcgtgtggccagccaaagccacccagccagtgacaataacgaagatgataatgatgagcttgacaataccaagcaggttctgaagacggagaccccagttcagcgcgaagccgtgaatcaggaacgcagcagtgatgcaagcaaggccaatacctcgctggttccatcggtcgacttctacctcggcggcgttgaggatatactggccgaagacgacgctgttacttgcggcccatccgagtaaaacggcgtaggcagcaaacatggccgtggccaagaacttgggtttcttgtagacgtattcgagatagttcttctcacctccgttcctagtctggttagtacaagccctaactttgaacattgtatggaacaaacatacttaggaatggcagtaccccattccaggtagaccgcagtaccggcgacggcaatcaaagtgccagcaacccacatgaatagcgatagcccgacactcccggacaacgacaggatcgtactcggggtagcgaagataccggttccaatgacgcgattgaagatcaggaacgatgcactgacgacaccgatctggcgacggtcttcgggcgtcgcctcgaaaatgtttccttcgtctatacttgtcagaacaaagagaagccacctgaataccggagagccacatacatagctgggtaacgccatctg

SEQ ID NO: 10236 - DNA, 106 bp, Emericella nidulans
  unsure (1)..(106): unsure at all n locations
cgggtagaattacgntcgnggctcttccgcgtttaggcatgagaagggttgagactcactgtcaagggcctggcgcgcgnccggtnngtgaccacattcttacagt

SEQ ID NO: 10237 - DNA, 114 bp, Emericella nidulans
aacgcgtcgacagaccacagcagagaagcggcccggaacaaagccccgcatctcgacgttggacattggacagcggagatgcaggcccacgaaatctcgcagacctcccttgtg

SEQ ID NO: 10238 - DNA, 478 bp, Emericella nidulans
ttgactgaggagggcgcgagtctggtgtatgtggacggcggcaagacggtccaggagttcctgaggcgcggctgggtagacgagatggtccttacgctggcccctgttctgctgggaggggatgaggggaggccaaggttgtttggtgatctccctgcggatatccgcttcacgctctgtggagtagatgtcattgagaatgggatggtgagttgttattatcaggtgcagaatccggaaccatgaacgagtagaatcggattcgatttatgggaagagcgatagggctcaacgatccatataacgtttccaaaagttatttgggtagtactcggcggatgagagccatcagaactcagaatgaataattgacatgctctaactcagtacgttatgtgcctccaatcctagcttcgtctctatactctgggacaaccccaattatgaggggaagatattcccatatgactctggtatt

SEQ ID NO: 10239 - DNA, 824 bp, Emericella nidulans
gcatcatgtcccgtctcggcgcgaacgacaacattttcgcagcccagtccacattctttgttgaactatcggagaccaagaagattctatcagaagcgacaccccgctctctcgtcattctcgacgaattgggccgtggaactagctcttatgatggagtccgtgtcgcccaagccgtccttcatcacgtcgccacgcacatcggcgcattagggttcttcgcaacccactatcattcgctggctgctgaatttgagaaccatcctgaaataaagccgaagcgaatgaaaattcacgttgacgagaacgagcgtcgagtcacgttcttgtacaagcttgaagatggcgttgctgaggggagtttcggcatgcactgtgcggcaatgtgcggaatcccaaataaggtgattgagcgcgctgaggtcgcagctaagcaatgggaacacaccagccggctaacggaaagccttgagcgccggaagggcggcggacttgtcggtctcggctggtggagtgacgttgcatgggctcttcgtgagaccaaggagggcgaggatgatagctctgcagctatcaccgacaggagcttagaggttcttcggagagccattgaagcactctgaggcattccgtttactgaatacgcttgtttggtttctccttatttagtcttcaactacactgggttgtgatttcactttcttatttttaccccacctgttaatacgtttgcctgctctgtgctgtgtttattttgaggccatctccaagtgtgatgatttcagagtctctggcgttctggtgtgaagagctattgaaataag

SEQ ID NO: 10240 - DNA, 596 bp, Emericella nidulans
gagccattgtgcaagcacctaaaatcgacccgccgaccacgtactcaccgagtggaccccgcgggaaactcagcggaatgtgccgacaaggagaattcccttgtacaaagtccgattcacaagcttcacaggattacagaattcacaggattacagttgcctggttcgcctccgacctcggcatggagggcactcaacggtccacctcgagcgtcttcgttatcgggggttcttctcagggtgtagatatccagatccaatcagagccgctctatagcgaactccccttacccgcttgttacaaaactacttcgaaggtcaaaagtacgcatccgtgcagagtcgtcatccctatcgtcatgttattgtctcgaaaacggtccaactctgacatttcttctgaaaatgccagacccgccaaccactgtgaaggaactctgatatgtcgacgcttgaccgcttttcagaaattccacgcccttatttgctggggtgttcaggcccgcctcccgctataccaaaggactctggggacatcaaagctcttccagggacagggttctattctaaacccgtcctggcagctcgctcactac

SEQ ID NO: 10241 - DNA, 242 bp, Emericella nidulans
  unsure (1)..(242): unsure at all n locations
aaacattatttatacactaacatctattattctttaaacctttaatatacttttaccatactatccttaaatcccacactatccttcttatattccattttcctctctccacttaatcattctaaatatcatctatacctactataatttatcttatttcccaactcttcacctcattaactttaattacaacttcctcttnctatcaaaattatttaccaccaatatctcccttatctaat

SEQ ID NO: 10242 - DNA, 1786 bp, Emericella nidulans
ccgcgttaaatcccatcctcgtgatgatccggattcaactgacagtgtctctcaagccggtccagccgggcaaggatcttcgatagggcatttttgtccccgattccactgattaatatgacccgtcagctttacaggtactgctgtaggacacaagctgaagtgactgaccacgcgcatttccgaacaggggtcttccgcggcggataaagacagtccgcaccactagctgtgcatctgtcgcagcgcggctctgccctgttacatctgatctgtcgtattgagttgtccttcggtcagtcaaagtcgttgatgactgcggtatcagaagctacctttttggactgacaacggctacactggccagaaagggttagtaaagggcttcgagtcaagtacttcaagatgcctgacataccgagtaacgctttgtgggttgctgaaagctcattatttctctggggcgcgatggagagcgagtggacattgtcaggtgacgtcgcgtcgtcgcgtgaatgccgacgaccagtcacgtgctacagctctggttagtcgacaggcatcgaaagcagagctcaagggtaaaagtgaggaggcataatcctgaagatatcttgaaagaggaactttatatcttaaagaggttgtattactggtgttgtcagagttggctacagctacatacattgtctattatgtggacagtaaatatataaataatacacatatgaaagatgatgataaatccaccaactgcttacatatgctcattatcgactaagaggacgattatcgggtccaaggcgcacaaagggggattttggtaaagtaatgcaagaattactactggtcaaggctataccgtcttgtagtactggtttggtgcactgttacctcgacttcctagcaaaagtggactctatgctacattcttctgacggtatcgtttgcaggtttagcgccagagctcctaatctcgttagaactaaaacatggacgatcagtaggatagaagttctttaatgacgagtgtggacagtgtattatagggtccaattagtcgaggacgcgctcgtaatactcctagctacctccaggaaacagggggaccagataaatgattcggtaaataggcgtaacgtacttatacatggtacactctgtatgtaaatcccattctcactgacctaccggggcagtctgggcgacattcaaatacagctttagggctggactcaggtaatatagtagatacgccactacactccattcccatcacctcgttcccgtcacgatccatggaatccagaaaatcaattcaagtgagccccggcataccccgcttgacacccggctcaccaaagcccggtgcaagcaacgggcgtcgtccctcgagtctcgtccggaagattggaaagtacttcagaagccggtgctgcccatacgcctcctcgatcaggtacaccgtaacccgccaccacgccaggatcgagctgattatccagaagtacgccgcagctttcattcccgttccaacgcccgtcccgtacgcgaagaggcagcaggcgatcgtggagccgatggcaagacacgtaaggacggcgcagaggactaggtcacgcgcgctggaggcgatcgcctggacggattcttagtatggaagtagaggaatagagttaaggataggacatacagcggaccatgtgatgaatgcaagtacgatgaaccacgaggcgagttcggggaagggctcgtctatcggtgtggtgggagggccccggttgct

SEQ ID NO: 10243 - DNA, 1893 bp, Emericella nidulans
gatatgcattaaacaattgtattcgacgtcccgcccggtattctaagcgaggagataacccttgatctgccttgtacggaaaaggaatggaccgctgctagtgctagcgagtggatgcaatgcaggcagtacggccgcggaagccctagactgcaagacgccctgacttccttatttacacggattccgagtgcgggaggccaattggaaagctttacctccctcggtggccttgtccttattcacgccataattcaagacatatggctaatccagaaggcatgccgtgtccccgtgagttgcagctcctctctatcaccggcccagattacctccttggaacaagcactggagaattggtgccagtgctgggaacgcaatcaagagtcctcaacagatccctttaatccgaacggcccactttcgtttacttccacggctctactgcgtcttgcgtatatccgtctcaacgctgatttcagctctgcacggcgtctccagactttcaacccagacgagattgctcggtccctccgacagaacctcaaagtacagcgcagcgaccggctgacccgcgccgcactgcattgcgcacatgcgttgagcacgccgatcaaactgggcatcaactacgttgcacgtacgctggtggtctcgtggtcgaaccagtacgccctctgctcgctcgaatgcgcagttctcctagcgaagtggcttgaaatcgccaccgtgaagaatcccgagcccagattgacggagcaagaaacgaagctactcgagttcgtgattgagatggtaatggaggcgcagcatgaagtgtctcgctcgtggctcttggagaacaatactcgtctgagtgctgtggtgaccaggctctgggcccggttgttcacggcggactatatttatgagcttgttaacctgatcggccgatcattgaacagctacgccaatcttctcgaaaacgtagaagccacttgagtgcgcccatacatggttcgacaaatggtgttagaccttggtgcacctggtgacggttcaattcaagacaaattgaagagatgctgagtacaaaccttcactcctatatgtgagatgtggcctctgtcctgagcggactatccgcaaccggaatccaggtgctccaactccaccgacactgagacaattttccgcgccaatccagccattttcagaagagttttgacaaaattaggacgaacatatcaatcaagatagtatatttgccctataccgcatagctttcccactggtcaactctggaggatcgtactgtatacagcatcataagtaagcgatggcggtatatctaggtgcagattgatatctgaagttatgacgactgcgttggccttgctaaagagacgcgttggtgcctagagatcagctgcccagagatcagctgccctactaggcaaaatgtacgaatacgggtcccaccgaatcactagtcgaaattctaaatttcgaagtaccatagtgttgagaacctatttaaaagctttcctcccccatttgtccatggcttcgtcattgacaagctgctaccggatgccttgggagtacacgaaatgctctcgtacccaagctcgttgatccctggtgggggcagggtgagaggtattccaccactaccagcttgccatcctatgtgatgattaacttttcctacagaggatggccgagttgaggtcaacttggactcgaaagcatgtagagctgttgcagaactcatcggtacaagcccagctgaggtggaccacccccttggcccaccaccgccatatgaggaggttcaaccaataggcacccagcaactgcttggtatcagattcaatatcgtcatccaggtggtaggtagtcgtggggatg

SEQ ID NO: 10244 - DNA, 100 bp, Emericella nidulans
ctattccatctttggtccgcatcgttggtcattccagtgcatcccgtctgtgcccctgttacctgtcttttcatctctctccttgtgttccttacccttc

SEQ ID NO: 10245 - DNA, 832 bp, Emericella nidulans
aaaccgacacgggcgctcctttgcctgcattgccgtcgcctgtatccggggtaggctggccaaaacctcgtccatggacgttccgagtgggatagtttcctggatcgtatcgatccacagtccttccaccttcagcactcgatcagatactcgctggccattatgacaatttgcaccagcaccagaggcgccgccacggttagctggtggctggaacgtgattccgcttggcttagtagttgaatcacttgtctgacgcgaaaagtctggcacccaggtaggaagataggcttgctcctcgtcactactcgttgccatgggagtccacggcaagactgtatctaccccggggagaaacaggtaggagagacagtatggtccttgtcctgagctaaatatatgttccatcgcgtctgcgtaaacggcccaggtgggtttgctgtagtcagccagaatcgtcgtaacatcagtatcgtcagatacatgcatcaagcccagcaatgcgtatacgcgatctcgtggatcggttgacagagaggttcgcgatatccacagcaactgccggagaggttggcctccattcctctgcacagcctggcggagctcatccagtacatcgattttcaacatggcaagcacttcgagatcgtcaccggtatctggaggctgtctgtctgccatgtcttcctcagctcttggtataggccgcaccattccgatttccgtaaataattcgcggctgattacattccatgctttgacgaaagttgaccatgagacagacttcatcccgcacactaccatgggatcttcactggctaccgcaagttcc

SEQ ID NO: 10246 - DNA, 195 bp, Emericella nidulans
cagtaatggtgtagttatgagcgaaatacgattccaagggagactttgtacctctaccaactccccgcccattccaccttatgatgcctctctcctgtgacttgctccagggtactcgtattcgctaccactctagcgtttattacgtcagtcgatggctacattattcagttcactcccaggctctcgtcatgt

SEQ ID NO: 10247 - DNA, 1080 bp, Emericella nidulans
tgtcaagctgaaaaactcctccgtgggcttgcgtgtaggcccactcgtcatcacataccaagggatcactgcgtccttgcccaaagttttctttgcaagaagctgaagtttaccgatacgctcggcttggatctggaaaagagacttgtgacttgggagaccaatgtcaaaacaacccttcggttgcgagcttcccagccgagtgccctgtccacccgccagcagaaccacggcaacctgattatccgccacgagcttgataccctcattgtagtagctctggatgtctttcggatcggagtctagaattgaggcggtagcgacttccggcagaggttcgagcgagattggtccagtctcggatttgggggggttcaaagccctgtctgcgagttcgttgatgcgagcggggtcaaaggcggacagctgatggaacagctgggcttgctccttctggctcagttgatcgtagaacgcaaacacttgtgactgtcccgcttgctcatacttctgtttcagctctcggacctcctcagccgagggttgacggagggcgggttcggagtgaccctgaaacttgtccacaaggctcttgatagcggctgccataatggaaaacaggaatcgagtatatgggagatgatagggtgtaagataaatacggaagaagaagacgggagaaagggggaatggaagacagaagagggagaaattggtacttattagagaagcgcggggtgagtgcagttccccaattggtattttaaagcatcaagagttcagaggctggcccggtaaccaagctacggagggaggtattctatttattgttgaccgccagctcccacttgaatcaacttcgccatatttgcctatttttagggaaaccatgctccagtattcaggccattgatcttggctcctttccatctaatccattttcccttttggcttgcctggagaaccaatctgcgcgaagcttcgaccaaaggcggggcatacaccaatccataccgtagactagagctcagctggatgtttcacccaacttatcgagcgccactcacagcgtgtttgcgc

SEQ ID NO: 10248 - DNA, 537 bp, Emericella nidulans
caggtcgactctagaggatccccgggcttcgggcattggggttttgaataagacaaccttttcatttttcattttttttttcaatatgaaaaagtaataagaatgagaggtgttaagcttttcatcatcctggcgtcgagctatttttccgcaggacctcccctacagtatcgtcaccgcagtagagtttaaccaccaagttcgggatggattggtgttgttcctctacgcctaggacaccagaatatcgaaccatgaacgaagaaaggcatgcgagaaaagcatattggctagtgattgtgaggctccaattcttgactggagtggacaccaaaggcctctgcccccccatccatttggatagaagggcagaattttaggttttttcatgttgtcaaagagttgaacaatggttttttcgtgttgtcaaagagttgaactatgataatagatggcgagtgcctgatcgaattgatcaggtcatgtaggaacaaggttcaagtctaccggtctgttaggatcctcagctgcatacat

SEQ ID NO: 10249 - DNA, 168 bp, Emericella nidulans
acacgggtcctggtactatccaggtgcgaagaaccccggaggtgactgcaatgagcagaaatctcactcaccggcctaaacgacgagaaaacactcgaacgtgagagcaagggatcacccaacgaatggacgagctccaaggagggatgatgcaagcaccatgctttc

SEQ ID NO: 10250 - DNA, 1561 bp, Emericella nidulans
atacccgcgatggcgtcaaagtcagtctcccctgcagttgcgaaaacatccagaagccctgagaattgtccacatctgtataggtaagctcgccagtgtattttgattggtcgatgtagccgaaatcgtaggaaccaggagcctggtgcttaagtgttacagcaaacagaggagattcaagctgagactttacgctgtcgaagaaggtggtctgggatttcggttgaactggtggcaagttaggaaaatttggtccaagtatgtttcaagtactcaccagtgttaatggagctgaatgctaaaccgagcaagccatcgttgttttgatcccgggtgaactgttcactaatgtgtgaagcggcctcgactgcctgccctggcgcagtgacgccaccaacggtgacggtgtctctgtaaacatcaccaccggcactgctgccgtcgccatatgagatttcccagctgtatccggacattctggttccattatcggatggtttgtagacgctgtggcctgtagtctgggaagacggaagctcgttggaaaacacccatctatagatatcagctctaggatgcacaaaaattacagccaaataaagtattacaggtccgcggatccagtgtcaaagtctaggttcattgttgtgccaccaacagcgactggagtcaagtattcaacgtcgtactgttccggggtggtcacagcactaccatgagccatagcatcctggatgtgtggagggacattgccgccatatttggacaatgcattggcgtaaatcgctggaaggttgatggtgcgtttgggaatcgccctcgtgagttggttgatcgtgaagccctggcgaggaggagccgcgggcatcgcagatgctacggcagacaagccgaaggccgctgctgcaactttgctgaagacaaccattttctatctgacgtgctgaccaggacaatgaagaggcaagagggtagtggatatgatttcaaatagtagacctaagcaaaggcgaagcagagcaagcagagaaacaagagcaagcgagtggaagccgagccactccactcaggagggagaggatggaggctgctttataaactgtgtacccctcaagagctaggaggaacagaccgagagcatcgcaatctgtgtggacaacaggtcccaccttttccgggtgctagcaaagccccggagtccggaggaactgctgagggtacagtccttgccatacttggaagctccgagcgaaaatcttgctcatggatgagcaggttatcgagatcaaacccctcttgggttacgccaggcttagatcagacgtcacagtccaatagcgctgtagggagtgaaacgcccgccgctctttgacatgagcgaactcctgtcaggcacgagggggacgaggcaaccgagctggggaagccgctgtggagtcggccgctttattgctagttccggccccaagatagcttcttgcacggatggaacaatgaatcttcgggtattgagttctttgcgggggcagctacccccccggatccacgaacaaattggggt

SEQ ID NO: 10251 - DNA, 167 bp, Emericella nidulans
gatccgatgaccggtctgccagatcgcaataacctgcacaattacctcgatgacctggtcgacaaagccgtctctcacgtggtgtatctcatcgcatgatgaccagattcaggatcgtaattgatagccttggctatgcgagcgccgatcagacggtgctggacatg

SEQ ID NO: 10252 - DNA, 442 bp, Emericella nidulans
tgcatgatgtggaggcgattttgacaggagctgttccttggcatgcgtgcaagggaggatatcatgatagtgatggaagattatgatacatcgggtactcaataacccgtcatcatggtgagtgatcatggacgcttggtgaggagattcgcgtgaaggcgtgagtgcctgggccggaaagtccatggctggaaaacaggcttgagatgcacgaacgggcaaaggagggtccgcttcatatagaggagcgacatggactggccataagagtggtctatgaagctaacgcactgggtggtgccgaacatgggcaagaggacacgctatcagaaatgcaatgaaaggttatggtttggagatgttacatacaatagacaacgggtttggtgtgatgataaagacacctcgtttataatcgagactatccggagcatggatgagc

SEQ ID NO: 10253 - DNA, 2316 bp, Emericella nidulans
tagcaaatagggtgttcaccgagatccggttttcaagctaaagaagtggttgaatttaagagaaataggttatgggcattcaaaaagcgtttagtggccatttaaatatcaaattcgagtccccggaaaagtgaggatccccaagaaaggccataaagagaaattaaagaaatgccggtcctaaaggcctggctctaaatgaaagcccccgggaattttttattgcctcgtccaaaaaccgcgaagtttaagactggttccgtaaggagaaccttgaaaaacgagcttttttgccggcgtggacaattaagtgagataatccaccggtggccaggttaaccagtcgccaaatgtgttctctccgaaggatctacaagcagtttgtcacctggaaaagccccaggtggttctgggataacatacgtaatataaaggaacccgtcttcgtccttgtgctcttcataaatgctacgcattagtgcagccgttgggggcaggacctcgtcgccaaagatgaagatggctttctttggagacagcttgatgcgcttgcgtatgacgtagacgaactggccatcggtaaggtctgcaggtaccaaatacttcttcttgtcgatgggagcaatatatgacttctcgaccttttcacaaataacctgtgaatgaatatcgtttagtgccttgaacaagaacaagcggtgtaccagaactgtcaagttccttatgaggataacacaagaaaaaaaaaaaaagaaacggcttcaaacacataacgaaagaaaaaacataccggaatccggtcggcatatttcgctctaatacgctcggcttcagccttgcgcttctcgaacgggtgctcgtccttaaacttggaacgcatggcgatagaggcggatatcgataaggagactgagttcagctggtagcccggggtgaaaaaaaaacagcgatagcgacgttttgaataagagataacagcggcagctatgagttggatgaaatcaggatgagagtaagaaggaaggatggatggatgactgaaggagagatgtagtaggtgaccagccccgcgtcatgttactaagaactgataagacggcggtctcacggggcggaggcggtgaagccccacacgtgagtcacggtcatgtgccaccatcagatgaatgtattcttcaagtcacccggtacctcgaatgagcccctggatgatactgcttgtatattcacgcgcatattggtgaactcatgaactgctatactggtcggattcggccgatgttgaagtgtggacctgcccgctctggaactccggtgctaggtacgacttgagcctccactggacccgcggctaaaggagctgttccagactgaacaggcgccggcagtacgaggctgcataccttgcagagcaatccccgtcgaaactggccaggaacactgttttagctcttgatctgactcatttctccgtctcatctgtggatgcttcgctttacttctaaaaagctgtttcagtgattatagttgcaaaccatgcaaacataccgacaggatcacgtgaaaggtccacaatggactgctccggctccgagccctggtgatggtcccatacatcgtttcggcaactttcgagcctttttgctttgacctgcggtggcctgattattagtgtgacaagatggctttacccagactatatagtgcgccttttcgcaggtcgctttcccggttttcagcgccctgtcgcaaaccaaacaatcaccaaacacccttccaccgattctactcggagagaacatcacaatcagagaaatcaacacgatcatcgcacccgggaaagacacaagacaaacggggcaagaaagaatttacagtttggcgtccgtacctgcgactcgcgattggcatcccctttgtaacgctgcttgtctgggacatggtctgcgccgaccaatacctacaatttggggctcgctaaccgtatgatatagatgactggagaagtgacccaattagactctccatcgatcgtggagattgatgaggctctcaagaaacaagcatctgtcaacgaaacttcgccaatgcggctgcgaatggaaaaattgataaaggatcaccaacagaagattgtggaggaactcagccggatagatggaaaacaattcagagcagacacctggactcgacctaatggaggaggcggtatatcttgcgtccttcaagatggcaatgtattcgaaaaagccggagtcaatgtatctatcgtctacggagacctaccccgagcagcgattagaagatgcgagcagc

SEQ ID NO: 10254 - DNA, 2565 bp, Emericella nidulans
ccttcatctcgttatcaacacatacctgtaaattccggttttgcgcttggatggcgataatctggttacgcatttactcgaggatacggttgacgacgggctcgaaacactgaagaatctcctcattggtgaatgtcatgtatccttcctcgattccagcatcagggaagtccgcctcaatgccgacgtccaccgcccatttttgaccattgtttcgaaagtcggccttgattcggttctcgaaatccataatacatttggcatacaccttcccagctgttcgagacccatcgggcagcttcatctttcgaattttagcgcggaggatattactgaagtttcggttcagggccgtagagccacatgaatcaccggatccagcagtacattcagcaacgctgaatggctgctcttcttcaacctcgtacgcaatcaaatctaccgtaccgccaccgcagtcgacgatcaaaatagcatcgccaactttgagatttagtaagccagttttggcgcagaagagcgcagcagcttccggttctgagatcaaagtcaggcgattgtcgttttcgtctcgcaagaaaccagcttgcagagccgctgcacgagtcgctgccttgcctgcatcgttccagattgcgggcactgtgagatagtacttgatgttacgctcttctctcgtaaatacctcaccgagtgttttctgtaactgggagcgcattgcctgtcgtaacttaaagaggtagtcggccgccacatcaatctccgactttcctggcggaagaggcggcaagttgatggggtcgatgtatgtgttaccggaaagcatcagctgaagcttgaaccattcaactttctgcaccccttgctttgggtagccggtgggagccagcgcatttgcaatgtctggtccccaacccactacttcttggtattggtcatagtacaagacagttgggatctagtttagaaaatcagaagattagtttcatggttcaacatgatagttccagattatcgactccggggtgccctcgccacaactgtggtgggggaaggaagaagagacccaccttttgtttggtgtgagtgccagctccaggccattcggtaatgatatcctctcgcgcctcgttgttcgtcgcgaaagcaaatgcgacaccggagaatgttgtgccaaaatcaattccaacaattagcgaagccttacttcgccccgcaccctcgacttcgtgggcggggttccgagccccgtaagggacttgcgacgagggtagccctcgacccattaccggctgctgcataccgtagactggcggagcgcccaaggtttgttgtcctggataaggcatgttggtgttaagtggatgcggcatctgcggctggttgccggggggcataggactggtcggccgaccagcgacattattataggtgtagctgggcggctgtcccagttgattcgggttattcattgggagactgcttgtggaggacgaggtgtgaccggaagggggggaactggcggaggttgtcgaaagggcgggagcgggaacagacgctgggggcgcaggctgcggtgtcggtgagacaagagttcgggtcgagggagtgttgatggactgaactggagataatgaggtgacgctactctgttgttgcttgtttcgcttccagctgaacgacttgaatcgtgagctcatcaggtccatgtgaatggccagagccgaaaggatcgaacagagagacggggagaggagagcgaagagaaggaagaagaagagggaggggaaggtgatgagcggaataaagctgaaaagagcgacagggctagtgcgtgtggaactcgtatggaaggaggcagtgcctgagcacagtcgcagtgaattggtgtattgtcagattattattgagatgcaacgcttagagcagacggtagtaggccagctcaatctagatcgatcctgcctgaacgagaggagaaagaaccagagaactgaaactaccgaacggagagattagagagaagagggccgggggagaagagcgaagggacccagaagaatgtaccttgtgttgagattctgctttgaggctgacgggtatcggaggactgggcaaactggcgactaactggaacagcgcgcaggaagaggaagctgcttattaatgccaacctatctcgtataataatgggaaagatgcgggcgcctttcctgattgaaatgaaagatgagagacgagggagatcaatgatgctgccagatacgagggaacaaaatgcattcggggtccttgctcatacaacagagcaatggacaataccaccaccaacggcgacgagaacaacaacgacaacgacaacaacaggagtataaacaggtagcggcctttctgcttttgaatgctttatactttctaaatgaaagctatagcgggaggtattaggaggcacgaaaatgataactagtcactgcaggcccagggtcattgagtgtcaaccgtaatggaaggtaccggacaatacacaatagaccgttagacgcggagggccccatgggaccggcc

SEQ ID NO: 10255 - DNA, 1285 bp, Emericella nidulans
tgtacgtacaataaccgtattctgtaatgagctacaaagtggagagttagccacatatgttggattgaatcgaaacacttaccgggttcttatcttcatcctcctgagggtatatgttcataaatgttgcgccagtggctgtcatggtctgatccctatatttccttgtaacaaatctgtcttttcgctcgttgtaatgcacactctgaatgatctttggtcgaaccaacgagcatttcgtcacaatcccctcaagagaaaccattcggttaaggtgtgaggatccgagagttctagggttacatgagaattccccaaatgcgccaacgtaagcacagtaataattctagcatgcattagatgggtaaacggctgtgaaagaggaaactcaccacttcgtcggcggtttcgcttgacgggcggttagggagagtcttgataacatctttcagggctctgtcgaaggcttgtgtccagtcaaaaggagatgtaaggaggctacaacagatgtaagcaagataagtactgtgatgtataggcatagccgcttacccatctgccatctcccggttgtgtgctcggatctcatcaatgctgacctagatgcgaaacgattagggtcctattcgaatttcgccaatgcaattatagttaaggggaccatacaatcaggcgacgtagttttcggttgagcatcaaaacaatatctgctcggtagctggtcaaatttgtaagaacgttgggctcggatgtaggaaggggttcgaagaggtaacaacggacctacgcgctctagcatcgcctagaaaaagtgccgtcagtaagccatatcagacataggaggtccattaagcctactgggattaaggaactcaacggcagcgcgcactcgatcttgagcggcctcatcacggagttgtgctccgtccatgctgaagagttattacgtcgatggcagaatagtgttttgaggacaatgactggtaatggacaatgactgggcatggaagtaataattagataaaagagattttttttctgcacgggtgccgcaaacaatttgagcctttgggagtgaccctggacgccctggtgggtattcaaaagaaaattgaaggtgggaaggaaatttttcaaattaccgcgcaattcgaatcggtattaatgtaccggctgcgacgcttgaggaatgactaacgactctggccactggcttattccaaatgggtccgggccgtcagtcggcctccctactaaatttgacttctgggaatgactctggatt

SEQ ID NO: 10256 - DNA, 1016 bp, Emericella nidulans
ggtgtggctaatgcgattgtcagtatcctgtgcggagctctaagatgagctctccggccgtccggctggagagccaattgagaagaaacataccttgagtgtcggccagcccgacggcgctctttaccgactcagcgacggtcatcttgagaacaggaagcggtgcggaatggaattgatcgtcaagagaatcggtcggcttgaggtttgcagctctttggggttaggttgctgatttccggtgaggtcatgtgagatcatgtgactttaaacaaaaccggtttagcgccttaattccactttacgcggttgcggcgcgtctctagccagccgtgagagccatcgcgttttgcgagaaatcatacagtctatgctgagccacttgtggctgtttgcgcgttttttaatacttccagtctttgaaattaatactcttctgtattgcagttcttctatctcttgattgatgccaagagggcgtcaatctcgaccctcagtttccagactgaagcgcgcaaacactcctgcgaacctgctgagtttgaccggtgaagaacgcaatcatggcggcagtagacttttcaaacgtctattccgctacatatagcagtgtacgctgtgaatactggtttgctgccttggcgaactgctctttcctgcattctgagttggtctgactccattctctaggttccggtgtatgagttcaagattggcaccgacagtgttatgcgaaggcggtctgatgattggatcaatgcgacacatatacttaaagtagcagggtttgacaagccggcaagaactcgtattctcgagcgtgaggttcagaaaggagtccacgaaaaagttcagggcggctatggcaaatatcaaggtaaaatggccctggattttagcatatcgtcagttctttaacactcccttttagggacatggatcccacttcaggaaggtcgccagcttgcagagcggaataatatactcgacaaactcctgccaatattcgactatgt

SEQ ID NO: 10257 - DNA, 1924 bp, Emericella nidulans
tggtaaatttcgaccgaatgtctcgattctcaccgagtcatcactttgaacagtcgaaaacggcaagacgcggtctccaaggtctcaagtggagctgcaaatttttcagccaaacccacttctatccgcagcctgacttggcctggtttggaagcagcttcctcttttgtaagcaggctaagcagccctgcagcagatctggggtaatcaatcctgcgacttgcgcaatatattttttatatgcctcatatactggacacatatacaggacgtagttttacatactgcgagctcttatttcgcctgattattacatgattattacctgattgattacctaaaatatctcagacatgccctaccattatagctgcctcactggatcattgctagtcagcagtaacagcagtaacagcagtagcagtacagccgtacagcaaaaggcggaagggatgaactacgtgttcatgccaagcgaatggtgagaatctgctcatcacgatctcctgccaagagcagcatcgccatcacgccttgccttgtggaagggaaaaatgccactcgaaacagcccgaaacagccagttctcgaaattccctcagctgatggcgccagatggcgaggcgaattgaaaaaatagaaacggcgatgatgcaatagtgcttgagccttgacagctctaactcttgcggtcctgccggatcatgcgggggttcagaattttcctgcaccggtcgagtcattttccttgccgccgggcggctgcggttctaagcgccagtcttctccgtatacaacgagatgctattgtggccttggatatttgagattctccttaagtccgtgccagaaaaggagtcgaagtcaagaagaatcccctgccaatttgtctatgaagttttccaagcctatactcgagcatagtgtgtcaatagggagacgcctagagacggttttgtgagggtaatgaaaatcgctctttggtcctcttttggcctgtgttgccaaccgcctctttcattggcctcgcaccagtttctgttacgtttcgccacggcgtcacctgcccgcccagttctaacgggacccagggcgaccctaaaagcagcaggacaagagctccacaagtggtggaaagagccaatcatagagcggagtcacctcacatgagcagacataattggcttaatgcccagcgccgccttgaaagctgaaaataaggtgaaataaaatactgtaacaatacagttcctgaaagaatccgccagatcctcgcatcagttgctaagcgcattgacgatgggccaagcgacgctccactgcggactcagcgtgtgaccctcgcggtgcctggatgcggtctctggcggtctcttgagtcgtgctgacgggtcactgacgagggcctgccactcatcatgcgctgtgtggaattgcgtgcccttgtttccatgctttccccggaactgctctcctggacccagtctatatagagctgctgcccccgcccaattctctggttctgttcccagacatcacaaagaatcacacaaataaaaggcttttctccctcatcagtcatcagtcatcttcttcgagttgactttggcgtttctgcatcatcattagcagcatccatcagcagcatcgacagcatcggttgcatatacatagtggatatacaatcaccatgccggcagttaactaccgcgtcgtcgagccacatccgtcagtccctcacagcggccgtccagctcttcacacggctcgcggagggccggcaatgtcatcaacctaaagaataccaagaccaccgactcacgcaccgctacggagccggcttctctgacccgtctggactcgcacgtaccatcaacattcacttccggccgcggcggcgccggcaacgtccaccgcagcagtg

SEQ ID NO: 10258 - DNA, 833 bp, Emericella nidulans
ggtgggctcggatgcccagctgtagctatctgactcgagggttaagggaacgctaggggtagtcatggaactagctgcgcactgcatggacccattaatcgataacagggccgcagaccagaccaaccaagtgcaataagtatagcgcctgttgtgccgaaggagtaagctaacttacattaaatgggccgggttcacaaccagctctcgagcaagcatcacgcgttgggccagcaggctgaaagaacagcccatcccacggcgtgtggcaatatgagcactgggcaactctcctgcggcaagccgactgacatgcctcactgcttcgtgacgggtgagggggctgaataacatatcagatcgggcgtatacacgccttgaggctcaggggagcgatcttatggaagacatttcaaaaatgctcaagcagaagactagaaccgcatgaggcgctgaacaagggacagcttgagaactgcacataacacgcaccgcatgattgctaactgtcatgggggcgacccccagacatactggacctggcttttgtcacgaagcgtaaagaggttttttgcctggggtgctaaaaaagcctcatgcagggccgtttatcatagggacgacggaggaataaatcttggtcgtcaaaacaaggggggcacaccccgcaactgcaaggtagaaacaccgtgacccccccccaaaaataaatccccggggggaaaacaatggttttttggccccctttaaaaaaccccctaaaatattctctccaaaggggagagggcggcaccctcgggttttttttcttttatatataatttacaaaaaaa

SEQ ID NO: 10259 - DNA, 170 bp, Emericella nidulans
ctcaagacctctgctgtacacagcatttgctaactgtcaatacgagatgctcacactaatcgtcacgctaaatagcacacagcctctcaccacttcgtcggttcgcataacgccgaataccgctgtatccaatcaccaaggctttggagattggatcgacggatctttgg

SEQ ID NO: 10260 - DNA, 2270 bp, Emericella nidulans
ccatcaccaaggtgcgtctggacacggactcttcagttgcccggaagatgggcaactacggtgagcctgatccgcgctacgcttctgcggtgtttcgtcatggatggccgcaaaacctgatgcttccagtaggtaaggttgagggaatgccgttcgtcgctttctgcatagcgacggacgacgggattccagatccagctccggccccgccttttcatcattaccacgatccccggggcatgggatacccatttaatcgagcatggacgcagttgaccgaagattcaacgggtaaggcgtccatccgaactattatctcaaacgccgagctatatccgttcattaccagtactacattcaagatctaccgcacgaccaagttcgaaaccaagcaaatcatccaacctacaactgtaacatggtttaacacaattagaggttacttcaaagacgcggatagagcctgcatgcgcagcgaatatggatacgatctatacaactatgatcatgttatgctgcacgccgatgccatactagatgcaacggccagcaaacgcatgccgctgcaaatgggtaagtatactcaggacaatccggatcctgaacatccgctctggactgttaagatgtgcgagaattttcgtgcttggttgttgaatgggtgtccaaaagggacggacccggcttagcctcctaaggggctagttacattagggactcaaataatgaaggctttcgttacgtcgtggctatccaaattggacatagttcacatggcatgcaaattgatatcgcctagcgctgacaaggtaacggctcctaaggacatagtactatcagttgtcatagcactagagtagttacaaggcctatcatctgagccctctcgcaagggtcgggcggtttagggtgaggcggctggcacatgcataggtaaccacctagaataaatgcataccgctggctaaccacaatgacgtgggtgtaggtcttgtacctttcgtggaaaattatataatgtagagcaccccaaaacacacatcaaatcttcaacagttcttccagtgcaaccctatcttcaaactcgtcaaactaacgcaattgtaggctgtaacaaatgcagattgtatatcttttcagctccgtacttctcacggcggccctagcacatgaaaatggaaaggtggcttatccattccggctattcaatggcacgtcatctgtggaggagatctctcagcaagaccaaatggatgctccaaagataatgcctcatgtgaatgctacaacgtttgagtggtaagagagtttaatcactagtgttcagagcggctggatcaacctgctgacgacagcttatgtaggtggtatttcgacgccgtttcaactacctctcagaacgagtcactaactgtcatgttcgaaaacatgggtccagaaggcctcggcgccccgtacccaggtggcccactggccgttcagatctcagggtcgttcagcaacggcacggcgtttacaataattaccgcggcaaccaagggtgcagtccttgagtggggcggcggaggtgtcagaggagagtggagaggagccggtagctcgtttgctggaaaagaccaccgcgaatataccgtctccatcgctaatccgggcataggagtctatggtacaatgacactgcgatcggtatgctttttaaccaggccagtattggagccagtttaacccaaagtgtctgaaggtctctccccctcgctatccctgcgacgtcaaagaacgtcgtgcatctgagcagctcatcccaaacatgtacttggccaacagtcagcccgatgccatcgtcgaggttgactttaatatcaacgaaagcacattgaagttcagcgggattgggtaccacgatctatcatggggttccgcgccgcttgaatcatcggtgcactcctggtattggggccatggccgtctgggccgttattctttggtctggttcgacgttatgggccgtgacggcaaggagtatttctcggcctggattacagaggccgggaatgtcatcttatgtggctgcgaacccgattcggttctcgtcagaccgtggggagagaatagcgggtttcctccaggacgggggacgcctgcaccgtcaggctacagtttacgttacgacctgggccagaaccagatcttcattgctaacaatactcgggaagtgaacataattgacaatgattttacgaagcacgtgattgggttgtacacaggcggcc

SEQ ID NO: 10261 - DNA, 192 bp, Emericella nidulans
tcactacgatacgatccggtctaacggcagatctgggtctccaagttcaccacatctaagcctactcaggatacctcgcgagagctactgcattcttagatcgaccagctgctcgagggcaatgtgccatattagcggcctgactcggcctcggtggaattagaatggctcgattaccgacacgattcgaag

SEQ ID NO: 10262 - DNA, 451 bp, Emericella nidulans
aacaccatcagcaccgaaggctgtatggtgtgcgaggcaccggcatatctggcactggcgtcgatcaggccgcgactgagcttccttgccatgatggtgatgtgcggcgggttgactctgatcacggacgcggactccaattcgtatggtatgagggccatcccaagggtcttggggctgtcggagactagcagctgagcgggaacacacgacattctggggttctggcgtacggtgatggagctgtggtagcgtaacgacatgatgaccgtgactgtcctagcaggcgtgaggcaaacgactagctctgagccgattgggaaagagtatgagctggacccccgctctggggacaatggacgcagggtatatctcgacggagatccaaccaactatggcctgattgcgggggctcgaccgatggccacggatagtgaatgattggcttcat

SEQ ID NO: 10263 - DNA, 2330 bp, Emericella nidulans
tgcgaacgaccggcgcgaaaattgtctctactccgttgagtcccttatcatcagcaattagagggtacagactgaaatctctggaacgccttggagtagcaccagtttcctaccattgcaggatgttccgatatttgttttatgtcttgtgcaagccggatgcggagaatgtgtatagactctcccgctatggactgaccagtagccgatgtgtttagcttaggcgcacaacgtcctctgcgactttctcagaaaatactaacacagagttactcaaactaataatcaaaagatggaactagctggactatatccaagtaaagaggcgctttatgctatgtctagtgagcaatgcgccgagctagacgcaattgccttgctgcccgacgataactcttgagaaacaccgcgatatttagcaattcatactacctgagatatagagaccgaattctctcgttcgccttgggttgttacaccgattgccatctgcccactcatgtaccatacattatataatccacttcataatccagtgaactcctacaaggcgaacagctacagggcagacaggccaccggcctcttgagatcttaaagccccccggaactctcttctggaataccccgtccggatcatacttacccgcaacctccttcatatgcctcacattctcctcaccatagctccccagcgcatcttgctccttatcacagtagtttagatatcggaaacctacatcccccttcacactcctcgcatacgtctcaatcttctcaatggcactcttcagagtcgggccggcaacattcgcattcagctcgggcgtgtcaacctcaaccgcccagaccagaaggacgcaatcaaccttcatttgatcgagacccatcatatttccaccacgggctgtggagtgtgcaccgaatgagacagggagaggctgaaggacaatctgagtgtagaagtttgagtatgggacctggttcttgagagctgagactagtgattcgaagacagaggcgctttttaggatgatctgtgggtcggctttaaatgttgtagtgtaccatgtatcactaattttgttagcaatagctcactttgttagagatggtaaataaacttactacttccccgaagggacaacaaacgaagtcagcttcgtcgcaactgacacagtcgtatcgaccctattcatctgttccggaatgcccaggaacttttccaatgttctcgcttccttcacgccttcaagattcatcatattcaccataacaaagtgctcttccgtcttcggtagatacgtccacatcgccaatatatgatcatcggggtaagcggcaaggttcttcgtcagatccacgatggcctctgaaagctgcaacgtcgccttttttggatacgttatcgtacaatcccagacatctacggctgagaaagtcgtcatatcgaagcgcgtgacgacaccgaagttattcccgccacctttgagggcacggaaaaggtctggattcgtggtggaattggcattagagatagagccgtcggcgagaacgagttcataattgacgacctggtcttttgcatccgcatcgaaattaatagctgccttaaaggaatgggacagatggctgatacataccgcacgcaaatccgttacggcatgtataaaatgtctttcccccgcctgttagtaaaccgcctataccgacttttccttcgcggccaccagcgaccatgcgcccctctgtattaataagccgttgtatgatctgtagggatagggtgaggggacgaacgtacgcttctccagttcttgataagacttcgcccacgtaccgcctggttgtatcgacgcaattcccgtttccggatcgtacgtcgtgctgttcatgagacccaggtcgatggtgatcccattgacaatattgtttgcgccgggccattgcatgtgtccgccactaaaacaagctcttagcacacactcgatgaggcgtaggtgagtgatgttggcatgaaacccaccttcggatggcaaacttacatttggcgtcgcactatagctttgcagccttggagacctttttgtgttcggggcgacgattgccatggtttaatgcgcgtagtgaccgatgattgcacggggtgatacatgttgtgaaagagagatatcttagccccccatgtggtgcagggtttcttggtcaaggctaacttatgggaaaggagggctatgataaagccctttttgggccgggggcacactttacctccccaaaaacattcatatttgtcgggatcacttttcttttttttcttggggggggggg

SEQ ID NO: 10264 - DNA, 1990 bp, Emericella nidulans
ccacatgaagggtttgataattctaaaagaggacgtcgcggctctatcccgaagcagattgtggttgtatcgtctccattgcaaccggctgtctcacgaaccgccgttcctgattcccaattacctgaccccgtcacagatgcgagtagtaggagcagtgagctaggaaccgaatgtccccgaacaccagcgcactcattagccacagacgtggatcaagaccgagaaattgaagctgaaatttcgtcagttcgcagctacagaaggtcactacttcgtctgccgtcaatcaaaaaatccatctctcctttttgcaagttttgattgttcttcctattccgtcatttctcacttttgcaagtcagactgtgtcctttctcctaccttgtcatttctaggaaatctcctttgcataccttaaaattggttgctgtcggacgcatatcgttttacctttgcatgtgaaacttttgagttcgcctagttgccccgtagatgagcttgtggcttcctcatttctactggagattgctttgttttcttatcagctactgatactctggcccttcatccttttctcgcgaaccttcgttccttgtagatagctaaagccgtactgcggccatgtatacttaattagacaggcttcagcaggagcaggcactccgataatcacatgatgacaaggttggctcgctttaacagaatacgttgtggatatcaagccatggttactactatatatctttggtgtttcagatatctgcgaatcccttgatttggacgaatagcgtaacctcagcatcacattatcattatcataagagatatttccacacgtagccatacatgaattgaagaaattggcagataaagagtaaaagaagtatgtctacaggctaaatgtatctatgagaaacccagtcgccagggccaggcgatgaccaaccattaaatcactcaacatccctcacactccttaagcatctctcaagtcgcctctttctctccttttccctaacgagcgtgctcctaacaaaatcccgaatcgccccacgtccaacctgctccctccaggacgtccagcccgcaagctcaccgacaacaacatccttattccagcttatctccctagaaagccttgcaatttggtcctcactattcgtgatcttttcttgcaagtcacggagcgagcggagacgtgactcttcaaggccagggaagttgaggttgaatttgcggggtaatgaggatgaagctaacgcgttgcgggagcgcgtgagggttcgtgttgaggaatttaaagacgcaattagggagagagggcgcgagagtgaagataaaattgcggaggtagtcgtatcgattgaggagagggtcgacaggaattggaggagtggagaggagtctgaagttgacgttgagaggtaggatgcgtagcgagaaaaggcatcaacgtgagatggtggaagggcgttggttgagtatttgagggttgagaagaccgatgcagcgagggccacggcgtccgcgatgtcggaggtcgcattttgaagggcgtgtccgcggcgtaggagagaccgggtgtgagtgtgtgttgcgtgaaccatgtcttgcgcgtgggaaatgaactgctctgcttcacggatgccttctgaagtgattgggtcatggtcttcgatgatggattcggacagagcctgggctttccggtgagagcggtcggccatcatttgaggctggagttcgggaacgaggatgaattcccagagaagttcgtgggtggagaaggttgggtgagacaagaggatcttgaggaagcggtcgaggcgttcttgcatgttgtggaggacggcacgggaaggttttgagtggatttgaaaggggttgcggaagtcggtgagcgagggcatgtaggaggcggggtgttcaagcgagaggcattcggcgagggtctcaaagtaagacaatgctgtaacacagcatcatc

SEQ ID NO: 10265 - DNA, 108 bp, Emericella nidulans
cgagcagtgttggtggatgagttgtcacgagaacgatgtgtttgttagcatgtgtcacgcgagatcatctcgaattttctgtgtccaagttcgattctgttatcctgg

SEQ ID NO: 10266 - DNA, 930 bp, Emericella nidulans
ggtcaacccaacgatgattgtttaggtcactgttttgccacatcttccaccgaccaggagcactctacagctccagattaaaacagaatcgggtatcgagacctcttagcacatctgccgccctctaccattcgatcttaccgtctatattcgttccgcaatattgtttaagtggcggatcaccttacgtcgacatggccggatctactgctggctacggccagattatcgaatacattcaaggtttgtgccatctatcgcaaacgaggtctattggcccctctaactcggtgccagataaactgtacctcgcctcctacgaccacactcccgacgccaaaactcctttcccatacccggccgagcaaccgaaatcccccagcaagcgccgagcgcaagcctctccgagcaagaagcgcagtcccgtttatttcacggtcgatgatacccttctgtataactcgtttcatgcggattttgggcccctccacatcggtcatctgtaccgctttgccgtccacttccatgacctccttgccgcgaacaatgaccgcgccattgttttctactcacggactgacgctcgcagccgtgctaatgcggcttgtcttgtcgcttgttacatggtcctgatccaatcgtggccgccgcatcttgcgctcgctccgattgcgcaggcggaccctccgtacatgcctttccgagatgccggatacagtcaagcagactttattctcaacatccaggatgttgtatatggtgtttggaaggccaaggagcagggagtgtgcggcttgagagatttcagtcttgaagagtatgttggcattgatcacaccaaattgtttgaatgctcatgattgcctaggtacgagaagtttgaacgagtcgacatgggagacttcaactggatcagccctcatttcctcg

SEQ ID NO: 10267 - DNA, 343 bp, Emericella nidulans
aatacgagtgttttttaggggtcgccacctgagctaccagcgctccaagcgcgctgtcaaccccaacaccaggtaccgatccgagcagcgagaattggggaaattacaggtttctgacatagtcacaacagtctgatcaagatcgacggtgttgacaacactgaggccgcaaagtgagtgaattcgggttatggactgggtatctggatcggatgctaagacaggaacagcttctacctgggcaagaaggtcgctttcgtctaccgggctaagcgtgaggtccggggctccaacatccgggtgatctggggcaaggtcacccgacctcacggtacgtcaacga

SEQ ID NO: 10268 - DNA, 1840 bp, Emericella nidulans
aaagacccgcagatcggtggagttggacttcactgcggtacctcgactgcactcgagcctctggaaattgtctctcttttttctcctccttgctgtctattgattattattacttttgttgtgaacgctcttctgggtaccctgtattaacgaccctgcagcactcatggacatcttctcggcgtgttttctataacgacgcagccagcagcctgaactcacgaacctctacaattggaatatcgcaaccaaacagacgtccgttataaccttcaaaatgcaggagaagagtgttgtacgaactcagagcccggaacggtcctatgaggcccaggattctacgccgatctcgaactaccaggatgatctgcactccctctcctcatcgcagaactcagaacactcagaaccagaacacgcaacaacgccaggcagagatgcggaggaccaagttccagcgaaatccgcgctggactcggaatcagaagaagccatgaaggtagtcccgcggctctcgcgccgcggcctctttggccaaatcaccctgctggaggagatcgaaaacccaaagtgctacccgcgcagtaagaaatggttcatcacctttgtcgtcgcagttgcgggctctgtcgcgccaatggggagttcgatcttctttcctgcgctttcacaagtagcagacgagctcaacgctacgacaacagtcacgaatctgacaatctcgctgtacatgctgagcatgtctattttcccgctgtggtggtcgtcattcagtgaacggcttggaaggcggacgatttacatagcctcattcgcgctcttcgtcgtgtttaatgtcctctgtgcagtttcgagctcaattgctatgcttattgtcatgagattgcttagtggtggtgcttcggcgtctgttcaggctgttggtgcaggcacaattgctgatatatgggatacgcgggagcgagggcgcgctatggggatattctatttgggacctctgtgcgggccattgattgcacctatcgtgggaggagcactggcgcagcggtggcactggcgaagcacaatgtggttctttagcgcgtatggcggtgtcgtcgtcgttctcattcttcttggtcttccagagacgctgtccggtgcgaaccagaaaccacttatgccacctgctgatcccgcctcgacaacagaagagccactttcccgccgcgcctcccgcgtctcctccgtacagacccaagtctttggtacgacagcccgttggctcaagctcatcaaaataatcttcctcgatcctctcaagatcatcctatatctgcgatatctccccgtgctgctcacagtttactacgctgccataaccttcggctcactgtatgtgttgaacgtcagcattgagaatagttttggtaaagaaccctacaacttcgatacgttgatcgtaggcctcctctacattccgaattccctggggtatgtggtgtcgagtatattcggcgggcgctggatcgacaagatcatggtgcgtgaggcaaagaaggcgaataggtatgatgaaaaagggaacctgatcttcagacccgaagatcgcatgcgggagaatgcatggctgggtgcgctactctacccagctggactcatctggtatgggtggacggttgataaaggggttttttggcttgcgccggtacgtccgtgtcttatttcactctcatccttccgcctaaccctaactaacaacgacgcctctgcagatgatagcaaactttttctttggcattggctcaatgctaatttttagcatggtaacaaccatgctgacggaattcatgccaaagaa

SEQ ID NO: 10269 - DNA, 840 bp, Emericella nidulans
ttgtctttggaatctccccaatgtggcgttcaagtcactcccacgctttccgttccgatttcttaaaaccactacacaatagctgaattcatcaccgcggggattgctacgctacaaccgggcggcaagaggatggatcggcagagaaagcgtaactggtgcccgatgcgctctggatgatattggtgtctgtgtcctaatagaggtttactacaggggagttacgccttctgaatgagcgagcctgggctggcgagagtggtactgttccctaaatccttccttcccctcaccccgcgcttcatctaaccgtcgacatccgtatagatatatttcctgtcagcaaatcgctcgattcgtcgctgaaaaagaatacggctttcatcaagcgccttcgcactggtatcaatgctgctgcccagcagacgttactaactgacatccgcacgttgtcgcttcacaaatacctttcggagatcatatcagcatgttacgaggggctttgtaaactcaaatcgcctggagagattactgccggtgttgagattaccagtgccctgcatcagcgatttggtccggcggagttcacccgacaaatcgggtggttgctgggacggggcctgagctcaccggataaaagtcagttgaaaactcttagccaggaactgcgtgagcgcagaggaaaaagaaagactgtctcgccaccgagtattgttaaaggttgtgacggagttgtggctggtcggcgtgttgaggactcttgatgacgttgaacgaccggagatgtgggttctaagggaaaagatggcgcgggattaggcaataaagtggtcgatggag

SEQ ID NO: 10270 - DNA, 1216 bp, Emericella nidulans
gatttgcttgatttccagacgcccattcagtcttcgttggatagtagccccctttctcttctccaaggcctgtacaagcgccggtttgttatgcagctgcacagtgaggccgggttcgacggggatttcaccccccctaacaagcttagatccagtcccttgtttggtgaggttcgggtcaacgtcaacgccaggcgggaaataatgtcgggcacctgatgctaatatcttctcctgcatctcttttatgaccgggtcatctggtgctaattccgccttacaaatgatggtcttcgtaaccatgactcctttgctgtctttaccacaaaaggtctgttgccgaagtttcccagcatctaccaagtgctttaccgcatttctgagcgtgcgcatatcgggcttctctttgtacttggttttcatccaggctgtcacaaaaggataccaaagctcagaacccattggaaaagcacctcctgccttctccacaaggtccatgacaattcttcttcgcaaaaacgcaaccgagcctcctttatctacaagctttgatcgtgtagctctccttgatgatgtttcaggagttggtgttgcattggatgcggaagtctcagtctgaaaagcagcaggcgttgctgactgcagtcttgacggtacaggagaagatgcaatgatgggggctttggctacggtgccagaaaccgtcgcaaggggggcaccatcttgcaactgcggcgattccagcgtcccattttgacctgttggggtttcaatggctgattgagaaacaaacaacgtattttcgctgcgtgctgactgtgaatattgcacaggtctggaggacttgggtgatgattttatcgagttcgcagcaaattcaccattttcttgtggatatagcagagattttgatgctttgctggcttgtcgagtagtaagctttcgacgagggccttttggaccatctccatcagttgttggcatgtcatgtgaaagcttagcagattgtccgccccgtttacgaacatggataacatcttgatgtccactttcaggggacagggttctcttcctctttccttgaatgcgagacggcgtctgagcttcgtgcgcgtgtgcttccgatgcttgcccatcagcaaaaatgtcctcggcaactagctcctgagaactcctgaaaccgttgctaatgcgaccagtacgacggagctttcga

SEQ ID NO: 10271 - DNA, 200 bp, Emericella nidulans
ttttcgggtccctgacatcacgattcgacggctgcctggcgtgtcgtgtctgcagtggcgcgatcggaccttgattcgaggctgggctggtcttccggtgctacgcctgggtgcaggacgagcttctagactcgttctgcgaaggcatgcgctaatgtcgggctctgcgtagtctcactggttgtagcggctaaccagag

SEQ ID NO: 10272 - DNA, 1364 bp, Emericella nidulans
gccatgttgtcggtgttgttgatgttggggcgggccgtgagctggatgctgcctttgatcatgcggttgtggaagtcgtcggtgttcgttgctgcggagaatgtcaatatatggtcttaaagtggtatattcgaggtagaagaacttactgccgctcttagaatcacctaggacgtaaccaggacggacgatcgttcccttgagaccgcgcttgcctgcttcccgaacgaggtactcaccggcccacttgctctggccgtagccggttcccaggccgacgctgctaccttccaggtcgtcatcttcgctgataccagcaccgccggcggcaatgctgcgctcggattcctggacgtagtggtcgctgtcaaggacactggttgagctgacgaaagagaactgcttcggcttgccggttgcacagagcttgagggcgtcaatagtgccaagcacgttagccggcttaagagtggagtaggggtagacccagtgaacaagggcaccgttatggatgacagcgtcgacgcggttggtaaggtcgtcccaagaggcgtctgtgaggccaaagcgggggtcgccgagggagccggtgatgcactcaaggcgggatgtccaggattcgtcccagaagccgtaggctcggcaagtggagcggatgcgcgcgagggcttgctcggcgctcttgccacggacaagagcgattaccttcgctgaaggtgatttgcgagtgaggaggtcgcggaggatgtgggcacccaagaaaccggtagcaccggtgaggaagatggtcggttcagcggagagcatgtcctctgtgcgggttgggaaggagtttggcaaagtgtctaccagtttgcgggcatcacgggagtactcgtcgttgggctcgttggcggccgctgtggagttcgcagcagtctcattgttgctggtaaaggattcggcgctcaacaggcggtcaatctctgcagcgaaggcgcggagggtagggctacggaagatggcattcatgctaatgtcgatgccgcgccacttgcgtcgaaggtcgaagaacatctgttgcgcgagaatactgtgtcctccgagatcgaagaacgaatcatcagggccaatcatggtagcagtgacgttggagatgcgcgaagcccagatttgagccagtgcctgttcggtctcggagaggttcttcaaggctgaaggcctgcgttgaggagcggccgcgctgagttcggcggtatcagggaaaggcagagcgggcttgtcaatctttccgttgggattcaatggcatgcaaattaagcggaatgaacaccgttggcacagcataggtgggaagcttgctgcggagtagatcacgggcatgt

SEQ ID NO: 10273 - DNA, 604 bp, Emericella nidulans
attggattcctcccaaatttcctaaaaagggagccgcgaagggcgctgggcagtgtggccgccaacttccaccccggcaagcccctctgtcctatgcagaagggcgctccagggaaggaagtgtcgttgctgttagagcctcacgtggaggagtcacttaaacaccagttttttactgcttaattccttgttaggtcttctcttgaggctcttagaaaagcgttttccagagagatttctatttttgaacaatggaacggatcactgcttttttgccacatcacatagtaactgccggtccagaatgtgacggattcgactctattcattttcaaataaagccatgagccgtggaacattcttggtcctggtgcttgggttatgatggcaggagtcaagaagaagattactttcattctagaagaatgtagtttctctaattatttgaaatgttcatttagcctttgattttcactgatattaactagcaaactgctttaagtcagctcaaaggattatatagtaactatatctgcatttggagcaatgtgatcagtttgcatttaaaaggaaaaaaaagaattttatcttagccagaatgtcc

SEQ ID NO: 10274 - DNA, 126 bp, Emericella nidulans
agttctcattggcaggcaatgatagcacctagtccgtatccagacaggcgtagagtagcaggaccaccacggacaccgtcacatgcagacgaaccccatctaagatcaatagccacgcatcttccg

SEQ ID NO: 10275 - DNA, 192 bp, Emericella nidulans
gctatcaatgtcgatctgtgatatgcgagctcaaccctgacgcttccaaaggtaaccgcatatccagaagaagagcaccacgggaagtgcgagatagcttttgaagaaacctttggcgtcgttgtaggtgacaccgtcacggccgccgccgggggcagcgacacaagcgaataactgttacagtggtcagtg

SEQ ID NO: 10276 - DNA, 127 bp, Emericella nidulans
tcagcggtgtcggagtaatgagttgatatcgtacgtagggattggtgtggtatgcggcaatctacatggtgatgttatcattagtagcatttgagacatttactgcgttcacattggcggtgggtca

SEQ ID NO: 10277 - DNA, 2832 bp, Emericella nidulans
atatatgtttcataagtgcatccggtcagtcgtggggaagttagaagctcaagaaatggcaaggactgagcccggcgcgccaccggtattagggagagcccgctcagcgagtagtgtgtctactctctcctcagcgaaatcactcgatgccgagacatatgcacccgttccggtggttgccgcgacttcggctcctcggccaaaaaaaggaaaacagtcaaagaactcgacacaaaagaaaaccgctccagccgttgactttcaacggcaaagagcggtcgagaatcccgaattttcagaagaggctatacaagccaagaaatctcggctacggaaatctctcccaaaaattgcgacgtccgaaagtggaatccgttcatctctaacttcgaatcctccatcgaacttttcttcgcctggccctatagcggcaaatctagatatctctgtttcaaggaatacgggggcacatagagaacggtcggaaagcgtggcaagcagtgatgctggagacaatagacgtctaacgccctcactcacgtacgttgcgcagtctagtgaccttattaacatctaccactgggtagtggccattgaagatgtgcattgctaacttggattagtgacgaacctgctgaaaacaacgacttctgtcgacaatgcgagaagagcggacggcttctatgctgtgatggttgcgtgtattcgtaccacttctcctgcctgaatccgcctttggaccctgcaaaccctccagaaggagactggttctgcccaaaatgctcggtctcgaaatctctaaacacgctgcttggtggcatggagaagacccccgggcgagacttcgcattgcctaataaaattcgagacttcttcgccggcgtccgcactggtgacgacggaaaatatgaggaagttgcttcgttaccgcgtatcaaccctcgagcagctcgtgggagtcgtactggccgctacgacgaccccttcctgttgcgaatcactgacgcaaagggtaaactaattgtctgcgtaaagtgcggacaaaccaccaacggccgaaggcccatcattcaatgcgacttttgtccttgtgctttccatatggactgccttgacccgccgctagctgtcccaccgacccagcgagttggaagtgatcgtctctatcacacctggatgtgcccgaaccatgccttgcatgacatgtgttaccctgtcagggatgaagaagggtatgaaacaatgaagcgtattcgtcgtccaaagaacccgcgttttatcgacgtcgaggttctcccggagaacgaggaagaggagaaccttgaggacgaagaaaaggagggcattacgtatcgtgtctcagaaaagggaatcaaactcgacttcattgaaagagtcaaaaggttagtgaactcctcccaccatatacttctcgtattaatacaacccacagggaaaacgaaaccgctgccgcaaagaaagcagccgaaaagatgtatttcgaatatgccaaatcgaaagtggatgccatcacttcggaagcgaaagatttcttcgaatctcagaaaccagccgatgacaccacggctgctatattgaattcgcggacagacgttgagcgggaagccgctgcgaatctaattttgttcgcccagagtaatcaggtcatatggcagaacgaacaaaacggacagattaatctcttgattgaccagcttaaagcaaacgcgcccaaaaacctaccagcgccagaagatgaaatatcgtccctgcgtgctcttcaaaaacttatcgagcaacgaatcagtgctttgcaaccgaaacaaaaaactaagaatgcttactcttctgaagttcaacccacatcatgatggtcacatcagcaagggagataatgatcctgcctttctccttattcttatgtgagatattagtttacgataaagggtccctcttggctaaggatcgcattttgtcgcggtttcgtttcccatccttctctttcgcttcatcattggctctgaatttggttcttacggttcccggcgtttaaaacatagcattgtcgagcgtttcgatcttgcataaagtctagctgtccaaagcaacgaagacttctttatttctttttcctcgttttcaccctgtcttaattatatcatccaacctcagttgttgcgcagagctcaagagccctaccgaaattggaactagacctatgtttccatcatcggacatggattgctcactccgatatgtggctgttaggtacctgactgtttcctggcaagaattcacaatatccggttccgtcccgttctggaagttactgtgtgcaccgccatgctatgccatgccattacaggtaaagtatccgcttggatacggacggcctggaataatggagttatggcttggaccacggggtagttcgatctaatccggttcaatctgcatatgtatcataatgaatttattactagattctatttgtgatttcttctttgatccgtaagcctatcacatacctatctgatgtccttcacttcagctttgttgtaaattcagcgtgataggacatggctccaagaaaggataatcaacacatggttcagggcgtcattgaagcctttgcggacatcctataccagaatctcaggctagagtgagatgcactcgtcaccggagatggtatcctttgttccaggggttgcgagggcgtaattgaactagaataccccctgccccaagtacgtctcctgcgcacaagaaattataacccgctaatggaacctaaaatataacagcatagttggcctgctgcttttaccc

SEQ ID NO: 10278 - DNA, 1433 bp, Emericella nidulans
ggcctttgtaaactgcagatctaagttctgatttgcgcctagggccgaatgaatgtcatttgcctctttccatgtcataggtaacggattatttatacctcactagccagcacgaccaaggcaatccatcatccactggaatgagtattctagaaaaccatgaaggataaggtgaaatcagaggataagatatccaaataaccaaattataatcataatatagacatatatatcaaaagggatatagatatgagtatagatcatcaaacgtaaatacgtaggtatatccaatcacgacttctccaggggagccttctcagccgcagctgctgtcgatggtgcagcggccgtagcctcggtcttctcactaacaggagatggaactttctcagcagtgctggctgttgttgcagtggtgttggtgcggctaacagctggtggagttcccgcaccggattccttctcgtatgcgggaggctgaacaggagcggctgtggctgtggacgctgcgccaggactagttggcgaggtgacggtcgatgggctaacggcggcagcagtggtggttgcgattggggctttcgcggcgtccctgaggatgttcacccattccttcgcctcggctgcggagccggctttgaagacgaactcggtgtttgtgtgaaaggcattaccgatagcgttgctggaaacgtccttgcccttgattgtgaaggtatgtttgacttcatcgacggagacaatatggcagtctggtagataaagggaaatctcgggagacgggtcgcggttgaagtcgtcattgtctttgaactcgtgcaggtatcgggcacgggtggcaacgtagaagaagctgctgtaacccttgagcgccatgcgagacttccgttgcagcgttcctgagattagcggctgcgtggcggggtggtcctggttgggaaagttaatgtttgcaatcgaccgtggcggagcatctgggtcaacgagcgaggaagcatttctagtcatgaagtttacccactcaaattcggctgggatcctttgtaggttaccgagaatgtcgctgtacagtgtcttctggcgctcggtctgtccagtaataaatacgaccagttgttccattgcagcctggatggtctgcagcacatgcgcttcgaactgctggaagttgttttgcaccgtgatgatttcctgccggttattgttctcttcaatcacctgcttgttaagacgatggataacgccccggcgaacaatgtaaggatcatgcgaggtgtccagcttgttcccggctgctgaatcgagagcggcagtctgctggccgagaagctcaatgtgtttttgggtgacattccgggccttctcaacggcttttgcagctttcgaagcaccggtctgcagctccttcgctttggccttgatctccttgtgaa

SEQ ID NO: 10279 - DNA, 100 bp, Emericella nidulans
gataagaataaatgcatcagatgtccacccagactcgacgggccgatcctagaaatatctaacctaagccttgaatttctacataggtgcaggttgtcag

SEQ ID NO: 10280 - DNA, 619 bp, Emericella nidulans
gctgaccgtgatggcggccgctctagaactagagcatgcggagccctggagcaagaggatatcaagctcatgcataccgataccctcgaccttgatcggccgggagagcgccctatgcgtaaccatgatggtggcactaccgagttagactgcacttgctcaccgattcactgcattgacaatggcaccaacactggagcgcatacctaaccgtcacattctaagggctccgtgactacatatcactgtgagactctcgcaggagctgaggcttacccttaaacagcaggctgctgatcggctatgccggtcatccaatagcagccccgacgacgatgatggcatcgaaattatcattacttacaaacacctcatttctcgaaagagcatcgtcggaagcttcagacaatcgtgtgtactccactccaccagaatctaggtcacccatcgttagccctcaggaagccaaagtccgagactgggacgaccagggtggtatagccctgcaccgtggtggctagccgcctagctggactggcaataacgggcgattttcaccaccagctccccgatcgcaggcttcaccaccagcctttagccctttttgcaggccaaagac

SEQ ID NO: 10281 - DNA, 137 bp, Emericella nidulans
tcgtcatactacggtccctattagggttcaatacgtgaacagtccatcggtaagctgggataataataaccgcatccattgctgacctgggcacggtgggacgatcctagaaaactctaacttcaacctggaatgtc

SEQ ID NO: 10282 - DNA, 2274 bp, Emericella nidulans
tctctcaaatgaatcaacaatcaaaacccacatatcaagaagctggaatctatctaacgagacgatactatcacgaggtcgaggacatgcgacttgcacagcctagatgtacaacggtattgctgtggacgcgtgacaaccaccaaggaaatgaaagggcagacagaacttactcaggaaatacatttataacactaccaccaattcttttatgacagacgctgcacacccgttcttcggtaatggtgacatgccttgaccttgacgatcttccatccgttccctcgccgactagcagctccgcgcgtgttttgatggtttggaccttgagcaagtttgccgtgatccggctttcattcaaaatcgtgtttgctgcgcgcatgcggcctttgaagtaaaattcgagttcgtggaccggaagagattcagggatcaagtctaatgcagaattggcgggtaaccgagatccgtgccgggcaaggatatcaagagctggagcatattgtggcttatacccgtgaggcggagttaggtacaatgacaacagtgtgtggtagatggagggctcatcgtcggagggggccagcgcggaatactcagcagctggtccactcggtgtcggggtatcttctgttctgtggagatggttgcaatatctgtttggcgttaacatgtggtccacattagtgaagatttatcgtactcctctgctttgacataatcttctagcttgaatacgtaaatttccagtgcttgcctgtgctgacccattttgctgaataggattgcgcgagcttcgaaaaactctgggtctaatagctagttagcgaatattcacgtatgcgatgggtagacctaccgtcacgatccagacgagccagaattttagacggcgagtactggtcgctcgtttttagcatcgtaatgagcttctcccgccagaatttgtattcatcttctgttgcgaatccatccttactgttttggtgtttctgtaaccggttcagatacaaaacagccagcctttgatgcaaatccggcgtcaagtcattcagttctccaataacatgctcaagataacgaacagccagcttatcgtcaattccctgaagaaaatcaagtactttttgcctaggcagcgtctccgcattctccgtatccgcaaggaagatttccatgccaaggtcagggtcctcccggatgggccactcggagaattcaagaataaggtcaatgtgctccgggggtagatgctgcagatacgcgaccattctcttgggtccatgaagctgcggcgctgtttcttcttctgattcagactggccaaatttcctgagaagctcaagagcctggcggtgcatcttctttccgtacagaaagtcaatgagatcgttatgccggcctgtctcttcgagtttctccatgaccacttctgggtcacagaagttggcaatgcggaagagcgagcctgctagagaaggtgtggcgtacatgtaaactctgaagagggttgtatcaacaagtcttggtttctcgcgaagcttctctccaaggtcgtagtcttcgtcatcctcgcctacgtcgagtaacttcatcacagaatccgtatattcgtcctttgctgcatgagtttgcgggtcaatcttgagtgagccatcggggttcaagaaccgctggaatcgtcttcgaacgtcagcaagatatgcctgtagctcacgaactgcaagtttgagatctttcccggttagaggcttttcaagacgtgcctcttccggctttccacggacgctgcctgagtcacttccgctcccttcatctcggctccgaagaaaagacatcattgacggcgtatgatttaaagctttgatgggtgttgtctcttctgagccgtttccttcagcctgagcttgactatcagggagtttagattggctctctgtcatgcttccttccaattcatcttcttcgctaatagacgtgaggtcgcccgcgataatcctagggtacagttgaatgacggtctcagggggtgcggagacctctgtaaagagctccattgattggaggtaccttcgtagcctgaacattccctcggccttttcgagtttaatctctcgtattctgccttctttattcttgagaagcgcatcttcaagcatacccgcaagacttatagcttcgtcaagatagcctttctccacaagcgagtcaatctggctgtcgtatccgagagcctccatcctccatatgattcggtcactcgctacaaggaac

SEQ ID NO: 10283 - DNA, 1800 bp, Emericella nidulans
cccaagacagtcgtagaggtcggtctccttcctttgaggagcaggtgttgcatcttccccccgtcgtcggcagttattgcattgatggccatcatcagagccgcatggcagcccagctggtgctgagcgagctataccgcgtccaacgactggtgactcaggtaagccgtcgcctagaatctattcgccgccgctcctcgagcagctcgagctctgcctctagtaatacaacggactctgacggcgggatgtcgacccccttgtcgtcgaccaccctggtccatctagaagacgatttgcgcaagcgcctgcgtgccgtctcaagcgaaacgatcagcatcctccgccacgcctgaggttgaataatctggaatgatatttatgcgatcaaagttcattatgacgagtgttgggtgaatggtatgcgactctagggttccctgccgaatgtccagcttatttgatacagtggtggacaccgagaagcattcaacgaggagcattcattctacattccgggcgttcattacagccagtagtataactacactacatttgaattattcatagagttaggcgagcacgttgaggtgcaagaagcagcgataatgagttcatgatatactgattttaacaggattcagcacatggtagccaagtaacaaaggtagtcaccaagtaaactaccagggcacgtctgagccgtccgaaaatagaataaagcgcccagacgttgtattcttgtcggcctcggtcatctgtcctcacaggattagttcgatgcagaattagcgaaacggaaacataccctggcacagataccagccacgctttcctctatcgtcgtgggggcctctttgcgcccgaacaacctggcagcctgggcgcccatatctgactggatgtgtctaccggcccgatctcgtcagccaagatgaagtgcgcttcagacagtcataatcgaatccgggcattctcacccagggtcgacaatgtacgcaacaagccacttattctcaaagtggatcttgcgcaccagatagcaggcggccagctttgaaagtgcataatttgtgagcggtgcccgcgcacagctctccatctcggtaatcgtgctaatcggggccccgacgcagatgaactgcggcgatttggcggcctggagaaggaccctagtcgcctggaacagtagcagggccgcgtatgcgttaatctgcatgtgagtctccagatactcgagaggcatggtcgaggctggaccgtagttggccgcaatagctgcgttcgcgatcactacatcgagatgcgtaatgccgtaatcgcgctggagaatgctgaccgcgtcggcgggatcggacttcgatccactgtccagttggactgcgatcagcgaggagttctcgcctcttgggagcgcatccaaggcccccgcctgcgaagtgcgattgcggagaccggcgatgacgatgctgttggggcgaaggagaaatgcctgcacgagccccctcccgaggcctgcagttggtgtttagatctgtgttaaatctgtttcaggaatgcaggcgaacgtacccctgctggcaccggtcactaggtagaccgtcttgcggtcggacgaaggaacttctggtacagaaacggctgcagatggcatggcggcagtacagaactgagctgagaagactacagtatatggatttgcggaagatggtgaccgtcttatatttctcgccgggcgtacaagtagcctcatcggccattatagggaaggatcggggatttgaccaagtgccgaagcac

SEQ ID NO: 10284 - DNA, 230 bp, Emericella nidulans
acaaaagcgtaaaatcccccttcatttttattttcactattaatgcaaaccaggaaactatacgctatcggtcctttaatccctcgaaatttaaggctataactcccgcaatatttagggcaattataagtggcttctcccagccaaacattcagcactagcgtcggatataatgcgtcgatatctcctcgtcctatcatacctcaacatacgtcacaggtgatttgagg

SEQ ID NO: 10285 - DNA, 1058 bp, Emericella nidulans
atgttagatgtagcatccttcgcgctcagaaaagcccagtgcaacgtagatgccgttgcgtttcgcagcggcgacgagtctattccagttactgtcgccgcgggtgatggagtttgcgacgtattgctttgcccattttgatccagggtggcgttgttgccacgagggtatctgctactgtatcagcaagacaaaattgttggtaggtacctggacgatattggtacgcaccccggaaaccagagctcaggaaacgcaacgaggttagcgccttcgctcgcggcgcgctcgattgtagttcacgcccagggtcgttgtggcatgcatgtccacgccatggtagtcacggctcaggatggattcggaccagagggcgggcggagggcggacgagagctgcattgggcactcggcaggtattattgattggggtagcagtggctcagctaggaggaatataagactgaggatccgcttattcattctgtcaaaaatgagctgaatctgtgctatgaccttgcgacagataggaagcggcttatatcttcacaattcacgcacctagagtttcttgcctatttggcaagaatccacaccatagggaatgaggaacagttctatctcggtatgagctatttcctctggtcagtaagaagataggcaactatctacagataaaggcttctaaactggcgcgggctctgggacgtacgataatttgaagttcatatctacattgattaacttcattgtactttcattgtactcactttggtcaaggaatccggagatcgatactccttaatatatcaaaatcgacatatcggcgtactggaaagccggggtctggcaaagaagcaaagcccggcgccgatgccggtgtgcaaagggcacggcgctttttgaggctcgaacttgagcctatcttgtactcactttggtcagatcgaaatggtagtgagagatggtaactgccagggtaaataaacatcagtattgttatcgaactgtagaactgtctcctgtgactcgaattgtatcacaacgatggcagccaca

SEQ ID NO: 10286 - DNA, 1652 bp, Emericella nidulans
taccgcggtctgagatccttggaaaccgatacctccgctgaagccagcaaatcctgaataaaggatgatctgggcgagggataaatggggtttgtatgtagtcatcaacgcggcggcaatgggcatgcatatagagccgaagatcatgaagggagcgtaatatccaaacatggaggtgccgatgccctggaggaacagcccgagcatgatcccaagtaggatggggatcatcagataaccgctctcacctggggtctagcagcagacaacatggttagcgcacttctcgtagttgcgaatcggccacatttcaagaacatacccgggattgtacgacttgatagtatgttggtaagtaccactcaagcacgtttgtcattgagttcgtgcatgttgtgtagataaacccggcgatgacattccggctcttgatgacgcgaaacgggagtgcggctgagtccccgcgccggtactgattcaggaagaaggcgatcagcaatacgccgaatacaacaaacaacccaattactttcccatcggaccaggagtacttcgttcccgcccaggagagcgcgatgaagagcgtggtgagagacgggatgaacaagcagttgctgactagatctagtgctctgatcttctggatcaatgtgaagttaccctctcgacgggttggaggatctgaaagcaggaaaaccatggctgcgagtgatacggcgccaataggaaggttgatcctagtcaagagttagatcaatatgaagctaccgcgggccagcctgtgacgtaagagggataccagaaacaccatctccagcccagggactgcgtcaatgcaccacccactatcggcgcggctatgatagccaaggattcaacgcatgatatcaagcccacatacactggtcgcttatccagcggcagaatctgcacggcgaccgcgaaacacccggccaggtttcccgcgaacccgaggccggtgactgccctcccgatgacgaacatcattgacgacaccgcggtagcacagagtaaagagccgaccaggaagatcaccacactcgtcaagaagactgctttgatggagaaaatttgatacaactttgcgaagccgaattgaaacgcacaggtgcagagtcgaaaggcggacgagtaccaaccgacatcggctaccgtatggaagtggtctgtgatgctcggcacggtcgtcgcgacaatgttggcgtccaggccgtcaaggatcagaatcacgcagagggcgaggatggtgaaccagaatttagtgccttttgggtagttcgggttcgcgtccgggttggacatatcgtcgatggattaaatcgggggtaccggggatgcagtagatgtctgttgacccgacgagggctgatggtcggtcagtaccgccggcgcctcatgcttcgagatactatgctctgttgcggccgacatcaccatactgcgacatgagagaagcgactggaatgtgacacgagagaagacattatgctgagtggacggactcataacatattaccggatcacctggcatgcgattgcctactatgactataactctagaaactctgctgggacacaaggtctactgccgaggtcatctctgactactttgagtatatgtagttcatgat

SEQ ID NO: 10287 - DNA, 510 bp, Emericella nidulans
gggggctcccacctcccagcggtggtgctctaaagagagcgacaattgctcgcatgacggaatcttgactgtatctggttcccgagcgaacatggatgtaccgaggcagctgctcacaacttagtaagcgtaaagcacagaatgacacaaacgagcggtcttaggagagggctggcgcacatagatagcagtaagcacactgtccgttttctatgagctaaacctgtcgtgccacttgcattcatgaatccaccatcccgctgttagaggattttttgcgcattgttcgcactatcctttcttcgctcaattaattcgtttgtcttcgctcgaacggatcgctgtagatggatccgtatatttatgttgcccaaatcctggtatacaacgaaataggggattatcttggaaagaacatgtgtgcaaaggtccatataagtccagatccctttatacgcctctcgctggcatttatcttggcttccctcccattactgcaccactaaattt

SEQ ID NO: 10288 - DNA, 1261 bp, Emericella nidulans
taccacaacgtatggtttgtacacccctaaggatatgtctttaccccttctagatgttactgtcgtttcttgaaatcatagccctttacttcaagcggttgtcggggtgaatctggtgagcccacgataaacacactccctgtcctgacatcataaattggggtatctacatccgggatattatgaatggccttgtaccattccatggtgccggtgtttaaaagcggcaaagctttttccattgacacaacggaaaatgccacagatcgcttggcatagctgagatccatgccggagagatttagcccaagattgccggcggggactacctatcttgggcagtctcaggcgcgtctcatgcagaaacgttgctaattatgttcgagggcgcttaattgatgtggaattgggcttgaaccggggtaattaaccttcattcagaaagaatgtctattaatagatgcgcacgtcatttcagtctttgtagctctgtcgtcactaattaacttctttcttgccgcctgaactagtagaattaagctgcattaagttcatgattgacagttaagggcgtcaattttggggaatttattggggattgccagtgagcggccgccagcgaatcagagcttatcaaggcctagatttaccggttcggcacgggccactcattaattgctaatctgtgattggttgatcttgtgaaagcgccagcagtggagcgctccctgccaatctagtggccagtcgaaccgctgatggctggagttgctgccaatcgagcctttaggaccgaagcttggcatgcacctccgtctgttctttcacaaagaacctccaggcgagcgtttcatcagtcgctgggaggactgtaaagcaagacaatttctgattctgaaacataaatcagccaatgatattgcgagtttgttgaggtaggcgacactaatgattgcaatcaagatcgagtcccagcaaaagagtcgaagatgctcaagaatcggtcagtttgagtgaggaagtaattcaagaggtgtatttgatggaagagacaatgatagcatggaagatgaatatcagatcgagagcattaccccggaaattagcgagcacgcatccagatgccgcatccgtgacctgcttcgcggcgccaactatgcccgaacgggagcaggcgctgacaggggactcggcacctcaagttctcaacttagtccggccctgatcatccccaggcacaaccgccggtcaggatccaaaa

SEQ ID NO: 10289 - DNA, 105 bp, Emericella nidulans
ggtacccgcgggatcctcaagctctcagtaagccgccgccagtcgtgcatcgtatgattgcatcataaattcgaccatttcatctagtgcgccgccatatcgatc

SEQ ID NO: 10290 - DNA, 113 bp, Emericella nidulans
tcggtggcagccgtagattccattatggttcgagacgctgaatatcctcgttcaaagaagcagctcgctgcgccagctctaggggatgaggcttgcggcgctccgtcttcggc

SEQ ID NO: 10291 - DNA, 169 bp, Emericella nidulans
ataacgagactgatcatctactacagacacatgcaaataaagatagaactcaccagagcacaagacgcatcgggacggagaggagtccatccgatcgagcggcaaccgataatacggcttcagtgcacggagacagaaggcgtgctcgaccgcagatgaggacacccaa

SEQ ID NO: 10292 - DNA, 1563 bp, Emericella nidulans
tagcgggcggtttatgaggcctgtcacggttgattggacgaatgggcaagcagttgttggggatgatgagagtcagattctgaagatggtaagacaggcggaggggaattgagactaggggcaacatgacctgtctgaattagttggaataagggtagggtgtatttgtattggaattgagaaatgactgataatattctccgctcaactttcttattcattctatctttctctccttacactaagtacgggatcacttcgggctgcttcaagtgtagggctcggtagcctgtttattgtttatgaaaatggcccctgctacgctttgtcgaaacgatctcaaacttaatcaagagactaatggcatccagttagggatcgccgactatcattcgcgtaatcgctcacacgagtacttcaattggaaaaccatattatgactggcactagtatcccacctgcaacacccagcaaggtacatcaacgattctaagccctttactggccacttcaatgctttggtaaacagcaggcaaccaagatggagccaaaagttctacggtaagcaaaaggcggcaactgcatggctagacaagatggcaagatagtcaagcgattgacagctttacgttcaggttaactactaggtatctttgtatcgtacaactcaactcgtcaactccgttcggatcatgccagccatacattaggaagtttaatcagataacggccattcaagaccagcttgtccggaccacaacaacgaaagaggagacagtaaggtcatgagccctagaagatagtaccaaagtcctcggttggtatcggcttgcggggagagagacgcccagttccgtcgatgttcggcttgcgatgtctgcagctggttagactcgtcattcacaaggaggaagcaaggcacgaacctaaacgtaaacccaacgaagagcccctttgccatcttttcatcacgctcagccatctcttccagagcccgttgcttatcgtgaacttccttgtacttggccatgtcagcctcgttttcgaaatcgtcaaagtaccctgcatcagtctccgagtccagttgaggtacgaaaggtgggcgctgctcgcgcagtcgactgaaatccacttcgctgaagtactcatgtgcgtgaatttcactgatgttcttgaaacggtgctccctggatgccaccagtgtggtgatgaagttccatgttcgttttgaaaggaaatagttaggatcctcataaacaggccggcggagcaccttttgccagttcttcaagttctgccaggtttcgtccactgttgatccggcaaatggtgggtaacctgctaatgcctcgaagagcatacatcccaaactccaataatccaccgtaaagtcgtattcctcacccttgagcacctccggagccatgtagtcgggggagccgacaatagactttgcatagtcaacctgacgctcccgcaagctgcggtatccctggcggcgctcggccatcgtgcgctgctccatcggacggccaaatggaacaggggtgttgcccacctcct

SEQ ID NO: 10293 - DNA, 1459 bp, Emericella nidulans
ataacttacactatttctttggagaaacaaaatatataaaaaatcaatataagaaaattttttttcaaccggaaaagatctaagaaaattagattttagtaattttaccagaggggggccccctctttaaaacaaaaattggattttaagattggtgaaaacaccaactcataagaattaagtctgtggcttgcaatgagccgccggacccttaaccggttgattaaaaaaaaccgcaaaaagcagcaagtggccttttaaggggccaaaatagaaaaatcgtctaaaaaaaggctacttgtgttaacccagcaccgattaaatatgttcgcggtcaaattccagaagacttgcagccctgcctaaaaaaattacaacttacaaggcttgtgctccggttatgctagacaaatagcatcctggtgaatatcagtataatttcgctgctcagggtgtatttgctaatcgacacgagttgatatcagacctcacgtatcagccagtatacctcactgaccagcatgcctctttcgcatgggactgcaagtgcctgccatggatcgcctgcctagtaaagaaaattgttcgcgcaaatggcaagctgttatttctgcgccggctcactgacttcgcaactgcatagaacatagaatagtcttattggaagtaatggctttgataggtttaaacagcgctacagtgaccatcgtgcagcagacataagacgatgaagtatgttagcgagtatgatattcctcaaggtaactacctagtattgccgttgattatggaccagcaccggcgaacaccgcatctgttaaggccatggcgcaggcaatgggctgtgcctgaccctgggtaccagcttatcagtctatcacgttgctggctgcttaaataacgattcgcggttggaccctgacccgcgtcaagatgaaacgggacgagtcattctagtaccacagcaagagcccattgataaggctgaagaaccgctgccaagcacacgttctcgcggtgtgcctgcccaagagagaccgaagagtcgaccaaggctcgccgatgtaaccgctctgctgcagcccccgacgatctgcctcagacagcgaatcagcgccagctctgttccgcgtgcaacataaccaccagatatggagctgtatcacgatatgagatgcccccgcacagcctctcagagtcggttcgcatcagcggcgtcctccgacatcgctatcgctgcctctacgtttgcggctgccggttagggcatataaagcgctatcttgcctcccgtgccctacatcccagtaataccactcccagtcccgaggcagcgcaatgcctcgccttctccccgttctccttgccgccgcttctctacaagtggccccgggtcggcgtacgccgcccggtattccatcgacctcggtcgcagagactcagcttgaggctctgaccg

SEQ ID NO: 10294 - DNA, 225 bp, Emericella nidulans
caataaagcacgaatggcttctcgggtgatctcttaggatccaaggaatttgtggcctccgtcgcgatcagcgtgaacgacttcacaaagcaatctgatgcccagttcagggtttcgacgagactctcgtgcgtagcgagagagtttggagccgttaagatgacttagttacggaatccaggcgtcaccaccgatagataggacgctggtacagctgcccatgtt

SEQ ID NO: 10295 - DNA, 136 bp, Emericella nidulans
  unsure (1)..(136): unsure at all n locations
gggccggggcctcgccccagcccccttaggagctgggaagcagaccgagccggaagtaggaaagctcttgtaatcaatagtagcngtataatcagttggccaaantatanttcagctaacgagactctctagttac

SEQ ID NO: 10296 - DNA, 131 bp, Emericella nidulans
tgttgaacatgatgggcttcaataggttatctcttggggtctcagcattcatgttcggagactaccgacaggttgcaccactgcccccacgacctttaccacctgagggggtagtctgaaagtcatcgttc

SEQ ID NO: 10297 - DNA, 394 bp, Emericella nidulans
  unsure (1)..(394): unsure at all n locations
ttgcctattggcgacgtactaattaaatgctgagaaatacccatatctagacgcattcgcgaacaaaatgtacacatagcctgtcccacggggaggatgcgcagacaggcacttatatcgcacacttgctgtatcctacaagcatctctctagtcaccctttgaccgtgctctaggtaccaattctttaactatagtcacaaaggttccgttgaaatatagagggccgctagtcactaacccgtctgaaggatcttcaacaaaacttgaactttcttccatcncctttcccggcgagacagnctcgtttatgaccttatacatggcactcatcaatcaagtcgagaccccaagcttctttgcccgttcttcaatgttcttcatggacttcaact

SEQ ID NO: 10298 - DNA, 529 bp, Emericella nidulans
ctatccaccagcgtggaccgctcggtcggagcgaccttgcgcaccgaggtttatcactcgggaggtaagcccactcgtccacacttgacacagggcttcataatccattgacttagaatagctgtcttaaaatacagattcagcccgacggatgcactctataacacgcagtggtctatacagaggaagaaagtgagcggtccgtattatcgtcatgtttgatcgctatattgactcgtcaatcgcattctcctcaaccgttactaccggcttgactgatttaacgctccgtggttagatttacacgtagtgaatgtccattggtgtatatcacactgttctctattccatattcagttctttactattccgatgagctattgccacccagctaaatactcatcttgtcttcacatcattatccctgacgtcgaattattatgccactcttgttctttacgcctaaacttttgtactctgttatcaatccactgattattttaaaatatactgagaaaactcaattatt

SEQ ID NO: 10299 - DNA, 2154 bp, Emericella nidulans
  unsure (1)..(2154): unsure at all n locations
ctatttactatccgcaagaatcgcttcggttaacgtaccctctttggcttcactctcttccgcaatgtatccaacagctgcctcggatcgacgaccgacaacaaggtctgaccgagcgcagcatccgccgcagtgacattgacagtaaggtcacggaatgtgagcgttagtctctttaagatcccagagccgccttgctcaaggtcgatcatttcggacgaagaagaggatgccgtaatggagagtgtctcacaccctgctgccaacattgaccacttcatcttgataggccattggtgttccatgagtgagggacattaccatggcaagcttcatgctatatatcccacagtcaaattttcattgttccttattgcgtatatgaaccggtgttatagcgaacggacataagtcaaagccgtatatccgtggagttccggaaatacagcccttcagtgccatcgaagcaggcccacttgattcatgaccgatcaagtggattttgaccgtttatttcgtctgctggtaaatttgtcaacactctttcaggggcaagtttagccattggggcggcatagcgggtaaactgcgctggatgcaagaatacaagcctcggcctaaagacttggcgggaagagtggttcattactgtgctaaatgggtatatctgatttgaaacgtcatccaagacgctcaaaagtagaaccctttgcactactgtaatattgcgctggtctcgaaatgcagaaaaccgaaagcaccataagaatggtactctcagttcacgcccagtatccgcttcaaatcatgaagtgacaatggcttcaccaggtaatcgtccatcccggccgcaaaagcttgctgctgcatatcgctcgatgccacgcccgtgacagccatgatggtacaccgctccaacagactctcatcttcgtactcgcggatcgtccttgatgccgtgattccatccataatcggcatcgatatatctaagaaacgttaaccttgaaggaatatttggctagtgcatatttacccatcaaaacgtagtcgaacttttgctgcgtttgtcggtacttctctacggcaactagtccatttgaagcggtgtcgtaggagcatccaattttcgacatgaatgtagacaaaacctaagccattgttaacatgaaccttgcacctaggcacattagggtgtaccttgaggttgatgtcgttatcatccacgatcaaaacgtgcagtccgccctgtagtgggcctgcttccgcggctgaaaaataagatacactgttcctgacagcaggtggggagtcgagactgggagcgggggggattgttattgagtgctcgcgactttggtcatttcgtaaagaacgcgagttaagcccgtcaggttctgcaatctgtttcaatgcctgggtgattttgcgtggaccgagtctgagtagtatcagccccagaaaaagtttactaaatcacagcgcgaagtacgtacggttgggagatgtaagcaatattgactacaccatccaatttcaagtcttcgaaagcagatacattgtggtttctgagcacgacgacagaccggaatgtggttttcaacggcccggggatagcgagtttttccagcttcgactgttccaaaactacgatatcgcccgaggcgtcgtccatatcgtcagcaaacagcaattcccaatcatctctagttgagagcgcactgcacagtgcgtctcggactgcaatttttcgcttggcttcggggagaagaagttgctggtcttccggaaggactggattcaggtccacgagacaaactttcttcgcacagcaagttccatcgtcattcggaccaaaattgccaactacctgctcttcatctgcaaacctgattgggatccgaatgcaagcttgcgtgcctacacccaactcactgctgatgtcaatctgtccgccaaggtaagttaccagtttatgggcaatgcacagtcccaatcccacgccttctgtcaggacctgttcctgtgagaaaggactgaagatatggttntgcaagtactctcgcgatattccacacccggtgtctgtaacttttatctcggcgtgggtcgccctggaactattatcccgattttctgtctgggacaaggaca

SEQ ID NO: 10300 - DNA, 2759 bp, Emericella nidulans
tgtgaggcagaagtgcccgggtctcttgaagctggtgggaaggattctctgtcttcttgcgagactattctgggagaaccccgttctaataaattgaaggtgaaatgctattggcatcgacagggtgaacgcgatgctaagatggccagtgaactggtatatctgagtgtcgtctgcaggcggcattgagatttcttgtgttgctctaatcaacgacagtactctacatcctttatcctattctctgtaggagtctcaaactttattggctgtctgatgaggctgagttgttagcaaggccgacaggaccccgcgacggcggctagctcgtgcgcactcgcccaccgagctgcttcatgatcctctccacaactttctctgtctctctcctcgtacaccaaacaaagtgacaaaatacgacagtatggcggaggttgttggagtggtctccgccggtatcggggtggcagcctttgcgcttcaaatcagcgaaacgatcagacgactgcgggatattcgcgagtatggcaagaacaaagctagcgctgaattagagtcgcttgtcaagcgtcttgagaggctgcgggatatattactatcccttgagactgttcaaacgtctagaatggtcaatcttgctattgaggactgtcaactggagtacagtagcgtcgacgatagcctccagcgaatgagtgaaaagctatcccatctgggcaaaaaactgcagggtgctcgacatagcagaggcatcaagaaacaactcagggatatcgggcaaaggcttgactctgccgtacaggatttgtctttgagtcttctaacgctggtcgcagaaagacaggttgacgctcaacattctcgtagtaagattgcgatagactctcaacgcacaattcaggaaacggctcaggatatggccctcgctataaattcatccgttattgacagttctacggtccccaagacgcgagaacagcgttccacgcctgcaagtcgagccagcatcgaggagcccatcccgccacatatagctcacgcgagtgagctaataacatcaccacgacgatcgcgggcgttggactgtactaccaggcactgccactgctcctgtcatttgactcaccgcagttcagctcggttctgggcgattgtgtatacctcaccgaccacattctttgaaaaatgtagcaattcgaagtgtacagcttctctctactgctggagcctacagtttgccctctctagatacggcatcccattcatggtaaatgctgccattgaattcatcaccggcgctggaagatactcgctcagaccgggcctcagcatagaacgagtggtgaaatacacctcgcctggcttcgaggcactttggcggtttaattgcgggctgctgaaactgtctgaggttcaggagacatttcgggagctgagaagatgtgacccctcgttaaatcggcatatacatccaggcgggcgcaactatgttcaggtgcggaatcagtgagactgtctcccactatgctggtctaaccatacaataggagctcctttactgcggcccaaatcgaggccagcacacgaatgaccaattcgagctcctaaaattcttcgcctgcgaattaggtatgactcttgaaggtctagaccaaaggtatgctgcagctcagatattgtggccgacttcactcaggctgattccccctccacaggtttctggtccaatgcgtcaagtggatcggcgaaggtccccatatcgacttgctcaaggcgattctcgcatatggctttgacccaagttctatagagtcgccagtttacgaggactggccgtctccctgttcgccaaattggatagccgaggaactcacgccggacccttttttcatcgattaccttgctttacttgccaacgccagtccaggtaagttaagtaaacagacacttatactctatgcgcttattgataggcggttaaaaggctttgctggattaacggctcttcacgagatcgtacttctggatcccccaacgtcggtgacttcgttcctctcacgctcatcattgcatatggagaggaactttctgggtcagacgcctttacatctagcggttcacgatgtggaaacagtccgtctgcttgtccaaagtggccatgacatggacatccaggacaactacggtattacccctttaatgtatgctgcaggaatgggcaagacagacgtggttcgcttgctcatcgagcaaggggcgaaccctttcatccgcgataccagatgggaaaggaactttattgattatgcagctgcccgcaaccattggcgattgttaatggacattctagacacggttcaagacagctactcggagagtatttctcagtacttcatctgctgcgcgctgctgcgactcatagctcgcgagaagtggttgcctgataacacatggagcgcttactttgcaaagctcgtgggtctatgtttagatgtcaatataagattcggtaatagtcatgatggaactgaagataacaatcttctccatttcatctcaaacaacgaagatgtcaaagtgctggcgcgacaaggtttcgaactgttcggtcaacccaacagtgcaggaaaacctgccatattctcgctggtcccgatattagatgcaacactgatccagtccttgcttgactacggaatcaacataaaccatgtggaccacaaaggacgtaccatcctgttcccgctgctccagcagtt

SEQ ID NO: 10301 - DNA, 1272 bp, Emericella nidulans
cccattggtgtatttagacccagcgctggtagcccctagtgcggttcctggacgcggagttgctcgctgcgccccaagagacatggtccagccgcgatcaaaagatccttttttaccgtgcgccaatccgacgtgggcggatgtttcttcggcgattgaaaatcgacctgtagcgtccaatgacgaatgtcgcctttggtggttgatctctcggatcgacgcagcagacggtcggcgagaatggtccatgaacccagtgggtggtgtctggggggtgaccggtgaaccagtctcactctgcatattgttgctgaccaggcgcggatgctgagtgccactgaaggatcctctgaaattcggtattcgtggacgcagcggccctgtctgaccaccacggctctgcgagcgttcttcagacattgttgaaaatgcggcgatcgaaccccgggcagtcgatgactgttgatctttgtacccttttatttcctcctggaacgatttgatcttatgccaggttttcagtcgtcgccccattactccgaaatcaaattccttcatcatgaggaagtcctggttcatgtccaacagcacgtctcccgagatctcctgctcctcaaatatatcacagtgtttgtcttctactcccagctgccgcagatgtttgaccgtctctccgacttcccatctccgaacttcttcctcagagggttgattgccttcctcctcatcagtctcatggccgttgatatacgacatccggtgatccaagtggctactgtattcactggccgagtcattgatggtcttttggtcagcagatggcttcacgctgtggcgtggagtgctgagatccgtaatgtgctcatcgataacactcagagtctcgttcatgactgggctctcttgaccactgggatgggggttgagcgtctgtcggatggactgttggatatcgctcgccatctttatgttcggcaacggggatgaacttgaccgattttgcggttgctgctgctttgatgcaagcagcgacgggttcggttcgctttgtccatgagcaccccgaagatcggtcatgctaacgtgtcgagacgcttgtggcgtcgaatcgtcgctcttcggcgtcgatacgaactccccagagtgcaatgcattggccccttggtagactggtgattctccagccccatccgtcgcaagcgcattcgactctgagctagcggtttgggggcgcacaaaggtattaggtgctttggtggtatagactaggga

SEQ ID NO: 10302 - DNA, 1761 bp, Emericella nidulans
aagaggacggcagtcggaggtgagcttgtccgcgacgacgtcgaggaagacttcgggacagtagtatttgttatttttggtagcgcattgcttggaccggatggcaagaagccgcatcttcaggatgtcggcgcggtcgcggaggaagacgccttcccggcctggagatctgttagtggttggtcgaaggttgaagtaaagaaggacgtacctcgtgctatgagagatgcgctaaagccgcctgcaccgccagagccgtcgccgtcaaggataacttctcctttccgaaccttatcgatgaaggagatgacatctttgagttttcttttcccgacactgtcttcgacattttttaatgccgcttcacaggctcttagttcctctttcagcgttttgctgatattttcccgccctttagtccactcgggatcttcaacttcaatctcatacttgtatggtttgatgcagttctcgacctggtcgctggtgctgaaaaaccggtcattgaggatactgttgcaggcatcgccaatctgtttttgggcataagggtgggcggcaaaggtagagttggcgatgagacgctcaacatggctttggatcgcattcgccacaacggttgtagcaagtcggccgattccaagctttgtgagagacgacgtcgaggcgtcgagcttgcggtgccagtatagtgactccggatctgccttaggcagatcgctaagagggtctggctcagccatggggggagtcagatcgtcaattggccggttccaatatctctgtgccagaatgtccataacgcgctggtccaactcggcctttagcatttcccggacctggggacggccaaagctttcggcaaatgctttaaaggaatgcttgaagccatcaaggctctcggcaaggtatgactctgcgctaagaggtcggtcattgtactggaccttgaactcgtaagtcgcttcctctagttcctgactgatagcatccctagtacccgctagacttgatgccattgtttgttcaagaacgtgcattagttttttctgtaaagtcgagacacccacggatacgcctgactcagcgccgaattctgctgggtgggctgaaaagtaagcgttctcattttttaggattgcgctcgtgatgtttccacttcctctagagaatagagcattggtttgggggatgcgagaaacaacccccacgtaaccaagacgtagagggtattttttatctgataagatactaagccctctttccggatcaacaaggtccatcttcgtaatcacaccaatcgtcctctcgcccctagggtcgactcggcgacttgcccgcagagcagtcgagttggctagatcaacatctgcggcggagatggcaaggataacgttcggtggctgaatatacctgtcgcagaggtccgcaattttctgcttcaactctggtggttgatcgtgtccggacacctgaatgtaacccggaaggtcaataagagataaatcgggaacgtttggcgagtaaatatggagctggattgggtcgtcggaaacgcagtccttttcaggcacggccaaattaagatcggtcaacgtccgctggatctgtgaaaagtctgtgatcttccccagtccaagagcaggaaactctccatattctgcttgcgcatttggtgtgttgataagcgtaagttcgattggacgtcgagtaaccatatttgaaccctttggaaggaacttatgtcacaactatagccgc

SEQ ID NO: 10303 - DNA, 231 bp, Emericella nidulans
  unsure (1)..(231): unsure at all n locations
gcgtacggagatggagctcgatggcgttcagattccctacccctacgncagggtacactattaatagagtgattaagctatgcgtaggantntgataccttcgtatttccacgctatatatctggctatacatttgcgtgtatgcatcttcagagcaangntcatggccacncgttagttacccngttnnacaatctgtntgggggatccgcactcttcttatccggtcca

SEQ ID NO: 10304 - DNA, 2097 bp, Emericella nidulans
gcgacgcattttccgaatttcctggatgatccacacaagcacttcctcgggaacacgcgaccggggtgctccgtgtttagcggggcttcggacatatcgtcgcgtgacatctgttgcaccatcaatggagaaggcaatacaataggatattttgcgaccccatcctaaagagaaattagtccggagatactaaatgtctgggaggagataccgaccttcggcatagagacgaggctggtcccatgtctcttcgcatgcgtctacatgaatccatcgtttctgatgttcagagtagacttcagtccagacgtaatcttcggagttccacacccagcgtacacggccaccaagcgcacggcagaacatgctgaagcaatttgcccattcacctactcgaccccgtctagtctgcagtaactgccatacgtccgagtagcgagggaaacgttcgtaggcgccacaggacggatctgcacatctatacagttcgactcggttggcacccctggcggcctcatctggcgtcggcggggctctgccatgtgcaatcgtcggtgtaaggcatcgcgagcaagggggattgttgacccagtggaaaaaagaccgtttaaaccatctaaatgatagccgtggttagttataccaagatgtcgaacagaaatatgggaaacagcggctacgaaccttaacaatgcccggatgacacagtcctggtaaccccattcgggctttctcttaaggctccgtgcctgggcctgaataatctgacactcctcatccgcttccgagtacagcttgtcgagtgggatcaaggatagggcctcgtcaagaagaccggggttttcgtactttgttggcgttacggaaagaacgtggaggaggttccggaatttgaatgcattttgatcttgcggaggatatggaacgattggaagatttcgtagtgaaggcgattgcgatgatggttgtggttgcgcgggctgtgttgctggtagggcttgcgagggatgagacggttgcgaccgatagggggaaggagatggagactgtgtgcgagaaggagaccgggacttttccagcaagcgatcgaatcttttgacacgcatcaactgctcaaaagcatgggtaagctcggcgggatcgaatgcgtcggtggttggcgcccgccggctatggtgatgcttgccatccgccatggtgtaaagaccagcaggtggctaccaaatgtcgagtctccagattgagtgtctattgatgatttccgagtcgttcgttgtcgggtttgggtaaacgagcgacgagaatcgaaaggatcgattgagggcggttggcagggcgagagttggattgtcgaagggatcagggacggagagcgagacttgagaggatacggtcacacacagcccagccaggcggtcgctgtccttggcattaatcagcgtctcgtattgtaaccgacaataccgctagcgatcgacctccaaaaataacctaatgcgcggccggcgctggactcgacggggcgacaatacgacgataccaggtcgaaataagagctgggcgagcgagcagcaaatatcgaaatgcaagccagtgtcgggaaagcgcttcaaaaagaaagaaaaagagacagaaaggagccagagcagcagaaaaaaaaaaggcgcctggaggagaaattgcagcagcttccacgccagcaatgagggcgaagcgtcgtcagcctggggctcttcccccaatcacagccccgccaccaccgcaagccgcgtgtgtccgccctaaacaggcttagggcgccaagctcgaaggccgcatgctctcctgcgcttctctggggatcttctcgcgaaccacaggttttggcaataggagttacagatcatctccggcccagtggttgaagagtgaatatcgtcttgagatgcttggcattggtgctcgagtacgtggacatcggatgctcaggtgcggctcccgtcgtctgtctaacagtaactacagaacggggatttagatgctgtcgttggctccactatgcaaataagccccgattgtattcaacacatgagcttggacacactgtactccgtacag

SEQ ID NO: 10305 - DNA, 300 bp, Emericella nidulans
  unsure (1)..(300): unsure at all n locations
cgtcgcacagctcgccagtagccactgtaaggantacgccccagtcttcatcgatggagccgaaatcatcatcaatcacctccatcttcgtagctatatgagaccgtccactgcgaagttggcacgngtcaacgtgagaatcaggcttgctnatgacttacggatgactaggtcggctttcatacaatcgcgatactagntacgaagncggaggatactnttagcccaagttactncatcttgtcgttacgcagctcngcagtcctacctgacgctgtgcactacgttcagagacccagc

SEQ ID NO: 10306 - DNA, 504 bp, Emericella nidulans
cggggcgagattggctggcaatgtggccgcaatcgaccggatgaccgttgttccatacctatggtgcgggatgtgccgaccgagcaacgcaaaaggaagcccatgttagagcgtagccccctgagttgggcctggcagcatgcaggtactccttcccacagagtggaaacggcataaaattgtttatgctctcaatgattcatgcggagaatctacttctgccataaggccatggcgttcaaatgagtaaacgcgccgtggccactggcgaagaacaaacccggaggcgaatctacatacagcgacgtattgactttactccaggatcctaagttgcggagtaacacatagcggactagcacagcgcagctaatgtgtctcctgctctataaaggttcaccggataagcaatcctctccaatgaaaaatgttcaccgccaagcatgaagtactaaggtcaagcccacaaccgggagtacccgtctcgggcgattgctcacaact

SEQ ID NO: 10307 - DNA, 1999 bp, Emericella nidulans
tcttcgtctcggaagcctccgaagaatcttggggagatgcagtagtgtccgcagcgttgttgtctcctgctttcttcagaggctcctgctccagcgccttctccggcgccttctcacccgttcctgacggctcatctgtgtcaggctgttcttcctcgtcattgcttggtgtgaattcaatcgaaaagatccccttagaagacgcgccattgggcggtggactctctaattcagcagtagagtcttctctgtctgcggacgagggaggtcgtaatatcctgattagtgtctattgattagccagtcccttcagatggacgcagagcaaagacccggataatttcgattcaaccttcactcacactcttcttgaagctttcatccgttcatcatagtagtcggcgccataccgtcgacctggcggacaggtataattcgcgtgcgcaagggaaagaaacccctgtgttactgtcagccatcgttactaaaaggaaaactatatgaatataccgaggagagcttcgaagctaggacatgctgcagcctctggtgcttatcaagaaggtgaaggtacttttcaagaagcgcgtcgagggattccaagagatctggcgtggggtcgtctatgtgaagctgtttgaggtcggtatctggaacttctgagctctgacgagaagcaggaggtgtgggaagctgtttcattggccgaagaatatggacgcatgcaatgcacgcatcaattgtaagcaattcctcgggaagtgatgttgacggcgacgtggtgagttggagaacgaaggcagaaatgtggagggcggccggacagtccgaacttatctccgtcatcccgaactcaaaaaagcatcagaatttcccgaacgaacctcactgccagcactggtctagtgccccatattgtaagtctttctccatccttttgttcttccgcttccctacttgtggtttctgcgtattcttcacaacgaagccgttctccagcccaagtctattccgatacggagctcctcctccaacgccaccacctcctgttgcgacctgcgaatttgtgactaatactttatcgtagtagctatctcgaggggagtactagcaacacagcctgcgcgattctcgctctgttcgtctcgattccacgctctccggttgttgagctgtcgggattgtgacatcacagccactctcggtcaatccgacatccctgcacttcgcgatacaaccagatctgcgcgtgaaggggcttcttaatagttcgccgatacgcatacctacacttcatctccactccttaaactttcgaggtttcatgatgtctgtttctacgcttgcgcgggatactgccttccaggcgcggtctctggtaagtgcatatgccgattaagcggctggtggaaactaagtgtaccgtacagtttcgctctctgcttcgtcagtcttctcagttctcaaactacaattttcgcgaatacgcccttcggagaaccaaggatgcttttcgggaacatcagcatgagagcgaggaacggaagatacaggagttaatccaggaaggcttgcaaagtttgagaatgatgaaggttagtcttgtatttctaactctaaagccctctgcattcggagccgtgacaagtggtctcgggctatcccagcatggcggacaatgctaacgttagatttagaggcaaaccgttataagccagttttaccaactggataaattggtcgtagagggtcagaagacggtaagggccttagatcttaagttctcccctcaagtttgagtctaacaatcctgataggggaaggaaactggacaagaaggcggcattgtccgtcagaaggacaccgggtaaggcctaatctaccgtgtctctgtcctagcagcagctaatcgtcatggcagttgggactgatttataaaaacatatacctgttcggattacacgaaagctacttttaaagccgtggacctacaccacag

SEQ ID NO: 10308 - DNA, 126 bp, Emericella nidulans
tatatccatgccggaaggactattcgcagcataccgatactagcgagtcgggctctacaggtataaagcgagaccatgaccagcagtggcagacctcgcgggtagcggcgcagatgctgcggagat

SEQ ID NO: 10309 - DNA, 101 bp, Emericella nidulans
  unsure (1)..(101): unsure at all n locations
gctggctcccgtatcctgtcacctcatgcgtgagactctgttggctatctgncgcacctatcctgaantgctacgtagatgacgagataccttgttccttg

SEQ ID NO: 10310 - DNA, 1856 bp, Emericella nidulans
catttatgtgcagactcttgctatgagatgggagaagaataccgtgctcacagaaatcaatcctgacactggctgctacctgcgaacggaacaaatgtgagttaggtgagaaggatgtccatcgccaacacatttagattgtaagtgttatccaaatatgactgtgttgaacctgtatctggtgctcgcctctgttctttcggaaaaaccgacaacgctgtcagatcccataacctgctggattggggcatgaagataatgccagctgccgctcacagtcagtgctgctaaaaacgttcctaagcgcaggacatccagactagttccagagtaagattgcattgacctatgaatggcaaaataaatttacaaatcggtagttcagtgacccgaatacaatattgttagtgtaggtgtacggcaaaactcactacctttgcccgtttcaaatggctctgcttcttaatgaagagcctctggcattcgaatgcggatgttgttcgtttcaaaacttccctattggaactggatttccacatgctgactgccttgttttcttccatcaatgtagaccgtacactcggctgccgcgccagacggtaccatctcaagcttatagtatagctccttcttcttagtcccgtcggaacatctgaacgtcttcagttccgacgtctgcacatccaacgagcaattgattgtgcataggagcttcacgctcgagtccctccgtgtgggaggatcatcagcctcacactggtagatccgcacccggaagaagccgtcaaagtcccgttctacgatcttatggtagccatggctgacgcggtgcttggtggagacatcgtcgccctgttgacatgaattgatattgtcagcaccggcctaacctgcaaaatcagcacggaggtgctggagagtctgaccttgcgaatgaaccagtgcatctggtggtccgccctccacttctcttgatcagagtcccatttacggtcctcttctagatgttttgactcgtcgaaatcggtccagtacatctttccaatgctgatgcgggagattgtagagaccactttgatgctcttgtagtcgtaaccgttttggttgttggggttcgactcagataggtgtaggaaccccttgtagatggctcctcggcagatggccgtacgtctagacggtactatcttagtcacttctgccgttgatcggagtttttactcgcggctttattccgcttgattgcagtactgatatcctttccttggaatagcgctctttcagatgctcgtagagataggggctagtccctaagccgccaaccagaatgataccctaactgattagccctaccagcggcaagggtggttcgagcctaccttgacctgtaaggattcatgctttgctttttgaatctgcttatcgactaacgcgtcgatgcctgcaagcgaactggtaaaggcttgctcaatatcgcagctagataggctcagtaatcaccgccagccgtgttaaagctcgacaatgtcactcactctcgaaaatggatcctgccttgtttgatgtatggttgtctgctcaaatcgtcgagttttgacctctcaaacgcctctgccgggataccaacaatccaatctccgggggtagaaccaggcttgaactgaagcttgatgtattgttcccactcgcctctcatcaaatcattgatccccttcttactgagggtgtcccatcgccgtccaagccgtcgtttgcacatagtctcgaacgcttcgtcaatgagcaacccaccacataatccacctatgtatggcatcagcttatcgaatgccatcgaaaaagcgggttcctacccc

SEQ ID NO: 10311 - DNA, 535 bp, Emericella nidulans
ctagtatggtgacctaagtgcccagcgcaaaacccgagtcttgacggcttgtccaaaagaccatgtgtcctgtgctgaatgctgcttcgcccgcgcacggccttgatggaaagcgtagacctctgtatgagacggtaggatccttgtgagactgaaagtttactatttcatcgattgtgccgtatctgaagccagacaaccgacgcaacgtttggaggatgtgacttcgtcgccggtcgatttttcagactgactatttttgaggtaacgtacaattgaactgctcacaaacctgacctagactatttaaacgcaccgatttgaaagggacctttgagggaacttgtgaaagaaaagctaaaaaaggatgggcaagtcttttattcgcaacgcaatgggtgcttccatgattttggtgtccgcttaataacctccttccggaataggagctcaagacctggacccctctttattatctttttcttgtcccaaaaacccgttgtttggaattatgtttttaaagggggaccgccag

SEQ ID NO: 10312 - DNA, 1137 bp, Emericella nidulans
tggagggctcttgcacggtaacaatctgcgtatttcctacattagggcacgaaaggctgactccgctacagggcgaacatggcgtcggcttaggcaaaaaatcgtccctcaagaaagagctcggcccgaataccattggagctatgcgcaacatcaagaaggctttcgacccacattggctgttgaacccagggaaaatctttgatccccaaggttaggagagagtgtgatatagagttaatagaaacagacgttcattgattcaatttcacttgtaattctcggggaagtatgaaaactccggagaggtggagcatctgcccaattagagtgtctggggcctggctgactcaccgcggggcggatgactcccctccagagcgatatcgctctgtctttatcctggattgccacactcgtcttcttcagagcttcaagtcttgacttagtctggtaagtgttgcggtcacttctttgctgcatttttcctcgatctccttactgagcccagtacgtgcgcaattggacctttcttttgaccttgcctttggcaaaagttctacgactgccgggcttggccctgaatgagtttactgttaaatcacttcagccactgttctggtgttgtctctactctgtctatcaggagtcttctgatttaaagtcttcttaagaatttgactgaccatttgcagcataagctccgcctcaaatactaaaacaaggcaaaaatggcgtcgtttcccaaaaagaagtgcggtatggacaatctgcagtgtataccgacgttatatggtgcttacacccaataggtgttcttggtgccaccggctcggtaggccaaagattcattctgttgctcgcggagatcctttcctggagctacatgccatcggtgcctcagagcggtctgcgggcaagaaatacaaggacgcagtacgatggaaacagagtacgccaatgtctgagaagctcagcgacctagttctacggaactgcaaggccgagaatttcactgattgcgacctcgtgttctctggcttaaacagtgatgttgcaggtgatctaggtaggtttgattacgtatttgtagctcgaacgaatgctaacaagggctttttggtatacagaaatgga

SEQ ID NO: 10313 - DNA, 1906 bp, Emericella nidulans
accaaggatatttgtgccactcgataccgactggtctgacaatctaacgcttaacggcaagatcctacgttttgattcgagaacgccaaccactcatcttcgaaaagctggaggttctgtgacaggcgtcgtagacgtcgtccttcatgagggatcttccgatcctcgtcaggcaatcaagcaactcaggcaccctctgcgacctacgcatgatagtgcaatgtgtacaagttacaggatgttcgtcggttcatataggccaataagcatctgaatttcactctgaacaattgcaggtcgacaggttggagaatgagcattccaaacaaggcaactcgcgatcacggtcttcgcaagaagcgatagcgccactgtcttcttgtgctctgctgtcctcggttcgtcccgtctcacagcgaggcccgatgcttccgacgggagtaatttatccacaacaggcaagctcctgccgatcgatagtgaagtctatggcgttttcagtgattagtggaatcaggcctttaggtttcgcggacgagtatagagagccacgctattctttcgccgagtccctgcgatatcagcctaaagaccacgagacaccatcatcacaggtcagccacgacaccagaccacgttccattggcctctttcctcaaggatgcgaggctcattggccgcagcgtgttctgacaaccttcgttcggctacaggcaagtgtccgagcgcctagagatcagagttcagttcgcaattcccaacaaaacgatttgcagtatccctcgtgatgaaggctgggcattttctgaaaataatgagctaagattgacagccgccctacgtgcattctttagccaccgaggagcgtaccgaatgacacgacgcatgtatccaggccttcgtctcgcttgtcagaggggtacagatggtggcaggccggaaacccccttttgcgccctcgcttaagccatccagtcatttgttgccatcctctctcagcccacacatccaccaaatctcattcttatacaaggacgagaacgttcactaggtctcaagacgatccttaatttcctcaaccaagtgggtgtatgggatatgcagtgtgaaccgactactgcaggcctaacatccataattgtgatctagttgcgcaagctggcggtccacactatgcatagagtctcctgcacatattctccagatcttggagagggaaataatcgcgcagaggcttggaatgatacgctagttgtaagttccattcgccacccccagagtccctgcgactatcagaccctgaggagctgctccaaagacggcagcggcagcgaggatcagacccgaacgatcatgccgctgtcgtactgaatgcgctgcaagtataacagatgcctccctctggctgtactcggatggcgccgctttttgatccttttcctatcccgagtggtaaattggtcgaatcacataaacgccttatgactggccaatctctaaatgtcttggcctcaatctgatgcaaataatcttaaagcaaggacaggatggcggcggtcagaagggccggacaagcggcaacaccttacgactagtaatagctgcagtgctaaggcacactgcacactgccggcagcaccgacgcatcccagtaataataccgtgatataaggatcgcatcaggaatccctgtctgtcaattccaaattacccatgatcatgggccatctgtgttgttggtgcatgagatggagtagcctatgggagggctatcgtcgcatgcgagataatctccggctgttgtaggctgtgactaggacgcgagtttgagacccatgctgcatgattgatgattgcggggaagaactgaatcagcgcgcatgcgtaagagactgataagacacct

SEQ ID NO: 10314 - DNA, 1123 bp, Emericella nidulans
cgtcactgctgcaaatatttctctagccagcacaacaaccaagtcaaacacgtagcagagcagagcaagccaaattccagagacagtatttagaacaaaaaattcccccctgttttgcttttgtccgacaacaatcacgtcagttttaataccacacgtgactcatttgtgtcagtacggtcgacgaagcggccaattgcgcaaggtcacgggatctccgccttccagattgcccgacccaatctcaaaccccggcgacgataatgacgttcttcccgtcctattttccacctataaatcaccaattcacctacttcaccagccgcggcagctagcccggaaatgacagtgtcctactcgatccacgcaactacacgtgtatgagtcttcagcaaccatgagcgggaggatcctctcgcaccgtcttgttccgctcctgcggaatggtcttttatcgcgccatgtccacaacgccgccgcgcggacgggtggcctcctgcgagctgaaagtggtgctgcactgcgcggtcgcgcctggcctgttggggcaaactcgatccataacaatgtgcccgctgtgcgggcaatctctttcgcccggattctgccgaagcttgcagtgaagctgttgagggtgcctgcgatgttcgggggtgcgatggtcgctggactggcgtattttcagtatcaggctacacgtatgtgcagtcccagtttcgagaaattctagcaagctaacggttcggttgtagaggcgggcaattacgcaatagacgtgtttaaacgcgcgggggagacagcgagtgatgctgcgtcgggattgttccaggggatacaaagcgtcgctgagcagacgcaacgagggtggcagaaatccacagaggacatcgaggcacccgagtggttacagaaaatactacggtttgaccagaactcgcaggatggcggctcgtctagcggcggtggtgggcaatcaccgaaagagagccggacaggtgtcgctgctgcaggtgctgctgttggcaccgtctttgggcaggaggacgacgatattcgggccagaagggatgcggagaatgaccagatgatgctgctcactcggaagatgattagataggacacc

SEQ ID NO: 10315 - DNA, 1464 bp, Emericella nidulans
gactcaggctcttggttcctgcagctgccgatctggggtatggacagttcccaagcgctgacctcgatctctactcaccctgagcagggttcaccatgagctatggagtgttccaagagtactataccaataactggacctttgaaggagaccgtagcatcaccggagtgattggtacaaccgcaaatggggtcatgtatctgtcgatgccgctactgtttgccttgttcacccgccgatgggcgcatcgccgccaactggcagctctctgcggcacagcgatcgcatgcctcagtttcctgctatctgcgtacagccagaccatcggtcacctgctggctacgcaggggattacttcggcgctgggctgcgccctcatctacagcccgaccacgctctccctgggtgagtggtacagcaccagcaaccgcgctatcgcatacggcatcgttctctcctgcaagaacatcgtcgggacgacgtgcccgttcatgattcgcgcgctaatcgatgcgtacggctaccggaggaccctgcaagcctggacggggatcgtcgccgggacaagtatcgtggcggtctctctgatcccaacacacccttcgacggccggtatccatagaacccgtggacgcaagatcccatggaccttcctgaagcaccggtcaatctacttctacagcagtgccatcatcttccagagctccggctacgggatcccgcaaacctacctcagcagctacgccaaggatattgccctactctctcagacttccggaacgctgctactggccgtcttcaacacgccagggatcatcagctcgaccttcttcggctggctgagcgacaataagcggatccggctctccgctcagacggtgtcggccattccccccatcgccagtgcccttgcaacgctgctcttctggggcctgaccacccagggcaacatcgggctcctagtcctcttctctatcacgtttggtttcttctctggcgggtatagcgcgacctggggagggatgcttaagcagatggagggcgagtctgcggagcgcaatgaagccatcgatcccgggatgctgtacggtctgctgaacggcgtgagaggcgtgggctacgccagcggggggttcgccagtgttggactcttgaaagcaggaactctgccggccagtcagcggttcggctatggcacctcgtatggaccgctcattctctttactgcgctctcttcagcccttggcggttgggtggttctgtggaagtggaatccaagacgactcttgctgtttgggcgaggataggcagggaaactgaggaagtggaagaaagagagagacagaggaagggagggaggtatgctgacaatgctgcagcattacagccactgattctattgcccttatattttattattatagaataccccgcatgccacattcccggtgagcgtagaagtaa

SEQ ID NO: 10316 - DNA, 472 bp, Emericella nidulans
attataatgagcgggacggggatgattcaaggcagaaggtcttgcgtgcaagaaggcgccggtctgacgttgaccaaagcattggaaacgacgagcagatgcgctggactgatatcatgatggtgatcccaccacgcagcgagataggacctggcttgcggatcagggttctcaatgctgctgatatggggagaccgattgaggggaaaatacaaatggcgctgacacacccacccaggtgaagaaatggacagcgtgacatcaaagcggagatcgaactgatcgaactcaatttgccagggcaagggaagcgctctgaggaccgcccgtacagaggtgatctgaagataattttgtgaaaagttcttgaagggctctccgctaatgccatccctaggtgtacgatttgtactgacacgaccggatacccccgcgcagagcttctaactctgagacttgaattagtacccat

SEQ ID NO: 10317 - DNA, 1979 bp, Emericella nidulans
cccaagcccgctgtcggcttttgggacccttccctggagccggtacgacgtcaggtattcaccaaatgggcccgcacaggtacggctaccttttttggtttatttttagcgagtaagagctgactattgtccagtgttgctgctctgtacgttcatcctctgcgtcctgtccttgtactgggccgtccagttccgctccgatgacaaactgtcgaacctcaaagtatgggtagtggatttcgacaactcgcaagatggcgatgcgctcattgggcctgcggtcacaaatttggcagcgcagctggggacggagagccagaacttgggctataccatcaaatccgcagccgatttcgaggaccccgtcgccgtcgtgcaagccgtttatgacgagcactgctgggccgcaattatcgtcaacccggacgcaaccaatctccttcgcggcgcagtcaatggaaacacctcgtacaatccgtccgacgctgcgcaatttgtcatcatctcagcgcgagacgagactaccgtctcaagctacataacacccagctttaacgcctttgaactccagctgcgcgcacagttcggccctgaatgggtgcgcaatctcacccagcagtccacgaacctcagttcagtcgcgccccaggcaatcaacccggccgtcgcattcagcaccctcgaccttcgcccatttgctcccaccgcggcaaccccctccgttaccatcggccttatctacctcatcatcctgtcgttcttcaatttcccattcatgatgcccgtgcatgccctcttcatgaaaggcgagacaacactaaaaatcccgcaatggcttatctggcgtgtctgctccagcatatgcacctacttcttcctctcgctcttctattcgtttgtctcgctcgccttccaaatcccgttctcaaacgatccagcacccgacaccgtgtccgccaacaaccccaatgcctacggaaaaggctcgttcgtggtcttttggatgctcaattgggtaggaatgggcgcgctgggcttcccgcttgaaaacatgtcgatgatcctggggttcccgtacagctccctgtttttgatcttctgggttatcacgaatgtctcgtctgggttctacgctctagatgtcgcccctggctttttcaagtggggctatgcgtggccgttgcacaggagtatgttcctccttctctatttgatttagttaaatgctaacaatggtcgcagttgtcaatgctttacggacaatccttttcggcacgcattcgaagattgggctcgatttcggagtccttttcgcttggattggggtttctcttgcgctgttccctgtcgcgaccttcatcatgcggtggaaaatgcggagggggttgtaagcaggcaatcagaaccaaacaatatggaataccagtgtatataataaatgtatagaataaaatatatagaatatagatcgatagagtaatcagataagctaatattcgaaatctgactgcatgggcaaacaaaccattgagccgcacgaagcatcatcgcgatacttatcttaacacaatccttcatcgaaaactaccggcagccatgaccatggcaagataagaaaccgcaatcgagatgatgtaggtcaaaaaaaaaattgtcgaggcaaacaaacaaatatgtagataaacccattaattaaaccacctcaccgtaccgtaattacaattgaagtatatatccagcccatacaaatgcaggctcaatattatgatacaacagaagaccgacaaaagttcgcctgaggcaattcaattcgtccattcaggggattcaatccctcctctttctacatcctcgggctatccagacagccagtttgggatgctagcagaggcttcgcatacgccacacctcaaagcgcgagcagacaacatgccaagatcccagcccggcttgtgacgacttgtgagcagcgcgattat

SEQ ID NO: 10318 - DNA, 1772 bp, Emericella nidulans
gctacggattatttatgtcggcttccttcgacgcaatacgggctgccagagcagaagattgctgctgtgttatttcactatttgtttgtcggagagacgctgtcgatggccctggaggaaatatggaggtcgggcgggacgcatacgccatggtggtaagtactcggatcagagaagaattaaagataatcgtgaccagagttgactatcggatttcgaataagaagcctcggcacccgtagcttaaatgtttacctgggctagcagtagtgatataatacccaactgagctgacgtggagcactctgccgatggagttgacgaagcaagagcattggaagcgggtgccggcactttccaaaacaaaaggagcgcgagctatccctaaatagggtaatcatcaacaacctcagccgcccagcgaaccaggccgaattcaaatatttcccttcgcatgaaccttttatactttattctgaagcaatacttatcactcagtattccgctgccattccttgctgggcggagcatctgctcttactactagaaagaaaaagcttcacgagaattcgctcaggcaaccacacagcgcgaaggactatcgtttgtgccactgtttcttcacgaacatggctcgattgaatgagtcaacagcttcgtctgaacccatcgaaatctgttcgtcttatcaaggaggttgtgcaattaattgtgcctttggctgattcttctggtagtaaaaaggcggttcgtgcgtcaaaatcgcgagatagctcgggtgaactcaatccagtccctccgcattagaagtctcgagtctgaagtctctaatcttctttccgagaatgtgtcactcagggaacagattataaccctgacgcaggagctggagcgttttgaggcagcaagaacacttcatgatggtgtttatgatgtgaaagcaaggctagacagtaaactggtggagttaggcaatcttataactgagttgggtagcctgccacgtcgttactctagagcagttcgcgaaaatggcgagcctgctccagcgagacagtcaagggaatcgggtccaaaagaggttgatgacacagaccccgagccgaatctcggattcttggacgggagactccctgtcatcatggaagataagttatatcccagacgcacgctaacgtgagtgcacatatcaccaagcaaacaatggaatatcatatgttaacgtatgatagtgcgcaagaagtacaagaattacgagacagcgacacagatggtccgaattgctccgggttcgaagattcttctatatccccaaaacaaagagttgagtacgacgaggcggcaacaggcgggcccgcgtatttcatagacaccaacactattgtcgaagaaatcgagaacgaacattccctgcctcccaaccttgaaacaaggagaaagaagaaaataggcccggcaacggtaaacaaggatcaagctgatacacggcccatctcccttctcgattcgaagttcacgcgcaaatgtggagcaaagcgcaaattctcagcggaggacgacgagagcctttttgaatcgtccccatctgaggatgatgagtttcaattcagtcgcccagcccaatcgccaaaattattttcgcagaatgagcatgcctcagctgatgatggcagcggcgaactccgtcgtccaatacagtcaccaacgctatcttcgcagaatgacgactccccagtcaaaatgaagcctcaaagtgagaggtctatagctca

SEQ ID NO: 10319 - DNA, 824 bp, Emericella nidulans
cattcaatcctcctacccagccatcatgacgtcgccatcttgagactcgccgcccataatcctccgcatcacgagggcactccaccttgccactcattcttgccatgccgcatctcctcattccagacacgagcttccattcctgctgtcattcctcgggtcatgttgacgccgtcaatactgacctccagttctctcccccgatttttctcgctcaaccgaagagtgattggtgtgctcgccggcaaaactaaaggccgaaagctgaggcttcgagcacagattggggtcaaaagcactgctggcactaggggatgcacgatactgcctccgctgctaagactgtatgctgtgcttccagtgggtgtggaaataatgataccgtccgccactgcttcggtgagaaatctccctcccacatatacgtccaggatggcaagatgcggctcctttccgcggtgaagcaggatttcattcataacgtatagtccgtcgttctcgatgcctcggttgtgttttgaacatttatctgcttcaacagggtgcccatctgcattgaatagagcaaccttgagacggttccgcattaagattcgagctccccgattcagacccatagatttgccgcgaactgatgaccacccagtggtgccctctgatttatccttggcgttcgaagactgggaggtcgcgaggacagaagcgcgatctcccactcctgcgccagacatatacacttcgcggaatgcgcgcttatattcactgaacttccattcgccgagaaaccccagagtacccatgctgaacgacaacatcggtggaca

SEQ ID NO: 10320 - DNA, 1144 bp, Emericella nidulans
atgctcgtctcgatcagatggctccgggataccgtggtatggttgacagggcgtatgttggggttgcctttcgattttctcagccgagcggctttgcgcttcaggagcgtcggaggatgggtctcccgctggaagacgaggcagaagagcgaaactgcaccggacttgaaactgccttattagcgtatgcccaattcccttgtagccggtgatgagttgggtagaagcctaccacgatgatcaaaagccagaagttccaccgccaacccagcgaacgggacacgtaggctccaaccgctggtcccaggcaaggccccagcagcacaggcattgtccagactgccatggcacgcccgcgctcctcttggcggaagcaatctgcaacggtaccaggacctattgtcaacggagcagcgcctataagaccggttaagaaacggaagatgatgagcattggcatgctaacggacagcgcgcaagcgacattgcagagaataaatagcagggcaccagtatgatagacaatcagacgcccgtatagttcactgcagggtcccagcacgagaggtccaaatgcgtaaccaagcagatagatcgatacggcaaacgagccgatgtcgcggttcgaggtgcccatctcggccatgacttggttgatcgccggggcaaacatagacgacgcaaacggactgggcagcgcgtggccagggttagtcgcaacttatcgatagcatttgggagaggatcgcctcacgtcacgaaagtcaaggccgagaccatgacaacattctgccattttttggagggttgccaattgaccggcagctcaggatcactctcgccgtcccatttgaccatctccgagtcatcatcgtccgtcgtcaagggtccctccgtcgctgttcccttctcgctgcactcggccttgggtacttctgccagtgtgggagttaaagaaatgccctgctgcgggagctggtgatagactgtcctggagtcgtcgactcgctattcgaggcctttccttccatcgtggtcgcaagatcaattcgcctcgcgtgcgatataattcggagcggatggatcgttgatatctaggtcatccaccttggtaggtaagaagaaacaactacaggggttcctg

SEQ ID NO: 10321 - DNA, 128 bp, Emericella nidulans
cctccctgttctccggattcatgcttacgagctaaggttagcatacgacagattcgtcgacgatgatcccactaaaggatgcattccgtatagctcatctgtctatgtgaggttgacatcgacatttc

SEQ ID NO: 10322 - DNA, 541 bp, Emericella nidulans
ataatagacagcgtcgtggttctagagaggccgagggcgaccgtatggttgaaacctccatagaccgtatcgcgcgcacagggcatagggcgggactacccattaataggcatcattgcaacatgcgtagagacttgtaacgcaaccgcgagctggagacgcacgttatcactagctacaaacctgatagcaacaccattgggaccgagtatagcgcttataccgatgcgagggatgtagttgtcccggcgggtgaggagattcgaaaagatgacgaacgaaacttgctgaacatctatgccactcgctcaatcgtccggggcgataagatctacacagtatccacgacagatgccctgcatgaggcatggctgtaactgaagcggcttcgctccatgcatgctggatactgcgatgcagcatcggaggacatcgtccgtgagccagccaagcctactacaggagttgctgaaaacgacgagagcgtgatagccaacgcttgcacacttttatagaaatgcgaactcaagaccttcttctg

SEQ ID NO: 10323 - DNA, 2395 bp, Emericella nidulans
gttaatggtacaggtgcttcagcttcagcctcagcaacctcctcctccaccaccgcatccgccgcccccaccacctccccctcctccacaacctcctcctccaccaccacaccctcctccacctccgccactgcaaccaccagctcctccaccgtccccacctcctgcgcaacctccgctacaaccccctcccttcccaccacaagccccggccgctaccgcacccccacacgtccctgaagcacagttcccgggatgcccagactgaagattcatgcagctcggatccgcagcgtacgcatcacaatgcacaccgggatccccactgtagggcgcataatatggcacgtacaccgggtacccccacacgagcgggtatgcggcatatgcatctgcgccgtcttttgagcggcgattccctttatccttatcattagggtcatggtcaggagagggtgtggtgttggactttccatagcgggagttccgcttttatgcgcgccggcaaatccgctcgtattcggagcgaagcttgaggaatttcacacggttgggatctattcctgctacatctgccatggcattcttcgtcttgacggcgctgtgtgcggaaatgtgtggatttttgtctgggtctgaggagatattagggttgtcgtggagatttgcggccgcagagcgtgcccttgcgcctgaggagattggaagaaggatacggccgcggctgttgagatgtgcaccgcgggtagcttcgcagtaccagcaggtgcattcgctatagatgcccccgtccgtgagcttacggtacattttgctagtcccttcgaagccctcggagagtttgatttcgttgaccttgtcgtcatggtcgatgaagatggcgcggtagcatcttgtttggtgcggtgaacggagtattcgaagtagcggccgggtgtgagctggtgggtgtgccaggccaggtctacgtcaagggtcggtacagccatgcggcctgggttggcggccatgatctggaagaagacggcgtatttgcgaatcaggcgctgcattgtttcggtcagagctggggagtggagccagtcgatgttgtccattttctgaacaaacgtcccttgacgaacgacggcgccgacaaggtcaagggcaaactgggaactgttgctccagtatcgggacatcatgcggcggaaagcgatcttctcgtctttgtagagggtagttccgaggctgccagggttggcttgacgcatgacttccctgtcttgtaataatgtccccaggtagtcgcgcagcatggttacgctagggcacatccatagagttgatcgcaagtactcgcgaatatcccttctagtcgtttgcagaagccgattggggaaatttgcttgctgcagttttcgtcgggtcgcgctctgaggttcggggacaccccacaagttgagtaaagtgcctggcatgggaagatctccctcgacaagatccgtgatatcgtttctaaactttcgcacccgcagcgtatcgtgggtgattctgagcttgcagtatccgcagtatatgtgaaaattcttgtccgtaaatccagtccaggtatcatatgttctctcaaacggaagagttagcctccctttagtccaaggtgcagaatttggatgactgcagctgggacagtctagcatcttcgaaggcatgtccttgaggttatcccattcgaggttggttttgctggtaaagatgccggccgcatcacccccagcgtcgtacaccatggttctgtcgtcgatggaggcattgatggcttcccatggaaatccggcagaccagaaactgatctttccgtgtcgaatgcagtcttccagaaaagatctaggattgagcatatgtgcatgccaaaccatcaagacgtctaggtgacagtaagcaactaggcaggtgtactaaatttcggagatcagggactgacctaacggaggcagttgatcccgggcccaagttaaggaactttcgcaaaccgtgattactccgaatgtaggagaggaaagttgctgaacagtaggccgtgggcgagaggctgggacacatgcattccaccaagacgtataacgcgcaacagccttggccgtataaacagcccatcgcttttccttgacaagagcccaggcttcgttaatatgagtaccaaactcctgtggattggggtcaagtatatcaaagaggtttgggatacttgttactgtatcacgcaggtcggacagcgctgcgagaaatttaaggtgagcgatgcactcatagtgagtgacggtcgtatagagcgcaggtccagcattctgggtcaaattcaatggggaaagtcccggctgctgttcctgagtttgagcatagtctgggagactgt

SEQ ID NO: 10324 - DNA, 218 bp, Emericella nidulans
  unsure (1)..(218): unsure at all n locations
ctacttcatatattcatttcttgttactgtcatcctatgatacgcatctctagactgttcgcttcatcacaagtccgacctttctcgcagatttggtcgagacgtncggaagactaggtgcatcctnactcatcccatngtcgtgtatatggtttcgctnggtcggcaggctttatattcgtgaagcgagcgtctgngttgaggactcaagttagatc

SEQ ID NO: 10325 - DNA, 1210 bp, Emericella nidulans
ctcacgcttatcagactgctgtgttctactgtgtgcttcgcataaacggtctctgcgtcaagactcggattggtctagataactcctctggcactcctgattccggttgtgtagcgtctcaattaaccatcctccggccacaatctctttcgcgattaatcacccgtcacccaacaatcgtccttttgagtgtagcatcacaatgaccaatccagctgcggggaaagaggcggagaccaaactacagacgctttggcctgtacactgtgtccaaaaaactcccggggccgacattattcccgaactcgatgttactaagattgacttattcgtgacaaagggtatgcatccgcgcgttgaaatgtattcagctttcgcagatgccttcggaaaccaagaccccgcaatagtgtctgtaaatgcggatctacgatcttttctacatgacaggggtgtcacggatgtttttgtcgttggagtggcgggggatttctgcgtcaagtacacggccttagatgccgcgaaagcaggctttaggagccatgttgtgcaggacgctaccgaatgtgtggtaccagggtccggatgggaggaaaccgcacgcgaactagcttcagctggcgtgtcaattgttcgatctgacggccctgaaattgttggtcttgcctgaccgctttagagcattttgttggtcagatacagctagtcgacgtagacttgcttcatgtggcgacaggtagcgccggaccaacggcatgctaatgcatgaccgttaagtagccagcaattatctagagctataagttttcatctccttcatttccgtgtgcaaacaaccaccaatccaccgctcctgatagctctccactatggttactgatcttctcgatactattgatgatggtgtgtcaatcccttctagaaacgcctctggtgcgggcctagaggcggcaatgcccccctccgcccgttgggtccaataatggtgctcacaaatgatctccgtaccctgtatcccttgatccataaacttccgtcaagctcgccgttcctctgatgttcctatcaatcgtaacgtggatcatcaacgagtcaacgacaccatgtccaacaccatcactatcatgactgcgggggcggaacaccctagggaactgagcgcctctctacggacctcgaggggcagcattccttactggaacgtcaatgt

SEQ ID NO: 10326 - DNA, 1235 bp, Emericella nidulans
tataatatacggcgcttactgcatagatcatattctggcagccacttatcccaaccggccaaattaggcgtttatcagtgaagtcagaccccgtagagatcagcatggcgaactatgtcttcttatttgttgagcccgtatggcgcccactttcttttcccttcttccctctttttattcatacttttccaagctgatgtctgctttacgacgcgtaggccgcgacggaattttttatatccttcctaataccatctctcctggatcaatcgcaactctatcttctgaaaccaccgtcaaagttactaaagcacctactctagtagtccgtacggattaagagctactcaacagagaccggagggtcccactatcccactggacgccatgaccatgacccatattccattgacccatcgcacatggcgtcggaatcggagcccagccggccggaatttacccgaaagtcttgtcctccccgagcggagtttcaagctctcggcaactcgtagcgaaatggtagcgtagtacgaagtacgaagtataccgtatataaggcgtctctccgtcaatctctcaattcagattcctcaataatatcgagtccagactcggcagtgccgtctctggcctacttccaacctacgcagctaaaacatggcaagcggccattatctggcgttcattccgttcacctcgcccaatgtaaacggtccccggtacgaacgctctagtgaatagtgaataacttcgcatgtgggtaatcctcctgctgtcgagagtgaggataataccttgctgatggctgttggctcttagggatgcccaattagtcccaggccttggtatatcccctaactggccggtttgggacggactccgctggagactgaagctgccttaaatgcaacccctccctttccaaacacttgtagcttcggggagcctgcctattatggcccttatccggtgacgaaatccggaaattgtgtgattccgaacacattgcaggccgacaaatctggcttttgggtttgaccatgccggttgcggaaaagacaggcctgctatgggcgaagccccaagccaacttgaggccctgggtccttttggggagtgaaaacttttcttttgttggttccaaaacggttttttttcctctcccggggaaaactcttttttaattctcctggagaaacgcctaatttacctgggttttaaaatcccccccaaaa

SEQ ID NO: 10327 - DNA, 106 bp, Emericella nidulans
cgtgcgccgaccacgcggttccccgctaactgcgctccggtactgaaggcaatgaccctgatgaccctgcggtatccagcgtcaggtctgccgaatccgcggatcc

SEQ ID NO: 10328 - DNA, 1607 bp, Emericella nidulans
agagagagtgtaggcggagatggctcgcatcgagcgtttgggttcgagtttgaggtcctagagattttttgtcgtgataggaaggaggtcgctattgatgatgcggaggcgtcagaggttgatgaggagaagcggagacacgcgagggggatgaggcgtgtaggaagcgttctcgttgtccccctcgttactggccttgagatgagcatggtgtacgttcctcgcaattggtcttttttacaggtttgccttaattatggctttgagttgcttggatgtattaaagagctatcttgagattgtggggagatagctcaagatgcctcggctgctaattccgagaccgagatatagcatacagccgtttcccgagaaagcctttatacttccccacgcttcgatcctacattgcgaaaactgataaagaccgttgataggcagagcgaaattgtatatcaagacggcaagatatgtctaatatccaatgccagttgggagctagatgtctacagcttcacctgcccggcctgaagcctactccattcctctggcccaaacgggaggtacgtgtcgccctgaagccagtacagcttgtctctacccccaacacggctggggtcgacgccctcagtccgtaacacgtgcttctgctgcttgaaatttccggtggcctgcatttcgggcgtgacgcgcaagaagagcggcgccgcaaatcggggtaggttgcgcaggacgtgcgcagcaacactcttgagtgtttctgtagagggttcaaggagcaccgactggtcggctgccttgatttgttgattaaacacgacggccgcgcatcccgctcggccatcggtgtaggcaacagcacaccgtacacgttggcctcgtgcacttctgggtgagtccccagcacctctgccacttcgcttgtcgacacgttctcgctcttccaccggaaggtgtcgcctagacggtcagagaagtaccagcggccttcggtatcccatcgcatcatgtcgcccgttcggaaataagcatcgcctttacgcagaacgtcgcgaaccaccttgctgtcactcgctttcgagttgcggtagtagccctggaaggtctcgcccgggtcggccggatcaatggcatacaggagctcgcctgcttcgcctcgcgggaccggcttgcagaacccggtttggggatcgcgccatggttcctgtgattcctggtccacctcgacaatagtaaggccgcgtccaagaagccatccactaagcacgccagtcgtccaatggctccggcagtgaagtcatttgttgaatagttccatgttccgcctgggctctcggttgcagcataaaattcggcaaccgtcggcacgttgaagcgctccttgaagcggttccagatatccggccgtagcccgttgccgtatactgctcgaatattgtgctttttgtccaggtcttcgccagtaactggatcggtttcaccgggggtggcgagcagatatcgcaaggtctcacccacgtactggatgaccgtggcgtcgttctcgcgcgcttcctttatgaagtttctcgcggagaacttgcggccgatgatcagcgtagacccgg

SEQ ID NO: 10329 - DNA, 1026 bp, Emericella nidulans
agaacggtatcagtatcttgttcaggtaatactacatttgtccagacctaagcccccatactagttaatccccggatcagccccgcttagcaaacgcccaaatttccccagagaaaaggagtcaagtcgcccacttcaggtcgtagtctacttacctattttttcagtaatatcttgtgcaccagagcagcctggactataccccacgcccatagttgataaagttctaaccatgacggcaaacctaaattcaaccacggaatcccatttccacttctcaacggtaaccggcatattcctccaagacgaagagtccacgaaccccgataacttcaactatgtacgtattcgatgaaggtaccgttctcaaaatcatggggaaagttaaactaacatatatattctcatttccattgatcaggcatcttctaacttcggtctcatcaatcgccgctacccctccgactctgactctagctcttcagatgcagagccagagacacaatggccccgcctcgcaacctacataacatatttaaacgctaccgcatcacaaggaaccgtctacaaactccttttcttgggtcggcacggacagggcgtgcataacgttgcggagagccgctacggaaccccgctgtgggatgtaggtgcctacatcctttcaagtccactatctgttagcaactgaacatggaaagctaacatacttgtatttttgtgtagtgccgttactcccttctgaagggcgacgagcacggagactggttcgacgcgcatcttacagaattgggtatatcgcaggcgcgagtcgcgcacgaagcatggaaggctcagataaaaaatgggattccagcgccacagtcgtactacgttagtccgttgatgaggtgctgcgagacggcaaaggtcacatttgaaggtgtgggactaccgggtacggagactggcaactttaggccggttgtcaaagaggtatgtcctcagcttccgaggaccctaattcttacagttgggctcgagata

SEQ ID NO: 10330 - DNA, 830 bp, Emericella nidulans
cgctttctatgtcaaccgtcgacctcccaggccacagacaagaagaccttctttacacaaacattcagtcgctgtaatcagactgtgcagagagtgacggtactcgagaaccagcatggcattgaatctggcccgccgcacagcaatcgtgaccggctccgcacgcggaatgtacgccaggcctgccccatatggggtccccatacctcactcagcatcaccatgggactaacacgaattcacagaggcaaggcaatcgcctcccgacttgcccgcgatggctactccgtctgcgttaacgatatacccagctcccaggcggcaatcgaggcaactgtctctgaaatcaaatcacaatcccaggcaaatgttatcggtatcccagcggacgtctcgtccgcgtcgtccgtctcctctctcgtcagagacactaccgagaagctcggccctttgacgctcatgatcgccaacgccggggtctcgcaggtcaagccgctgctatccgttactgatgaggacatcagcagcgtgatgtccgtcaacttcaacggcgttttcaactgctatacggccgcggcgcgacagatgatcgctcaaggcgaccccaaggcggccgcgggtgtcgaggtgtacaagatcctcggcgcggcgagtatcgtcgccacaagccgtttccaacaatggggatctactcagccagcaagtgggcggtgcgtgggctgacgcaggcaatggccatggagatggcgacgacaagatcacggtgaatgcgtatgcccaggtatcgtggacacgaagatgtgggaggcgattcgatgcggattgggaga

SEQ ID NO: 10331 - DNA, 182 bp, Emericella nidulans
  unsure (1)..(182): unsure at all n locations
gcattatactcatcaaaggctagagttggagcgatagcaaaccatttctagacgccatctacgactttttagacatgcaaaactagttagatttgaagacngacatgaaatacataacgcctgccatccttgatggaaatgaagaaagacctaaatttcggattctgccagataactcgagc

SEQ ID NO: 10332 - DNA, 1499 bp, Emericella nidulans
gcccttttaccgaagattccgtataactgggcagatgtaccccgcgattggtgtaaaggacttcaatgttgggaacatgggataaaaaaattgccttgtttaccgaacaggggtccaaaaggaacgcctgtgtagtccagggcccatggggcttcctcaggggtaaagagcccgcccagggcccaaggccggctccgcccccacaggctacaggacccaaggagaaaagcctccctagtcccagaaaaagctaaaaggctaagaacgcagctgcgggtccaagggtctgctcagcgcatcagaagcaagcagggtgctaagggttctgctcccaaggtcgctgccaagtctcgttaagaaatgaataacggttcggcttgggattgggtgcggaaggcaagagtttcatggacgaattttgggaggttactggagctggaatatgtgttttccctaccaccaaaaatgaaatgttccaaaactatcggcgtgcaagacggcctcttacgggtttaacggctctcagataagctctatcaatcgcgccacggatgcatgaatgaagatccagatggccgcgggatatatcgtgctagtgtaattcctacatgatcttgctgttcactccatgcgcatccagatattccaggggtcgactgttaattgatatgcctgggcttgagactccgtagacgcccagtcaatgtgcaattaatacgagggtgctgttatcggcagcaaccttgtacttctccataagatgggggaatgccatggacctgagtgatcaattgacgcaagtctcccataacgcggcggcttgacctaaaatccatataccgccccgttgagcctccgcgctccagagtcctgtcccggaatagggcacaaacctaggctaacctaattcgtcgtccgcgtctgagttcagacaaaagaacttccaagtatcagcagagtacgctgatattgataagtaggcaaacataagaccaataagcaagtagaataaaaaattataaggacactgcctccataaagcgccctcccaagacctcagggacaaaacttctcaagtggcaattcactgcctcaggccgtgtccagtgaagtgacgaagcgacactgttgcctgctgactcagccgctttccgccctgccgaatttgccatctcgcttacaggtcagcactagcgcgattcgcccacagatgctcagcgcaaagtggtgactcagtcaaaccccccctacaagattccacctcgatttttcaacttcccatctcgatccgacaagttctacatcgccagcagccatgggtaaggttcacggatctctcgcccgtgcgggtaaggttaagtctgctactcctaaggtgggttatttctcttctctactatatcgattgccccttcgctgtgctagatgggaaggaagtcttcggtgggacttgtctcgtctcctctccctgagataggcaagaagagatggaaaatgga

SEQ ID NO: 10333 - DNA, 517 bp, Emericella nidulans
ggcgatggttgccttccactgcgggtgggggtccccatgaatcacccactaccgattactccgatgaaaagatgtttactactctgctcctttgactccctgctagacgcaaatcatgtgtaaccggaactacactgattacaccagctgacaaaccgatgacatactaagtggagctagtgcctgaactcagacaagcttgccaagactacgaacgaaagatgaaaactatctgcctaactgaccttctataatacacaaagtgacattgctagggccgacgtcacgacctcataccataaggataagcatgactgcattaaggatgggaccacccaccacagtgatattgacagggactgaatcctacagcaccacactaaggtcgatcgccgcggctatgttagcactgaccatgaatgatataccagcacatgtaccggctgacatttaggcaaagaccgcggtccacccccaggcgtctatagacttctctgttggtcagagggaaacacct

SEQ ID NO: 10334 - DNA, 596 bp, Emericella nidulans
  unsure (1)..(596): unsure at all n locations
ctataactattgtatccccccccccgcatttattctttatcaaccccatccataccctccgggggcngggtttcatttaaaaaacgcttggggaactaacactcaaccctcactaagaaccccatcccacatataatgtaaatattccccccctattcgatctgtgcaaattcaatccttctttttaaaacgcattgcattcaatcttccttactacaataccaatccgtatggattccggccgcactcaaacacaatctgcaaaatattgactgaatttgccattatcttgaccaccattcccatcataattcaaattcttatatccttctctgctctccttaaacacatgtacaaaaaccaattcattcctcatccagagatcatccattcggccaccccttaaataagccacctcaatttattctccccgctaattattgaaaagcaatggtctttctacctattccctcatagaaaaattcttactcttaggctccctatccctttacatccctaagagcccaaatatttaacccaaaccctactccaaacttaaatattatctaatatcttcaacaactccataaacctcc

SEQ ID NO: 10335 - DNA, 1778 bp, Emericella nidulans
atcatagagacaaatgttgggactaggaaataggggagaacaagccgtgtttccgagtcaaggagctacctcaccaatggggttttgtgataacagcactgggacgcgacggttagctgctccacggcccaccccaaccccaaatagcatccaaatataggtccaggacccaactgtcaatgaatcaagttctagtcattgaaagccctgtgcagctcagatgtcgcaatcaccaagtgatcgaatcctgactcgcgtggtcccggccccaagggtcaattctttgccttcatatgcaacatttgggaaccttgaggcatagcaagtatcctttcaccactctcgcgcgtacctactaaaactcggcgatttggataccaggtccgaatagcagtactgcgcttcggaattcaatttcgggatttccgacaactccagcaaatatactccgtatggagagtcgatctaattcgtacttgcaatcccgttctgtaactgttgagcctgaaccaagtccagaatcaggatcaccaaggtacatcggcgaaggatcctttattgaactacatgttgcgctggtcttggtttcattccaggctcatatcttacttcagccgcccaccgcaacaaatagacggcatgtttccctcccatgttgacgcacaactccatatcagagcttcagatcaaaagcatttgcgtcgaatgctcataggtcatagcacatggttaagggtcggtccgttgtggatcttcacccacgcttcttcgatttctggcttcatggcatgccgtcagagttcacggaccacgcgaacctttggaattaccgactgacatcggaataatattcccgcatgtcttggtaccagatccaccgaaaaaatgtccatctgaaaatatgactatgagtctgagcatactacggttcttcgggatcggttcttgatgcgttccgttgagatactcagcctctgccgtctcaagtgcttacctcggcatagcgtatcggcctgaggcgtactaccccaggttgtaacgtaccctattgccataacggaacttaatagcgacaacccacgcttgatcataagcctctgcccgtctttcagcacgaaactttgcggagaatgcagttttttccagtcgcgtcgctgggcttgcccttgctgtctttttccggggccactaagagatgcaccatgtcttgacatgggtactgataatgttgccggttgcatggcgcccataaccaataaagcccctgcctgtcccctcctacattcaggaggcatcaggatcctcctctatcaatgacgtcccgctcctggctgagcggcctcatcgggtgctcaactgtgggcggctaggtataccgcattgagagaccaggtagtagcagagactagtagtgtccagcaatcgcgcaagcagacaaaagaagagaacctggtgacccatcacgacaggggaaccaagccattaatctattatgattccgcgaacgtggagctctgcggattcgcttatcgacatcttcagctagactcggtcggcagagtccagactgctagaatacgaggttaatcagcggccgtcccctcctgattgcatcctttgacgtgcttatcctcgtatatatcttaccccagatatcgttaatgcggggaggggcgatcggctagtgcgagtcgaaccagcctcggcatgtctgacatcactgtcacggtctcatcaattaatctaggactaggtggtgaggtgatagttgttcaaga

SEQ ID NO: 10336 - DNA, 1106 bp, Emericella nidulans
gcattggcagatgaggggaagacggcggtgcccctgacaaggacgagttcgctcctgctgcaatctatgtagtaatcacgcgtcagatcaacatcgagcccctcttgcgacagataatggtgagtaccctgctttgtgtacttgcctacctgcctacctgggcagtcttatctcggggcccatctcaaatgtcaccccaattccatgtgcagcccctatttctcatcaccgattgttcctgctttagcaatgatccagattcgccggaatagtagggcatactatgagagagatgagctccatcggccgtgctagtgattgttggttgtttcgcagcttggctttctttgattccttacaagaagaggggctcgtccaaggatgcgagcttgaacgcaattgcaatcactacaacgttgatgaccgggctgataagggcagtgcgaggttggtgccagtgaaaggagagattgttgagacgcggttccaatttcgattgttgcggaggccggaggctcccaggggtactgtgttgatcaacgccatgttatttgttctgtgggctgccttatggctttgttctcgtttaatctcgccatcttccgccgtccttgaggttttcgaggtatatcagcctgtttcttcccaaaaccataatgatacttcttgcaacgaggagattctgctcttgaaccacgtatttggttacagttatgggcagccgtttgttggtaaaaccatctggtcccactggtccatgcacaggtaaataatttttgttatccaggctactatgaccctccgagctgcgaatttgatacggtccgcatcaacctcacggtcacttccaagggtcgacagttcgaccggctagcacatttgtggctcggggatattgaagtatttcgaacatcgactgcagaacctacagcggatggaattatttggtcctacgtcaaagatctgtcacagtataaggtgctgtggcaggagcccaaaagctcatattcgatctagggaatttgattgacgatacatacactggttcttttaatgtgactttgatggctcgattttcgcatgagaagaatgttagattagcagac

SEQ ID NO: 10337 - DNA, 927 bp, Emericella nidulans
tagagtgcgcgactaggaacggcgtcgaacctcaaacagctttaaagagccgttaaatcgatggattggaatatccgaggccacaaacatcactattgtccctccacaccttcaacctggccaacgctatgaatacggaatcggcgtggactttgaatcgcgtctcttcttcaatacagtaaacgcgaaagaagatgtcgagtggctgcgctacaataacgtctccaaaacatccacagtacaagcggacgaccgggtccctcgcgaaagccgcctgttgctcccagacgacgtctccgaccataaactcggcaatcctttcaagcagccgaaatatagcaagaacgagtacgtcaacccgccctggaacgacaccctcgacgcactcccagccaatcggacatggagtaatattcctctcttaacaaacatccactccgccgaagtgccggctctcattcatatgaacgcaaaagacaagggtaccgtgcgtgacacgtggtggtcgagaatgtggtacgccccttgggctcgcgctctcttgcgcaagtacatgcgctcacaaacgggctttgatgcggcgcagcatgctctgctggaccagaacttctgggatgtgcgcggtggcgttggcggtgtctggacagataagggcgagtggatagactatccagaagtctgctcaggttttgagagggaccttttcgatgatggtcttggaccttttggcgaggaagacggaggcgagtatggtggaccagtttataaccagtggggaaatctggtgaaggggagggaattctagtctacggactttgaaggattttttactgctatattttatcagcttaacacccatggtgagctgcatgtttggcgttaggctgtctgcctgtgttactctgttatattatggctggcgtatgg

SEQ ID NO: 10338 - DNA, 207 bp, Emericella nidulans
  unsure (1)..(207): unsure at all n locations
atagtacnntgatcgcatcttgtacaggggataggaaatcgtgagatgcccgtaacagacacaatggggcaatagcnntacccgtctcnataanttcgataggcntnnccccggttccaaaancgtcggacagcncgannctatgtccntggttacacaatctatgncggatcccgtgtgggtcactcngtatttctaagcagtgtt

SEQ ID NO: 10339 - DNA, 485 bp, Emericella nidulans
ctggagatcatcacaaatcgcggcacagtcaacgggaagcaattcctcaagcctgagacagtcgatctgatcttccagacgcaggctgaaggaatcgatctcgttctcggtacgccattgaaaatgggcatgggctttggtctctcgaatggcagtctcgactgggtcccaacaggaaagatatgcttctggggaggatggggcggctcacttgcgatcatggatctggagaggggcatgacattgacgtatgcgatgaacaagatggaaaacgggacgctggggaattcgaatgcggaggcttacacaagggctgtttacgaggttattcggagacagggaattgggaaggcaagtgagagtgcgaacacgaacgcaaatctgtaggccagaggcccagcaatggtgaaccttgaatcctccctgcagagtgtgtggataacgtacttgggcgtttctctttctacctctcttcccatttggta

SEQ ID NO: 10340 - DNA, 888 bp, Emericella nidulans
ttcaacgtcgctcccgtttcaaaactagctcagtccaaggcttggcctggtagcaccagtcgggcccttgccaacggtctctgaaagcactttcatccagccttccttgtcggccgcgctgtcggcatagaaatctatgacctcgccgttaccgaagcggatacggaaaccctcctctacgaacatatacccttcttcctcttcagcaaatgcagacttgcgtcgcttgccacctcgcgccgttgtctctttttgtgtcaatgtgctccgatcgtcaatgagtttgacggccttggctaggtttatggtcgcacggggctggcgggtggtttcgtggtacgcggtcaatttggagccttgaagcttgaaaaatcgacgacgccagtactgcaaaagtcagctaatatgattccaaaaaaaaggttcgatgagccgaacttaccggacaatcgccaccttgctgcgaaagaaagccctcccagctacgggttgatgcagtctccgcctcgcgcatctcccgaatgcaggcattcatgctcttgggcatgtcttcatccttagcacccttgggcttcggaacaaataacagctgcagctccagtttaccaatcttgtaaggggggcggcgctgggacatgccgcttgcggtgctcttcttgctctttacactgctcggttgctcgtcaacagcccactcgttaaagcaagccacgtcgacagtgtacggtcgaccgtacgcgtgcttttcatgatcgctgagagcggtatatgcacgggcgaagctgccatctgaagcgacaagggtccgaaggcgttcccaaattggagcatttggatcttgttttttgtgctgctgcgacgcgagctgctgcttcatgtcaagttcct

SEQ ID NO: 10341 - DNA, 2783 bp, Emericella nidulans
cattacaatacattgaagagcagtcacggattttacgagatgcattcaacaaggttgagaaaagacagctttctaaaacctccacgtttctggaaaacttgaatgtgaccgtggtcaatgaactaaagcagcttcgtgagcaatacgaccaggcgtggagaagcgtagcgctggaatttgagcatcagaggattcagtaccatcaagagatacactccctgagtgctcagctcggagttctcgctgatgagatagtgtttcaaaaacgagtggctgttattcagagcatcgtggtgcttctctgctttggtcttgtgcttttcacccgcggcgcagttggcagctacattgactttcccagcgtgcaaaacatggtctcacggtcatacagtctacggccttcctcgcccatcttggggttcgggtctccccctggaagccccggttcgacgcgaccgacatcatcttatcgtaccacccccggtcatcgtcgacaggtctcacaagactcacaggacgggtcagtcagtccaactatgtatgcccctccaaccccaacttcggacgacttgagacttggaccagacgaacgagggactacatctccatccccggagggagctcggtcattagctgagggcgcacccccgttgctaagatcgaacagtagcccacccgatttgaacggagaaaatgaaggagggtgcgagaaaaaccacgaggacctggactctgacccagaatgttctggctttgaaactgggggcgatgacacgttggcagagtgaggctgtggatagattgtaaaatatctatatacacaagtaacaagtaattgcacctagagcctaaataatgagaccatgacggaatgatttaaaccatgacatatgtgcagatcgccggtaactgtcatgatgcaacaatttcaatgcccgacaagtgggttcctgaaaatagcgcgttgccatgacaacaatctattgtgggcttctctcggtttttcttgaacaatgcaggttgactctcccacaattaccactgtctctatcattgatctcaagaccctgaaggttttttttccattatacagctaaagaaacttcaatcacaagcctcaaaatgaactctaacccgctgactgcccgctcgcccaacacccacctcgccgtttccaacgagcaggacctgaagaccgcatcatcaaccaccgatctgatggactaccaccgtcagaaactacaggggaagattgagaaccaagacaagtacgtttttgtttatttgactcagcgagactggctcatgttggcagatgggaaagaaatctgatgctaacgcaaacctttagacaacaagcaagttacgtctctccatccgacgacatcatgagtccttgttcgaagaagttgagcgatctcaagggaaagcgatttaaaaagtatgtcaatatgtgacttcccattccataattcctcgcttcctattctgcctttttccgtgggtgatgctaacaaagtggcctctcagcgccggaaaaccccaatcgctcttcgccaaactgggcaagaagaactttgaacaacagtcgtcagccgcggccgagaataccgagaagagcctttgattcaaattggttttgctctcttgatgtttacatgtctggctggcgcaggtcgtgggagttgattttcggtcattcttgccttgtcttgtaataatatgactctgggatggttggatggattgatttttgggattgtttcttgttttacttcctgagatctgggacccggatggcttggttgggttgtttatgaattctaatggctcgttactgatatcggggttctagccgatagtctattgattgtgtttctgataatgcttccgatggtaaacgacttggtcaacagtgccgattgattcctctatcggcataacaatgagtcatcaacctagtttgcaacttaatccagtgtagagcaagacggtaaaggtgatggttcgctaacgcagccgagattgacctcggcttctccgcaatctgccatctccaagcttgaccatctcgctgctttttagcctcctgccccccacctcctttcttcctccacactttctatccttacctccttatcatttcactatcatgtctgcctcaactagaattccccctatcgctcaacccttcgtcagcgaccgggccaagaagaccctggatctggtacttccccgcaccattaccccggcttgcggcctccactccgaacaaccaaaagtctaaccaacaagatcaggtcgaagaattcgtcgagaaagaatgcatccccgccgaagctcttttttccgcgcagctcggcaccggtgagcaacgatggaagaccaaccctgccgtcatggaggagctcaagacaaaggcgaagaagattggtctatggaacatgttcctccctaaaaactagttctcgcatggtgctgggttcagcaatcttgaggatgggcgtatggcggagtacctggggaagagtcaggttgcgagtgacgtgaacttccccggatctggactgggcggggctatctcaattacgtctggggtactaagatgtcttctggtaggctacgaagaatgccgcgcctgatacgggtaacatggaggttttggccaagtacggcaatgcccaacagaaggcgcagtggttgacgcctctgctgaagggaaaaatccggtctgcgttccgcatgacagagccagatattgcttctagcgatacgacgaatat

SEQ ID NO: 10342 - DNA, 555 bp, Emericella nidulans
tggggttgctatcaaaagaagacggggtcagtacaagcggaacaaatgactatattcgatagtacggcagttcgagctgcccacgcaaagttgaatgaagagtacccggtctagctactcattaacaatgtcattagtttggctaaatctgatggaattactactgggaaacaacaagaaatatctgaaaacggcaagaaattgtaacgacaatagaacattccggtaactgtgaggaccttgaattgcatgcagcaaaatatgatgaagaaaaaaagtatatgtacgaatcagctagaaacactcattatctagcttcagttacgaaggcatacaggaaccaggtgtttcttagccaagttagaatagctacccaccccaaaacgaatttgtccaaagcctaaaaaaagatttttcctaaaccctgccaaagagtgaattctaaagggtgcgagttggaccgtctaccaagaaacaactggtttctctaactcccagagttgaaacgcgtcctctaatatagcagcactgcctgattccttaaaacggtaatgc

SEQ ID NO: 10343 - DNA, 460 bp, Emericella nidulans
ctgtgggcgataagaacggagacggagtcggtccaggcggacgaatcgaacagatcgacgacacgcaaagtgtacttgaactctcgataaaagcgtgtccggcagctagttggtgctggaaacagaacacgattgagagcggcgatgttgaaaggcagcgtaatcaagccgccataactacagacacattatctcaaaggaaggaacgatgtccattgctgtgatgaactaggagaggtagatgtatggcatgaatgtcatgtacacaatggaggacgtaacctttgggaggttttaggtggcaacgggcatttagaacggtcatctagatgcttcgacccagacaaatgagactggctcagagctgtattaacttgacgatgtcctggtaacaattcacaatggattgggcggggatcgctataaaccggtgcgcgcatttaccacgcttttttacccg

SEQ ID NO: 10344 - DNA, 113 bp, Emericella nidulans
ggacgttgagtagtgccgcactagagcaatcatgatgtcgggtattacaccgcatgagatcgtgcatcttgatgtgctggtgaatgtcaatcgggatacttggcactgcttca

SEQ ID NO: 10345 - DNA, 2330 bp, Emericella nidulans
tctgcggggcgaaaccggatcaagcttgaacagcccattgtcggttcccaatttgtcgaaattagccaataactggtagccacaaccttcggtcggaagaaaccaggaacggcaaatttccatatgctccatttcatttaggtttcacccggccaaacgcaccagtccctgcccaccttcaccgtaccaaaccgagcttgtccgtaccgtcgcacgcgaagtccgcgacctggaccgcgacctcgcccacctcctggccccatttgaaggttccttcaacccatctcaagaacccgccgtcgcgtgtgccctgctagtcgaccatctctgcatccggcgcaacaagcgctgcctcctagcctatcaccgcgtgcgcacagagaaactcgaagagctatgttggaagggaattgatgttctagagcaccagcaggcgactgcggcgggagacgatggaggacaaatgggaggtcagaactcagagagcacaggcgcgcagggtactagtgggaacgagagctcgctgagccccgaagaggaagagtatttccgggagtacagcgacatgctagctacatacaaggggcagtggacggatatcgatcttacggggagcttggagccaccgaaggatctgtttattgacgtgagggttctaaaggatgcgggagagatccaaacggagtatgggtatgttctccagcgcttgcatgatgtcttgcgttcggctttgttttttccgcgtcggcaagatgtgtcgctaacctgtctcgctgcagggtcatcaacctaacgaagaacagccagctttatgtgcgacatggcgatgtggaacggctcattgcgcaggggtttctggaacagctgagttgatggcctttgacgcagcgcaatgcttacgacgctttgttggagttgggagtgatttttgtgatacccttgttcttaacctgtagtattgtgcagtagttaatacagtagttaatagactgctaccgtgaacgatatttagcatatccttttgtttgatagccgttttacataaaagagtacgacgagtttgggttcgggttaactatcggtttctatgactaatctgggcggagagcttggctgctcaaaataccagtcagtggaggtgtcaaaatgcagcacgagcaggtcagacgttaatttccgcactactgtggctcagatcggctgatctccgacgagcttgtcgtctgtaatagatactacacattgtagacaccggcagttatcgttcgtatctcgcattgaagtcaagcaggttgtcgcttgattttatgcattatggtttccagctccgactcaaaaacgacggacaggcaccaagtgggcccacccgaatccagaaccctccccagataagactttttagtcaattcgccgataacagcctgcaaaagcgcaaacccaccaaagcttgggaccgcccatactattttgccagactctgagtctcgctttgccaaccaccgctcagctcttccatctaaccaccctgatcagtctcccgtctcatgtcgtcgtctgcacatccccggcgttgcgaattgcatccatcgccataagtcttgcgtcatccccccagctgccgcttgagtggattcggaacccaactactaccgcaattgaagcctggattgcgaatcaacacccctcaccccttctattcgtgcctagacagctatgggcgttctggggcgccggcagcgcgcagactcgcaagcctcccaccctccaccaatatcaaatgacaatgttgctcccgacacaatcgataccctcactgggcctagttgctttactcgcgttccggagccggaaccccaagtacctggagggacagggacgagttacaggacaccgagccggtcattttatcaccgctcttttcataatgcttccggtacgcgcttattgagaacctctggtcatgtttggtagctagccgttactgaccgagcctagacccggctcactactcctctcacgggcttcgagaacagactgcggagctggcttcccttgctttgacccgggaaccgagggctctaccacaagctatggagatatttcgacctgtggatggatccgccgagttcggtgcgccgttgtcgctgtcagggccagataggacgcaggagatgggacatacgccgacggtccattctgggggctcgtcggttttgacggctctgatccgtgatccgtcctggagtgtcagcagagaaggccaagagagaaccggtgaccgaacgaggagggtgagcgtgcccatgcaagtgggcgtctgcttcgggcat

SEQ ID NO: 10346 - DNA, 2766 bp, Emericella nidulans
gatatatggacgtgcaaaacttgagtaatggatcggggaaggttaattttagctgccttctatatgaagtacgcagagtgtgataccactaacgcctccagaaatattctttataagaacaaagtccgctgtaatctgaatttttaatataggatggaacgtcacaactgaagctaaggaagaaacatcatgccatacaaagctcatttacagccgcagtatgactgccgtgaggctgtagctgactgaaggcatattcgagtcactccgggtgaccgcgaggcccaggcggttgctgctttttggccgcgagactcaagaaaaatgtaaagtcgtaaactaagccaacgatgtctcgtgtagaatgatattcagaatcgtttcgacatacgaataaacagaagatagaggtggctgttcatgcctgaggcataatcacatgacctcgggaagcgaaacgctaaccctgtccgcaccaaaaaatccaccaccacgaaaaggcctggagacggtcgacaacctcactaccgccagtccatacaactcagctcgccgtcgcgacaacccatcaagatgccggttagtgaatcccccggcttactcgccaaattggatggatcatttttatatcagatcaatatcctccgctccgccataaatgactctgaaccgatgaagtgtctgctggctaacacatggatgaaccctgatatagagccacaagagtttccgcaccaagcaaaagcttgccaaagctcagaagcagaaccgtcccatccctcagtggattcgcctcaggactggtaacaccatcaggtaaatatagtccgacctagtttccagaagcctacaaccgtcttttccgaccagtgtgcagaagaggaggaaatgtatatatgggggtgtgtgtgtgtgtgtgtgtgcgcgtgtggtcagaaagaatgctagtatatcaacgaaacggtctttatagactcttcatcgctaccagatcagacactggattacgcacgcacaattgtcgcagcaaaccgatacgcgagtcaataaaggaaacccacgactaacattgtcttttttttagatacaacgctaagcgacgacactggcgcaagacccgtctcggtatctaagctcgtgctttcttccacgaccgagtcgacgcattgttttcctgggatttttccgttcaattttcaactgtgatacacacacacacggccaaaaatccttcagaactcgcgatgctctaatttgcaatgagaaaataaaacccgttgacaggcttgccttcacctgcctacgatcgaatacccgctttcccttattctgtctttcttctctcacctattcctcgtctccggctatctacgtcaatgtgctcggaaccatggtttacaatcgacaaggcgactcgtctttgaatagcctcaagatgagcggccggcatttttgatctagtagccaagtgggcttgtgggggcgggtttctgtgatggaatggactctactgctttcttattgcaaactattgtacgcgagcctctagggaaacaagaaaagagacaaaatcgaaaatatgatgggtaatgagcattcgacggtatcatgagcacttggttcataagactggaacctagcatggcttccaatggctagaagtacataaacactggcacatggctcttaacttctgggtagcttgaacctccagtctcccttggactcggtccttcattggattcttcacggacattcatcccaaccaaagtctgcttcataggcgtctctccttagcagatgaagtaagccagccatatagtattcgtagtagttaccacaaacgtttagggcagggttctacgtcctacgtacctagtcgatggttctgtcttacgcactttttctcaattatagcaacagcgcacgcaggtggaagtacttacatcccgagtcatataccatctaaattaagaaatcaagacgtcactaactagaaagtagaggattagagacatatcctgagcgcgaacatgactgccattgatcctggagttaaggtatgtaactgagtgataggtaatacatcagtcattaacagtgcaatggagtgatttattcgaaaccattttatgaaaagcagactaatgacattgggtaacgtgatcatggagggcaaaagattaacaagcaagacgaaaccgctgagttgtagtatcccataacgccgtggagccagaggacccttgtttgatattgaagttcagaaactaactcatcatgctttgtcattggggccggttagcagtccacaaaaagagcagaggaaaccaatcccaaaatgagaatttttagcggctaaagtaggatattagtatatatgtgcaactgcgggatctaaaactcactcctcggcccattcgttctcgcggcggatctggtcctcttcctcgggggtgaagtcgttctggatgttgaaagtcttgcggatttcctcgggggacttgcccttgatcatgttggcgacagtcttgcatccgatgtcaaggagaggcttgatgtcaaggtagttggcggccttatcaatgaagttagtatattatggaaataatcaaagaaataggcatgacttcacgtaccaagattatctcaaagagcatctcctggtcaacctgcatgaacttctgagataccactcctcaatatccgtagtcttgcggcgcgaaacgtcatcatccgcagagctggagggtcgttccggtggtc

SEQ ID NO: 10347 - DNA, 1340 bp, Emericella nidulans
tacctggaatactgctggtgttgttaccttattaaacaactcctcgtaggcatattgcaactcgctaagacgtgacgacatctcttttgtatgctggcaaactacccaaaaacagacatccattcgattgaacagtcatcacccggggccgcggcttaaatcatccccagtgtctttctaaactgtagaaagagcttagatgaggacacagcaagacgaccgagaaggtggcccgccgaagaaagcgtcgttaagccttgccagtgagagagcaggccaactgcggcgctgcggatggtggcgcttgctttttgaacgagacttatagaaatatgtgcaaaccaagtggtctgtataatctggcgctcaattccgcctgcgcgtcgggtaagaggcatatcttcagctctcaggctgtgtaccttgagcataccacgacatccaggcgttgtctgagtacctgtaacttggattgtttgacgaatttgctctccgccagactctattctgataatctgcttgttcagaccgtccttgtgtctgtatagagcgggtgccttgagcagtccgccggtgtgcgcgccttgcggcgtgatgtgagctgtagctctgtcgtggcttgtaggtgaagcatggatctgcgaaagtgcagaggagatattcgacttctgtataaagattggttgtctggcaacgtgctgaccgcgagtggaagttgccagaggctgcgtaggagacaaatctggctttgtcacccttaccggatggtttagcgggcttggaacaccgacattcgcagcgttgacacgccgtcttatggtgttctgagcgcgacccaaaggtgccaatggctgtgttggagacaggtccggttttgttgtctctaccggctgccttaccggtcttggtagtccggtaatcgcagagcctgtcgggctttgcacagagcgctgtggcgacttatttacgaacgctctgtcgtggttcgtctgcaagcatggagtgccggcaatggcacgtgaagcattggcattgaggtgcgcggctgctgccttttcgacacagttgcactgttcgcgtcagtcccagtattaggcaaagtacaaaccaagcaacggcttaccctcttatgctgcttgcgatgcttctcgcagactccatactttcgagccttgatgtagttctctcgttgagcttttgatctcggtttctgcttcttaggtacattcgttgtcgcattcatgttgagatcaacaccaactgcattggcgcaccaagactgtggtcagcgagtggggtagtttcgattcggtggatgttgaacggttggccgagggaat

SEQ ID NO: 10348 - DNA, 109 bp, Emericella nidulans
  unsure (1)..(109): unsure at all n locations
tcgtcagctagattcaatgctgctggacagccacttgaagcaccgacgacgaaccncctaggaaacagatgtcccgatacggnaccatacgncgctacaacaagtggtt

SEQ ID NO: 10349 - DNA, 178 bp, Emericella nidulans
  unsure (1)..(178): unsure at all n locations
actcagcgacacgaggccttccnnaggtctccgngtatcngccatcgcntcctcgtnactaggcagcgctacctccagacntatcgactgngttgntgggagagcacgagccgcngttagccttgagaggtcttgagtggtcgctacatatcttctgtccncgacgagcattgaatgt

SEQ ID NO: 10350 - DNA, 909 bp, Emericella nidulans
tgtatgtttcctcttagggtgctatccttgcgttaatagcaacaaggtttaggaatctcgcttttagggctgatgctacgtggatatccaggtcgcgggctcacagggcacgcgtgcatcgctatagccgaaaaggctccagaggcaccgtttctcgtgcaggatttagccggggtcgttgaccaaggtcgagcgtctcttcctgagtctctgagctctcgaatcaccttcaaagagcacgacttcttcacgtcgcagccggaggaagcggatatttacctgcttcgatttatcctgcacgaccatcccgactctactgccatagatatcgtcaagaatcttataccggccatgcgacagggcgcgcggcttatcatcaatgacggtgtttatccggaggttaatacgttgccaaagggggaggagaggattgcgcggtaggtgatcgctgatgaacggagcttttaaatctttgtagggctggttcaatgctgacattgtcttgtactgtataggataatggacctcgagatgttgaccaccttcaacgcaagggaacgaccgctagcagactgggtcaagctctgtgcagacgccgacagtcggctgaagctgcggtcggtttcgaaaccggagggcagtgtcatgtccatcctcgagtttgtcttcgatgagccggaatcgaagtttgatgagtcgctcgtggatatgtagatagaagtttgtatctttgctggaacaatacacatgtcttccgtaagctattgtgtctctgatacgcatagaaagctcagctatcctttgatattcacaagtgcaataggggtatgcaaggcctaaatagaagaagacgaattcccatgtctagaggtgcgacgaggtcatttggtacaacgcagttaacagcta

SEQ ID NO: 10351 - DNA, 987 bp, Emericella nidulans
ggcttgattagcatcattgtggtgtggcggaggtatacccgaccggtatctagctggataaaatcatgtggatgtacggcctcctgattactccgttgaacaggtatagtccgtggctactaagacagagaggcacactccgttcgcggggtataaaagcttaggcagccgaggcttacggggtagaatcattggtgggtacggctagctttcaatttccgggcatcttactcgtactgggcatgaaagtatactgagtacatacaaggaagtatatacagagggtattgtattattgagaaaacatatgctgctcgctcaggctaccaatgttggatgcgctcaactactaaatccacactgataaattaataaatacgtgcattttacaggttataagtattagctacaataagtttaatctaccattacaaaaggctacaattagccatatacacaacatccaaagtccatgaagcttaatgatatgcgccttgttcaatataagatcaagaaggtggaatccccttaagtgccggctgcagagccagcttggaaccgaagtttatccaagggcttgggaccccgctaaccttaggatcagttcctatcatatcgtgcgggaacccaaggtccaacgggcgaacgctttccaggtacgccacttgttccggcgtcaacttgatcttgagtgcctggatgttatcggagagatgttcgaccttgcgccctcccacgatggggaacacgttgggaaccttctgcaagacataggccaaggcgacggccgtcaccgactcaattccgtgctcggcagccaccttacctagggcttcactcatcttggcctcatctggtgtttgttcgctgggtcccaataagctgcgcactccctcgccagccttgcgtcgttcctccagagccttagtgctctggaatctcccaccacctagcacatcccaaggtgccagagccataccgaaatga

SEQ ID NO: 10352 - DNA, 280 bp, Emericella nidulans
  unsure (1)..(280): unsure at all n locations
aatcacggcgccatatatatcctccgcttctacanagccatcgcagcctgcgtagtaacaaccnttggagcaggatcantnngagnananttcgngcccgagcaaagtgcatcagtacatgcantcttactgctcgggacacngctaggccccatacctcaggcacttantaggcggccnntacgacacagnagacnnntgacgctgggcatttggattcctggaccctcgcctagattgcccgtctnaatcgctatccagttctgaataccgaagcatt

SEQ ID NO: 10353 - DNA, 504 bp, Emericella nidulans
gataggacgctcgagctataggcttcttaaaaccacacgaaacggatagctgtttggctccgacgctcagcatgccgtactagcgagattacatcgcgggaacctgcgactgattccaagctagggcaattagccataagaccttaacgcccgtctgttaacagacacgcgcctaaacactgacgtgcgacgcgtgcgcccgcggagagagtcagtctgttcaatgtgcttagggtgtccacgctccacttgaacaagaatactgagatgaagtttagtctctcgtgtgcaacctgtcaaggaggcactgaagtgaaaacatacgagagaatctgccttctctatatagacgctagactcggcaagttatatacccttcattcacatgaaaccgtttgatcgaaacccgcccctgcaagataagcagcccgggttatagacaacgatctaaaacccagtgatcgaagtataccaacactgtgtaactcccacattttacgttct

SEQ ID NO: 10354 - DNA, 122 bp, Emericella nidulans
caacgagcacccacggtgcctcgaaaccacgcgaacatcctacgaacccatcaacgatattgatacaactcacataccccacaatatcagacgccaacccaagcattacgccactgccttgg

SEQ ID NO: 10355 - DNA, 2177 bp, Emericella nidulans
ggcacactggcattcataatttctgatagagtacttgggcacacactcgctagttccatggcgtagacattccagttgtctttaagcatgctgattaaaatatcgggagcgtatctgacaacaagccgcaataacttggacggccgaggagctggacctggggtttctaatctcggggcttgtcggattgaccctactccttcgagccacttcatccatggatcattggataaggaaccagctgtataagccggatgcagaaatttagggtactgtaagtccaccaggggcgggcatcggcgctgaagaacctgcataactgcatccatgccgtaaccgtcattgttcttgaagtataggtcttctgcccgcttccattcgctggccccgtattgcggcatttcgagctccttgccgtcgctatcatagagaaatatgcatttagcattgatcgcgcttctgcttggagcggtagcataaacgtatcggagattgcagatcgattcctcaagggaggggcgttctgcagccctcatattccaatcgcagatccgttcaatcacaaatgaaggctctgcagctttgacacctaatcttgtatatagtcgtacccgtgcaacatctacaacttcaggcactggcactacatccacaacgccgctcggaataagattgccactagtgtcatgtggaaagtagatagcgctatccttggggctctttagtacaattgacctgcatcccttgttcacaggaacgatttgaaggtgctcaatttgcttcgccacaacgtcgtcctgaggacaatttaaccaggacaacaaaagccctgctaccttgctgtgccagttctcatggaatcgcttcataataatcgaagtctcggagaacctgtccactaggagtcgtggctgcgggttttcgagataaggtcgcagtctgtccagtaattgacgcgatgaaataggttgaaggccgaacggttcaagaagaccgtagtaatcggcgtactgggaagaaagataaatatcttcttgcagatcttccaacaagggttcaccattactatcacagtgttctggtaacagatatcggacgtcttctaacgacttcagtgtccctctccttgtcttaaagacaggaatatgcttcagatctctcagcaatctctcgtagaaaggggaccatggcgagtccttgatcttgtcgtctggaagaaactgaggccagattttctcgaactcgggtatggagcagatctcttgaagcgcggcaaaaaacactccagggagagaatccaggatatgatcattccagggacaggctaccagatcttccccattgtcttgggtgacaaaatcagactggatgaggaagtttaaccctgctccacgtagagggcgataggaatgagcgaaaggctgtgtagtgagtgcccgaccatcctgcgggaaggccaaaaccacctcgacatcctcgatgagcggacggctctctcgcggcggaagcccagccacctttctcctgaaaggaatatatctatggaccattactgtagaatgtctggtttccacacagacgagactcggctctatagtgggtcggctgaacattaacgacgtacttgatcgggataaatagaagctcaacatgtggagcctggagagaaaagcaatgatggtgtgcggcaatcttaggagctcatcttgaatttctcgacacttttccgggcgagagaaaagagtgaaccgagttcgcaccccgtctggaagcggttcgtggatttcgttgacgggggcaatcatccccaaaccattctctccatcccgatgtcgaagcgagaaacaaaaggggccagactgaattcgagcttttgatgcgatcttgaacactgacttgaagccaatccccttctcgccgagttttccttcctttttccgtttccctgcgctgcatatagcgcgaacatggctttcctcgaagccatcttcgttggagtctaccacgatccgatccaaaaacacatagaattttaacgaaggtattgcgttcttcgactttgcagagttataagaacaatcctcggcattctggatcatttcataaacgaagcgcgtgtcagaagtccatgctctagcggcagctcgcgcacaggggcactgaggacattagcaaga

SEQ ID NO: 10356 - DNA, 1340 bp, Emericella nidulans
atctgctggacactgatcacattggtggtatatgcgcccttaacggtgctagtatcgttatgccaccgtaatgggccattccgatgggatgatgtgaaggagcagctccaccatgacctggtcttatggtacgtattggcagaagtatgtaaggttaggctaactcatcagtctcggacgtcgcctcccagtgcccgtaatacagcgcgcaagcgataagactggaagcaatatcaaaaagtcgcaacgctacgctaatgctccattccgagttgcagaaaaggtacaaaagcctgaattcgccggatactgggtgtattgcgacaagtcaactgagtcttgtctcgaggacgcggacctcgtcctcttccacctccacggtggaggctatgtaatgggtcacccgcttgataatgcacccgagcttctccttatcgccgaggcgctgtcgcggcgcaaccataaaatagctgtattctctctcgaatacacgctcgttcccaccgcgccgttgccgacacagcttgatcagaccatcgccgcatatacctggcttgtaagcgaactgcacataaatccgtccaagctgtacctcatcggcgaatcagctggtggccatcttattctctccctgctcaacgcgctgtatgaacgagcttcaagtcaagttccgattgcgctcccaaaaccagcggtggtcttcctggttagtccctgggtaaacctaaacccatgcggagttgacgcaaaagcaaagaaccaagatctggacacccgcagcgcggcatttaaacatgtactcgagcgcttctccaacctagtcctgcacggagcatcccccgcatacctaaagctacacggcagctttgcacagccagtcccaggacgcggttcgtggaaggacattttacccgtgacaacctgggtctctgcgggcactgcagagcctctattccgcttcgacattgaagagtttgtcagggttgcgcggcgcgacggggccgatgtgaggttcgagctcgcggatggcaaagtgcatgtttggcagtccgttgaggcccggcagcaggaggcgaaatttctagctttggcgctggaagaagacaatgcacggttaatgcctgggtatcgacatattgcggagttgatatatgatctcttggagggtcgagcgtaaccagcacgttaactgataagtaacctttagcaggacatgttccttccgatgtcagccacgccactgtcatacttcctacaagtcttctcgcacagcaagggagcctgataggtaggtgcaatgggtcccagctctggttgcgcctttccaccacaaagctgtt

SEQ ID NO: 10357 - DNA, 890 bp, Emericella nidulans
ataaaatactgtccagtgtagtactggatccccggaagaagaattagggcagcttcatcggcgtgctcgtcgatgattgagaggattttctgcgtggggatctcatactcgccctcatctgggccaatgagaaccatggacttctttgggtctaatccatcgtgccaagcaatatgagactcgatagcgtactggaagttcatgttagtttatgatggcggaatgtgtgttgagagatctaaaggtccggtggggcaaactaacgtgatcactagggaatgctttccaatctagcaggatcttgtgcttagtggcagtgggtttgtagaagcttgcaaggagtagatgcaagtttgatgtgagcgtgcccattgcaataacctcctccggcgctgctccgacaagcttgctcatcgagcctgccgcttgctcagccatcacccaccatgggtcaagcggagaatcctcgatcttagtgaaatgtccgttgacaccgatcgatgcccatgtatctaagtgtgcttccatgtactttgccgtagctttgggttggagaccgagagaattcccacagaaataaatgcacggatctgctgaaatatctagagtagagcaaattagcgagatatatctgagttctgcaatggcacgtactgggcttcgcgagtctcttggattgaatattggccttggagggaatgatgaacttatcccgaaatgacgccaggggatcggccgcgtctaaggctttggcatattcttttgaagctgcattttctggaaatacaggcttcacgccgttgacgccgttaacaccattgacaccgttgacgtggttggacatggcgagaggaaggagattatctgagaggagattctggaaggaggga

SEQ ID NO: 10358 - DNA, 1224 bp, Emericella nidulans
taatatcagggggcggaaacaagaactccaaaggggaccttttccgggaaaaaatttggtttcattggggaaaaagggggtttattttcccccccgggttccagggccccccccctggatgtgggcttgactcggagggggggaaacccacccgtggggttgaaaactttaagggccaaaggaagttgttggcctgccttaagttgggtcagacagtgtagatctcgtggatcagatcctccagcagacgatgccgtacttgccaaggtgctcctcaatgatctggttgtcggtaagagcgacgcgctgcttgtcaatctttccgtagccgcgcttgtagatgagctcacggacagacttgaggttggggtaaccgtaggcaacgtaagggttgatgatggtgagcatctcctgggtggccttggtgagcttgacgaaggtaccgttgttgatctggaggagacggaggagctggaggattttgcggggctgaggagcgatcttgttgatactggaacgagttagcgttgggcgtctgattccgtgatagagatgccttaccccttgatacggacaacgaagatcagcttgggctcctcaggaacgtagaagttaccctcctggcgagcaacgcgggccaggcggatcttctcgcgctcagcattgcgatactcctgaacgtaagactcggcgcgcttgaagatgacggcacgcttctccttgttggcctgggatttccaagttagcgaatgccggtacaggtaatcacagcatcaacagcataagcaatattctcagccccgaaagatggttaacaaaagcgacagcatcgactggtaatctagtcgcgtgatggttggtgtcatcaccgtatgaaaggaaaaaggaaaataaaaatgtttgggcactcacggccttcttcttggcggcctcctcacgggcagcagcgcgagcctgctcctggctcttgcgcttcttaaggagggtctcggggacgaggacctggtcctgagtagggacggtgctgtgaaggtcagtatagtctgtccgcaaaattcaagcaattccgccgagtgtaagaattgcggctacagtgccacattctcaggctgaaggctaaagacatgtataacacccgacaaaatttttttaatcggtgaggttggtggcttgacgctgagaactactaatcacgcatttcagcatgacgttcagtctagcttg

SEQ ID NO: 10359 - DNA, 397 bp, Emericella nidulans
ggtgcggcccgaccctcagaacttcattcatcgaatggggcgtgacggcccgctcggcctaaaggtggtcgtagttaactcctgcgccaataacgaaacccgtcacatgcgcgcgaatgatacgatctacaagaccaaaatggaaaagatgcccatcatcgtgagtgacctcacttaaattaattgagttccgatcactctaatgtcttcaatgcggaatactatcgccccacctagggcaatgagtcgtgcgaaacgccatgtgaggagcgttgcacattctgtagctctaggaggacaccttaactgactctctgtgctcgtccagcacggtatttgatagcagtatcagctcactcatgaggagctgtcccgctatccacagtaccaggggatc

SEQ ID NO: 10360 - DNA, 1682 bp, Emericella nidulans
cggtgaattcaacgggccgttggttttctacgctgtctgttcgttgccgtttggatggattcctctcgtcttctccttcgctgtctgtgacttcaacctcctcatattcgtcgctttcgtcaccaccctcagtcgcagcagcgctgtccggtcgatgtttggcatcatcgccggtagctgtcgtcgcctgctcggtctcggctgtctcgccacgttcgcggcgttccttggcctcccgctcgagacgatcaaactccacgacggcttttagtacttctgtcgggaacttccagaaactctcgtttgtttccgtgttgtgaacgaatcttctccccagtttggttttcacaagcacccatggttcacacccaggtagggcatgtttcgatttcggccggtcttccggtccacgcggtcgacggtcatgataggacttccctccgcgaaacccgccccgcggttcattataaccaggaacaccaaatggggaggcgccgtatccctgaggcgcgtacggtgtagaggaaaatggtgggagcgtgtcgggcgtaaggaacgcggcattggcagcagggtctggaatgggcgcgggtaaagagggttcattaggggtggcttgtggtctagtatacgttgattgtttcgtctgtgaattgtagtaatatgtgtggcctgggtttcgtcagaacagccatttaatgtgaccatcatatggacaaacctgagggagctttgtgctcggtccatcccggcggtaaaggaggaggaggggtatacgtagacttgagcattataattgttttggagaataggacttagcaaagcaactagtttagaattgtttgaatcatttgaggcgaaagtgaagctttccgtttgggtttagagaaaaggtggtccgagcttggcggacggacgcgcgacgagagttgcctaagacactgagagctcaccccaacctggaactgtcctgcagctcttccgtcacagcaatcatccatctccctgctttccaccaccccgtctccctctatcagtctgaccttgctgcaaatcacttaatagcatagccccattgctacttcacctctgaatctgatccaaaatgtcacgacgctacgattctagggtacgttaacctccgatcttctccggctgacagctccaactgacacaatgacgattgtcccagaccaccatcttctcgccagaaggtcgactgtatcaggtcgagtacgccctcgaagccatctcacatgccggtacggctctggggatcctcgccaaggatggcattgtcctcgcggcggagaagaaggtgacgagcaagttgcttgagcaagacacatctgcagagaagctttacacattgaacgagtacgtattgtctttgggttttaggatttgaggcgttcatcatcggctgatttgcttgcagtaacatgatttgtgctgtcgccggtatgaccgccgatgcgaacatcctgattaattatgctcgacaagcagcccaacgctaccttattacctatggcgaagaaattccttgcgagcaactcgtccgcagactctgcgacttgaagcagggttacacccagcacggtggtctccgtccgttcggtgtttcgtttatctacgccggctacgatcatctccgagagttccagctgtagcagagcaac

SEQ ID NO: 10361 - DNA, 149 bp, Emericella nidulans
ctaaaaaaagtagttatcggctgttgtcggctattgtgtcttgtctgggcttgtactctttgccctccttgcgtttctttgtgttctgggtcctttgcctgttcgtggcccttcgtccttcgcgcctcggccctggcctgcgttgtcct

SEQ ID NO: 10362 - DNA, 1177 bp, Emericella nidulans
ataaacccaatatcgccgtctttgttactcctggtgagggtggcaatgacgatatcgctctcttcaccctgatagttatctgtccatttcaatcagcagaattcaacttttcgagggtatcagatgcatacctatggtcgacagcttaataggtcttttgacatgctgggcgctagcatgggaaatcaggccggctcggactaggtcatacgagtcaagatcgttcagaaccgggtctgtgtccttcctcaattcctcacggagcaaatgtagttggccaaggtacggtgtaagaatgacgagtttgtctgttccgtagccttgttgaccgagatatttcacaatcttgaggacaagcttcacttcaaaagtattttgcttacttcccttgccgccatcgccgtctctgtctgatacgccatgaaggaacccttccggttgactgtggtcaatgaatacgacccgattctgtagtcctcttggtgctaggcgggtctttgtcttgtcaccgtccagaagatctggataggtcagccttcgcaccagcgctgagatctcaggagccatgcggtgctgtttcgccagggtggaatgtgggtatcctgactctacaagccgttcgaagagagaccggttcagatcgtacccggagcctttctcgacagacaaagcgtagttgttgattttcggtcgcagttgctgatggtctcctatcataatcagttgtttggtatgggacccaagagcggtaaggacatgggactccagaatctctcctgcctcctctagtagaacaacacctggcgaagttgtgttgagaacgctcgcattaattgcggccgcagttgttgtgcatccaattattcgttttgatagcaggacatcgcgggttctctcgttccacatctcatccagtttcttctggcacctgtccagtctggctattaggccttgaacgttgaccacatgctcttcaagaagcttttctttccagtatgctatcttctcttgccggattgccttatccatctcccagactcgacgagcttcagcactaaggtgactgagagagggtagagaatgatgtttcccgtaagcccattgatcgtatagatactgactagagattggctttttgcctctgccaacaatagtcattccgtcaggatcacgcggt

SEQ ID NO: 10363 - DNA, 2511 bp, Emericella nidulans
tatatattcatccaaaacaacctataaacccggtggcaatattcattccaatggaaaaagcaacggcatcagtgtcgagaaacatgaaaacaggaagcagatactccgcggataaacaaagaatttataatccctggactttgagcatgagagatagccaccagacgaggaaattttagaggtcatcggcgttggacacagctccactcatactatgaagtatcaatcagcattgcgaaacaaaatccaacgtcggataccaggccgccacttaccactcttcccgcttcatcgccagtatagacaacttggggaaacgcctggatacaactaattccggcggctatatttgcaccgttgtcgcggttgttatcaatgtgatggagctggcggatcaactccagctcaaagcgaccatttctgatgatcttgctccagacctacaacgtgttaggtccgcgcctgggccctgggagtcgttacttacattgacaacaccccttttatggccggtaaagaccagctcgcgctcttgccattcgtcgccgactccttcgtagaaaacacaggccaacgtcgtatcatcggatgactcgcagactacctgttcaagcaatacggctccattcagcgagtatagcgtgatgcggttccctcgacaaacagcgatttctccagtcacattattgatttgggcacactgagctcgcattagttgggttgaatgataagaattggggactagagcatacatcaacaggccctttcaatggaagctcccgcaaaaagcactgacggtttaaatcccagagcataagctgaccgtcgatcgacgcagacaacagggtgctaaaggaccgggacactgcaagtacagtcactggtgtgcggtgcccgaacaaagatcccgcaggttgcaggtcaacagatcttgaatttgccgtgaaggtccatattgagacggtgcagtcggcgcctgaagtaaccagcgttcgggagtccgcgaaggctgcagcggtcagctggcccacgtgaaggtgctcgaagtggccaagaagctatatagtattagtattaggtaccatagacaatgaagagattacctttcgattgtctgtggaatagaatctgacgctaccatcaaagaatccccattccaaatacttatcataatttggtggtatgttgagtcgcaacgcagcggtacacagtaaacggtcgttcctcatgcatagagacgaaactcgttctccagtttctaggagcacgttagggttggaatggctttgtaatgtttaggaactcacctaggagcgcgataggaagctgggtaagcgactcagcgagagtatctagccgtagagtcttgtgcttatgtacctcactttgaggatggggtcgattgaatatctgatgtggtgtctgcccaaagttgtgaataatccctatggtggcaagccgctcaacgggatcatttatagcgtcgagatccttagcaccttggtaggagagatggtggaaaacattgaccgcttcgacagcagcctcgcctttttgcttgcatccgaagaccaaatcaatccaatggtgcaaattccgtgtcacataagggctttccagcgcttctcggtttttggctatgaaaatctttggatcacccttcgcccacggtggcaattccaccgagtcaattgttgttgccatgttttgaagcactccaaagtcgtacttgttggagttgactaggaactcagggagatagaagaactctggtattaactccctcacatctgacatgttgcctcgtgaggcggactcccaagccttgccgaccgaataaaagagacggtcagcagggccgaaagtcccccccggcagtaaaagatacgacttcacaaaaggctgcaagcgaaacaaaaaggagccaacaaccacggcggaagaaaaaggaggcccgaaaagaaagggcggagaaacaccgtcacccaatcccaaaaaagcgagaccccgcccaaaaaagagacccccgcgccgcggggggggacacccccacgcggagaaaacaccgaggcgccccaaataggggggaaaccacaccgggggcgaaaaaaggcaaaaaccccagggaaaaccccaaacgcggaaaaaagaaaaagcccacccccaggggggggaccacccaaggaaagcaaggggagaccccccctaaacccaaacaaagggggggaaaaacccgagggcccaaacccaggaaaaatgaccaaaaaagggccgcccccaaccccgagggccaaacccaaaacccccgccggggccaccccccgaacacgaaccgcacaacggccaaaaaaaccacgtgagaaaaagcacaaaacccccccgaaaaaaacagccacaccaacgaacgccgggaaacaaggcccccccccaaaacaccgggaaccacggacggcgaaccccaggcccacacggcgaaaacacccccccaaaaaaagaaagccccccccccag

SEQ ID NO: 10364 - DNA, 1120 bp, Emericella nidulans
ccgtacgtttgtggagaccagtatgcctgttgtgacggagtttgagaagcaggacaaggtgattagtgttgctgcgacggggacagttgaggaggtttatgagcgaattcaggctggctttgagaagcgcggggtgaagccttcttcttaagttgcagtctactggggaagctgactaggcggacatgtatgaacgcggaatagaaagaggttatagattcttgtggtggatataaatatgaactgtgctgttggaacttcgaatccggtgtttattcagcaaatctagaaccaatgaacttgaatagtcattacattttatctcatcagttttttgtttgttgcgtctactccgcggcagctatctcctgaggagcacgtcgacgctcagacggtcccttgttattcttatctcccttctcaccctctgcagcagccgcagccgcagcagcagcagcttcccgtacaaatcgctcacgctcgctgcgaatgacaccaaggacgttctccaggcttcgtcgccacaccataagacgaccctggacttcggcccactgcttctcaccgaacacacggtaggtggcacgatggaccaaaaactcagaacgcaattgagaaagcttgccctcaaccagaccagcacggatggtgtcaatgacccacttttcaacttcctcctgcggcacgcgaagggcggacgcaatagtctcgtatgacagagagcgcgcggacggacctgttgtggttgtggcggccgcggcaagagatgccagagtgagtagacggatcttggtctgcagagcttcggcatggggggccaaggcgttgtcagggaggatgttttcgacaggggtggcggagatgaaatcctcgtaggcatcaagggtatcagcggtgaaaatctcaagcagctcgaagaggggtgcgtcgctagatcgcaaggcctgaacggcatcggcggcggttaacggggtgaagtcgaagacggccgggtgggtgagcgctgaggtcagagcacgcacggcaaggtcgcgtgctgcaggggatgaggcttcggccggaggaatggtctggagagcatcgacaacgtgagtctgagcccaatcgaggtcgccggccg

SEQ ID NO: 10365 - DNA, 170 bp, Emericella nidulans
tgccggacttcgggcgagaggctttgtctgttcatgggccgaggcaccagggtcctggttctatccaggtgcgacgaaccccggtagtgactgcattgagcagcactatctatctccggcctatgcgaagtaataactctcgtacatgggagcctgggatcccctccgaa

SEQ ID NO: 10366 - DNA, 941 bp, Emericella nidulans
ccagatagttttcgctgtttgggtcctgctcgaacgtgcgatagttcaggaagtagtaattccgaaatagctcgaccttttcccgcgcttcctgcatcatgatatcctcagccgtcaaggcatgaatcccaaaagctttagagatcacacgcatctcggcatcagttggacagaggacatcaagccagaacgtgggtcgaggtccgtaccgctttggtttgggggctgtctgcgtttggtctggcaaatcgcccgacacacgtccttcagacacagcttcactgataatcgaagcgcgaactgcgagtctcccctccggctgctgatgcgtgtcgtgattgtgattgttggagggtgtcgctgccctagcagccgggctctggttcgcagtacgcgtactcggcgttgggtggccgctatttcgatgttcctctgattctgaggcctcactgtcggaagaatcctcgagctcaggaggatcggggatgaagagttcacggaagctacctcctggctgaaccaattccggtatcgtttgcgcatgaatggtgctctgaaactcttcgttgaagtatgtgaaacggtaaggaacttcgtcctcctcgcgtcgccaggctcggtattgtggacgaagacggccctcgaccagcatgggttcgctaatcttctttgcacggaaaacgcctatccgttcttccttttcctcacggctccaatcctccaggatagacaaataccgccattccttggttccgggtgtgcgtcgtccatttacgcgagacaaagcgggcgcacattgctctgctactttcgaggcgttcttctgcgggaagcagacatcttttttccccggtacggaccggcggtggaatagtgtcttctgcggggtacgatgccgcgaaaccgcggggaatccagcgtggttcttgatcgacgcccgg

SEQ ID NO: 10367 - DNA, 123 bp, Emericella nidulans
ccggggcgcacgggtcctggttctttcccggtacgaagaacatcgccagtgactgctttgagaggtattctctctctaaggactatccggcgtgcttccactcgcccgtggtggccggggatc

SEQ ID NO: 10368 - DNA, 317 bp, Emericella nidulans
cgggtcgcctctagtggctccccgggcttcgggcgggcggctttatctgatcatgggccggggccctcgggtcctggttctttccgggtgcgaagcgccccggaggtgcctgcgctgggccgttttctccctccccggcctacccgccgcggtacccctcgaacgtgtcggcaaggggtcgcccccagcgtagtccggctcatgagagcggcgaggcgcgccccgtgctttcggtgtagtagcggaccgaatcttctatggtctgccgcgctaactggctcgcctgtgcccttgatctgcttccaatggcggagtgg

SEQ ID NO: 10369 - DNA, 199 bp, Emericella nidulans
acgttcgcgagcgtttttgtgcggccgcttacccggttctgtattgctagtagcctggcttgagcgtcttgagttcgataccactaccggacgtgtgtagttccgggggccattccatacggacgtcattctccgatcgcacctcactccccgcagcagtattctttcgctacggcagtggccgattcattcatatgcc

SEQ ID NO: 10370 - DNA, 2038 bp, Emericella nidulans
agagaaggagaagtaaaagggaaagacacctcgggagaattaacctgcaaacatgggctggtttggaagatgtcacgagaaaacacgcaacggcctcgggggcttcccaaaaagtcaggccatgtccaccctgcggacctcccctccaagccgggcaatccgctgcgaacactgtcggagtcacaggtgaggctttcaggcagagctggccggagctcagcttgaccgtctgagtgactggacaaaactggacgtgcacgcggtgcaagccccggcaatgttttgagcgatacgccctccttcacatgggtttcaagagttgggagacggatgtaggggccatcagcactttcaatacccggaatgttgacggagcggtcggagagcacatagtcaaacgctacggcttggctcgaagtgctgtcgaccctctggttgtgggcgacaaagtgtttagctagcacgatgctccaagcggtcatgaagaaacttgagatggtaatttcgttcttcttgcacgcttcggggactttcgaaagaacatgggttggttgaaaaggaagggtgacaacgcggccagcacgatgtagctcttccttcctggctgaaggggtagaggactgggccagacggatgtattcccagaagggaggaaagtccaggggacgatgggccagctttccatcgtacgcatcgagaaggtcttgcacgacgattgagcgagacgcagcgtctataatggtatgactaaattccaattcgcatacgactgacccattgtctttttcacggagaaccatgcgatggggaggggaaagatcatcgtcacggcagagggagccgctggtctgaatgcctttgcggatgatagaaatggctggcttaacctcatgcaagacaatggcgacaaaccgttcctcctcactgctgtacctgaacacagttcgtagagtagtgtggcggtgaacaacctggttccatgcgtgggacagacggtctatatcgacaggttctgactgagtagtggtcttctcgatggtccaatctccctgcacgcggtagaaccatggttcctgggactgacgccagagcatatgctgctgaatcgatgaaggggtgtaaacgatctcgacatcgcgctcaatgcaaacaccatttacctcgagcgaacgaacaacgtctgcgggacagacaagcggcgacgataacttcgcgctgagatctaagtcccgctcaacagctgtttcgagcaactcctggtaagttttcaccagttccgcaacacgctcacggtgcgcaatacccttgggaaaagtgaaagagacaacaagctcagagctcggcatctcaatagcagcaccaatatcgaacagcgaaaagcgttcgcagtttggatggccgatctcagcgatacgcacattctccgcaaacaacgtttgaccgggtgcgcgctgcacaatgctacctgcataattgaagacaaactccatttcctgatggcggggatcatctccgaacactttctgcccgttgggtgagagatatcgacaggcccagtatggatgaccattagcaagaacagatcggcggcgctcggatgctccaagtatggcagtggtggtgttcaaaagagtgtccttcggaagatgaatagggaatgcagccgtaaaccagccaaccgtctgcgagacatctaaagaggcatgccaaggctcgcgaccgtgtccttctatgaatattgtaggggtgtcgcgctcggtaaatattcgtttaaaggcgagacgaaatgttgctagcatgaggtctgtgggatgaacagtggcggtggtgaacttctccaacatttgggtagtttgtgttgaggaaaggcgaaagtcatgctgaacaatctcgctatacgtgtttgagactgcctgcacgttcgacggctgccagaaacgaagattgactggggccggcgcgaagggaagaacggcctcgggaatcagagtagaagcgtattttgtctgctcacggcaccactgctggaatgtgagtg

SEQ ID NO: 10371 - DNA, 109 bp, Emericella nidulans
tccccggacttcgggcgggcggttttgtctggtcacgggccaggggccgacgggtcctagttatctacaggtgcgatgccacccggagtcacctgctttgagcggttat

SEQ ID NO: 10372 - DNA, 244 bp, Emericella nidulans
ctgcgggtcgcctctagtggctccccttcgtgattggggttttgtttgagacacccttttcatttttctttttttttttccctgtggctctgtgttttgtgtgagtggtgtttggcttttcgtcctcctggcgtcgtgctgtatttccgacgccctcccctaccagtgtcgtctccgccctggagatttgacaccacgttccgcgctgggctggtgttgtacctctacgcctaaagtgccccgt

SEQ ID NO: 10373 - DNA, 446 bp, Emericella nidulans
caggggttcacatgcggggagctaggcgaattctcgaccgatagggttaggtcacattgtcccccgcaggctgatatgtggaggaattctccgacaaggatgactgtctgtacctgtcgtattccctcccctccctgtcccgataatcatatatccaagcgtgctggtcattatctctccacgttcgggcctgtgttcaccatggatacaccacaatctgtctcggaaagcagcccgacgcatcgcaacctataccagtgcggaacatgctctcaatcgtatgcccggattgaccactccggcgccatgtgctttccgtacgtattctcgttgcttgcaggcacttcatcgaggtataatgtggctgacgctatcttgagacaccaagaaaagcccatcagtgtacgtgtgtagcaagcggttcgcagaatgtacgtctcccatgg

SEQ ID NO: 10374 - DNA, 1151 bp, Emericella nidulans
  unsure (1)..(1151): unsure at all n locations
tgtgctgatgaaactgcagccaagcttttgttcatggtagtcattattgacatttgaccccattcaggtatatgaagtcggaaaacatatcccttagggcttaaacaggtcgtagccctgtccgtcagcccagttattgtctaaagtaaccatccacatcgtctatttatactgtgtgcgcgcgtgaaaggaggtcgtagtctgcgtaagtacgcgttttacaatggctagcgtagcacgagatcacttgtggaactttattaatgttatgcatcgtgagataggtattgcagtgaagatagaacaaaaggactgcagagcctaatgcttcactagacggaatatggatgctgaagctaggttcctaagcatagagtttccgtgtcataatcatgccttgatccgcgtagtaacctgacatatcaatatcgaaatgaactcatagccttacccatagcggacccccaagtccacacagtgctttgtgttcagaaagtattcactatcattacactgtttctgatgacgttgacacaagctgggtacatgtctggaaacctcagttccttggttggctcctagcagctggaacctagcggtagtttaccaagttgtatatgggggtttccagagcattctgtgtcgtctattcttattatttggaaattcaatgacactctacgaagcaatctgcttagtatccccaacctcctttccctcccatactttattaggccattcacttttcacctagcaagcagaattcgtgtcccccccactccggtcagtttccaaccagacttcaaaagaaacccctggagcctctcaactctattctaaatcacgcatggacgtcttgtcaacgaaatcctacgcagcacccccagcagccttcgccagcgaatccttatgcagcctcttccagctgcctaaagacccgccgatcagcgttgcaattccaaaagctgcaataatgattgcaaagacagccttgagcccgaccatgtacgcactaataacaagaggaatttggttgggttcgaaggcttctcgaatctgggtcgcacctgtcgccagggcaattgctgggtcaatctcggggagcacncagcaagttcaatgagcagcaggatatatgaatacgcattgcg

SEQ ID NO: 10375 - DNA, 2185 bp, Emericella nidulans
ttaggacggagcggggtgggctggagatttcacgtacgtctttgcggcagtgatattcgacaactgagctttgcgaccaacctgtctctcaccagagttggtgtctacatcctgtcagcactgcatagaaaaggggtcgacttcgtcggatagcgtactcatcaccaccaccggtgcctgcattttggcggtgtttctggggtatcagcggaagaagcgaaaaagcgacagaaatacccgcagcgacgaacggaaattcaaagtcaagaggaaagaacgtcaaacagtcgcgttgcgaggtgtgagatctggagttgctgtgcccgccttcacctcaaatttccagcgctgctcgaagtgggattgcggactggaagctcactgccgctatccttttttgggactagtttcaattcccctgttctttatgcctcaggaatcaactcggtcttagggatttggattcaacagcttcaacaactgctcgcacccttcaatggttaggcagctatcaatttcaataagacgcccttgactcgtcaattctgctcagatgtccagggtgtaagcacgtccaacgcatttgattcctcattacgacatctaataatgatcaggaccagttttacaagaactgattcaaccaacgacttttgacatgttcatttcttgaagacatccttaacccgtcgagatttcaggcgcacacgatcgcgcgcggccaacatgagcgatgacagactctcgctcgactgctccggctggtggtattgatcgtgactatctcgagcctcatacacatagtagggcccagcgcacctccatgacatatacccttcctgcgatgatactctgcagtcatggaggctcgtaagtaagtagcgttcagtaattaccgtgtccgcttcagacaaaggagtctcctctcggggcggaatgccacacagcctagaagcacgaccaccgccaaccttacccgcgtcccctttgccatcgacaggttcgctctctatttgtctttgcccgtaggtggcaggagcccattcttggcgtatagggcaccaagccacactaccgcgacgccgggaactatcatcgtcctcatcagatccctccaaaacccgctcaacatccaattcccttgcagcggcgaccttcgcaagcatcttcttgaaccatttctctgcgtagtaagtattacactctttcatgtccacttcctgttcattctctggccctgattcttgattcggctccggctcctcaattactcgatccaggtgtcgggaatggggtcgagggcggctctgagccagacgctgttcccccgttaaccgttgaactcgctcagcttgaagttcgcgcatgttattttgaagatggagagggagtttggagagggcgtcttcgtcgagttgcgagatgatttcttcctccgaggctgttgagtacccatcaccatcgccttcggcgtgggcctgcattggtttctctgttgctgcgcggctgcaacggttattccgaggttcgatgtgttttctgatggagctgaatgggagtgattttgcgactagggcgctgcgggaggaaatgttgcctggcatcttggtttgcgttgcctttgtgaggggctacggtggctgttcttcacagtgtgctcaaggatagagtagccaaggtagtcttgcagggtatctcgaagaagattatgaatgtaaatttgagaatgaaagagtttgtgggagacagtggagagcttaaattttgttgatcgatttagtgtctaggctatctgtaaatgaatttggatttaatccatgtgtgtgatgctgtggtgatgtctccatagcaatgtggttgaatgagaagataaactgcactttggaacactgttagctggctgggtgcccatccactaggtagagctgcctaaacgaattggcgtgtgcaacaataacaaacttggcaatagtgtagcatttccaatcattattacacaggggtatctgagcagtcaagcaactgacaatggattatatgccaaaaaagcggagaacaataaccccatcaaatgtgatcagactgtcctagacctcaaaactctcgactttctccaatatcgcaaatatcaaagactccagtctcggggtattcgtgtttcttcagtgcctcgttgagcttccgc

SEQ ID NO: 10376 - DNA, 188 bp, Emericella nidulans
  unsure (1)..(188): unsure at all n locations
tttgtgttggcagggcgcatggagcagcgtngttgggacgatggtggctgttttcaaacaacagacgaaagctgggaatgggatgaaggaaatgagtcgggaccggactaagcaggaaggagacaagaagctcatgaccacggatattgagacggatatagcggttgccgaagaaggcgaagagaaag

SEQ ID NO: 10377 - DNA, 1163 bp, Emericella nidulans
gaatttatatgagcaaagaatgagtaggagtaacatagtagatgggcttactacaacgcagactgggagaaatagatgagacatatataggaaaactgaaaagtaggtaataagtgggaaaagaaaaaaaaacgaaagaaagataagagaagataaaacgggaaaaaatgtgatattaatccaaccctggaccacctgctttccaactatgtgactttgttcattgtgatttaaggcacaggtgaatttatctgcatttaatatcagttattacttctctcatgtttccgacgtaatgtgtccgacgtaaatgtgacatctacgattgtccgcattaactgaaccgaagaaaaattcgaaggcgaacatctgggcgggattagaatttctagatgtctggagtatatgctctacacattcggagttagaagacaatcgtccgtataaagaaaacaaccgaataaaagggtatctcaagagtcagtttcatcgtgactggccgtcatcaaacaatgacgcgcccaactagaagaattgactgaatatgaagatccaactcatcccaaccatcttatgctgggcattcagacgtaacgggctgaaatcgcactgctcagatacatcaaatgcagaaaggtcccgagatcataaacgcgaacgtagagtgttcgccatgcaaataatatcatgaatgtgaagcaagggccgtattaatacttcaatgatccatcagtggttaagtcaatgattcctctaatagatccagaagtgtattccccgattgaacagatgatgcaggagatggtgatctctgcagcagctgctgtgagtcatttgaattcgaacccacactgacaactgtctgtaattgttcctccgatttgtctgtaatttgattcgagtccaggttcaggtttggccgagcaccctgtggcaaggggccggcggatgtggatgcgagtgctttggcggcagaattggctgcggctctacgggcagccttcttctctagtttgcgtgttttgcggtttaatcgacgctgttcggctgggtcaaattcggagttgcgatttggggttttgtcaacaagcccaacgccggggccggcatcagaggtgggattgggataatgaagtaaatgtacgggtccgagatcgagatca

SEQ ID NO: 10378 - DNA, 518 bp, Emericella nidulans
aggccttgcgcctacgtgtctcaccttctcacggttcccagggtctggcatttgccctgccttttctgcgagagaaggcttaagaatactaatgctgccatatggaacctggccaaacatgactcttgacagtctattttcagacgagaaaccgggttctttttcgaggttgattgggaaaagaaaagcttggggcttttgaactaatgggacttacaagaggcgtgaccacctggaatggctctctatcgcagtctgccggatgaattccaacttgaattacgttaaccttattcttttaccttggctaccctcaaactttgaatagggtctaatgaatttaccgtgttgcccaggtcctttcttttgatcagcgtatgcgaattgctactacatatccaaagcatttgcatgcaccaagattgatatgtatagtcagtgtccaggcgcggccacatttgcaacagtcccgatgagcccagattggacactcatgagaactgttttacgtccagttg

SEQ ID NO: 10379 - DNA, 2601 bp, Emericella nidulans
  unsure (1)..(2601): unsure at all n locations
gttcagttcagccagctgggcgttctttgaggacagttgctcgaattcttggaagctcttatccttctggctgttgatctttgcaagctcctcagcagcctcattgcgtttctggatcaactcttcaatctgaggcgtgaaagaatctttcagattctggatagactccacaaagtcccgcaggaccttgttggtaagtttactcaggtcaaggggaccactactgccaccacgcttttcagactcgaggtgctcagtcaaaacagtgagctcccgcatgacaatctccttttgggcgtccaacaccaccatagtcgatcgtttctcattaagctccgtgttgacctgcttcacatcagcagtagctttgaggacagactccatctccgcaatcttctgatcccgctgaaggacccgttgacgctcctttcgcagctcgctccgaagccatgttacttcgtcggttcccatttgctccggagagctggctgaagcattggcagacccgttgacaggagttttaggccactttgcgtcctttgataaccgtgtgcccttgtcactatagcttcgaccatggcgcaccgagttggacattctgcggaggaatgattcgctgttttgcgagtgctgttcttctgaacccatgattctcgccatatcctcgtccatagagaaatcacccccgccactgtaacgcagaggtgaaggagttgctccatagtccgcagagcgaatgcgtctggctgctgaggggtgcagatcgaatttggacgcgcgcgggatttcggctgttcgtaagagtcactacgcggaaccgtggcgactctccagtttgagcagttgttttgttcaaagtgtccacagacttctcactccactgatcgctttgaggggctggagtagcaccaggagattgcacagtttcctttcgaggaagtttatggtgcctactttctagtgaatctccacgcttgggatgagcgacacgtggtgacgagtctgaggatcctccgttctcgtgcaggcgacgaagctcgtaagagggacgagtgggcaatgtagtcgtactctccgtagccgcagttcttgggtcaacagtcgagccgtctctcccatgggccgttgacgacttgtcatacgtggaataagagctgcttcctttatgacccaccggtaggtccgacctagaacttcgagcagagtttgaactcgctgccctattgagagaatcatcttgacgccagcgatgagattcgggttcggggcgctcccgacccttttcctggtaggcaatgtggggagacgagttctccattggggcgcgctctggagacctggtggagtggtcgcgagggggtctctgttcttcggagggatcgaatgcgagcggaatcaaaaactctccaccgtctgcatccggttcggtagggacgacagaaagccggttgctgcgatacgtgctcgatggcaggatcaaattatctgttcagagccgcagcacatcagttcactgcactacatcgtccgccgcaaaacantcgcgatgcttaccttgattatccacagacgaggttcccgcgtccagcgcaggcgctgccgttcgagagcccgcctccatcgacgagtcaacatacccgtcaacagagaggtcatctgcggcttgcggatggggctcgacctcttcaggaggcagcgaagggagcgatttgtctaactttacaccgggaccagtatgcttcttagacgttgccgcacgattcttctttcttcgtcgttgcatcaaagactcgtggcaatccatgcaaaagattccctgcgacgtccgcgcatagcgcaaattctcgattttccttttgcagttccggcatcgaaagcattgggcacagaaagcttgttcgccagtcaggatggccaaatcctcgatcttgttcccacatgagctgcaactgtaggtacaattgctgcagatcaatgagccgtctccgaggagtagaagatgcgcatccgaatctaggagtgtgctgcacgagctgcagcggaaacagtcgatatgccatcgatttccggctagagagagcgcagtcagcaagtaaactatggcgatctacatcggcgtaacacctaccaagctcgaaagctttgccttcttccaaaatctatccaggtcagtatcggcattcgcgctccttaacagttttcaccggacacttcatacctctccacagcccttgcaagggaatggaatatcctcctgctccatgggagactccggggggtacgatgtgggggactccatgaagcgttccacctcaaagagcgctcaacaattgatgtgaaaaacagcgacgatatcgaccccaagcaccgccagacgagaccggccagtccaggtccagagcgcgaatggtcggtcaagccaaggctattattcatcgatggtttaaagcgaggggtttcggggtccagccgcagatccaacaaaagacagcaagtttgcggtttgaaccacaatcactgagcccctgaaataacgattatcgagcgagggtgtaggacaggcgtccgggagggggcggctgtggaggaaaagaacacggg

SEQ ID NO: 10380 - DNA, 502 bp, Emericella nidulans
gcgatccggagctcgagatgtagccgcatctctttgcgggactgcaaggaaaaatctgtctgttgcggtcccttgcggaggactgctatctcgaactaggtaggtgataggattaagccccaaattgcaccctcaatcggatctagggcccgcattgtgcacccagaaatggcgccttaaattgttcataatggggtgttgagtggatcaaggctattcaggatgtgagatactcttttccataggttagaccgtgtattaccatacagctcggtcaggggagctgaatcattcagtgcggaaaagaatgaggacactggtaaacatcacttgcttatcgggggcctcctttttgacattgaactttatgtggaagcgtttccagcaactgctcaaataggtgacaatatctcaaaacacctgtttccgattcggcttggttaaggcgcctagggtcgacggcttcaactgttttcggggcaaaaacctacccaaccagtct

SEQ ID NO: 10381 - DNA, 1774 bp, Emericella nidulans
ctaacgcatccagcttacaattccccgcatagagatgagattcgcggccctgggcgcccgctgccaccgtcagtcatttacgtatgtgtgtcggtaagcactggcacgacgcctgtcctataatcgctttactccaggtttttaggtccttaagacgctcgttgatactatgagatacctattatttccgacgaccaccggcatagactccaataataagcgtggacagggcggcagtgcctacgtttagcctgggagccataccacctcattacctgcgtgagccgtgaatatgttgatacctaccggactaggctaaacgaacgggccgttctcgacatcgtgcggctggcgggctttagttctctctggcaatctgcatggcgcttgaactggaaatctctctaccagtccgggcttgggccagggcgcaccttagagcatggggcctaattagtgggcatgtgaccccgtcatggtgaacgatcccgcggtatctaggtggtacactatatacggggcgcgggctagagagtggggttggtaactcgtgagctaagcatccgacgattctgaactggacggaatcgttgatactgggggttagcttgcagggaagagaagctgaggattctcgccttgcgtcgcattgtggatggggtttcgaataagcttagacagaggagatgagaccagattaaatgaggcgaggtggctgctggtgcagtgctggttatctgatctaaggctgatctcgattgtatcagggcatctcgattcctgttggttgcgttgtcctgtaagggaggtaaggtcgtggcacaagcatctaaatctacaatgtctcggtaggtagtactatgtataaccgacccatgagaatggcggggttattatttcctccgacagggacacagcatgaactttcttttaccctattcgttttttagcgtcaaagtctatcatctataccgggcattagatcgcttcggcgagggaagtggcagtagcagggagaaggaggaggaggagtagtagtagttgtagcagccttgggatcacgcattcaggtcagatcaaaaacccagatcgctaccgtcgtctccaatgtcttcagaaatatccatatcatcagcgtcttcgtctaatccttcaaaacgcataaacttttcgtttttggcgtcagtctgctcttcaacaccatggccatcctgaacttcgcagtcctttaaaacgcactcgcgcccgacttggctgcggcgtccgataatgcatccagtcagctggcagcgttcaccgataactgctccatccatgactaggcagcgggttaacctggctccgctggcaatatggcacccaaccccaatgacactctcctaatcacgcacttttcctccacggtgacgttgtcggcaaggaggcagtcggactttgtcactggacaacgttgagcgacacccgcaggataggccaccttttgattgtgtgcaaacggagaggcggctactttgccgacttcttcgatggactcgagcttcgcaaggcggagcgatacggaaagaagaaggggcgaggcatcgacgcgcctgataagaggtgcagaggacagggacgaatgcatgtaagccagtaccgggggagtggtgagtttttctttttgcggcggctcaatatcagagtcagggcctaagcatacgaacccgcgaggcgaattggaattcagccggaggttcagacgctgatgtgttgtgtaatacccggcagcagtctc

SEQ ID NO: 10382 - DNA, 456 bp, Emericella nidulans
cgtatagtccatgtagtgtagaactggcgtgatgcagctgggaacgtccgcgttggtcttttattagggggacagcctggagcagctgcctgtcaattctggtcctttctcttagcgataataaaccaagtatattcggtaatttgctgaatgtcgtcgggccttctgcgccaacttacacttatacaaggcaagctcagtagcttccaattattcttctgctgaggcaggttgtctctgagtccaagatatgcgataggtctctaagagtggttagctaccttgctaaattctcctatttccggctcagcctatcaggacagacctcagtaaaggatattcggccaaagtgctatcacgatcgccgccaaccaataaaaatccctattatctgttgattgtcttaggggagcctcgacacctagcttccttgaactgagacacagcaggtagagc

SEQ ID NO: 10383 - DNA, 628 bp, Emericella nidulans
aaatgtcgaagaagcaagcgagtcactgcgcgactaggcaagacgggcctaggcaaggcgggcctaggattatatagaccagggcgaggacagcacataccgggtactgagaggctggtgggtagggagacgggctctcttcgggctgactagagttccactgtggtggtggatactgcccccgtcgactagggtcgttgtagtcgttgggattgctcgggttcggattgttcgacattggaaggtcggggagcaggcgatgctgccgaaggacgggcgaggcgaaggggtttaagaggaacaatgcaggatgatgtatgggcgctgggcacgcactgtattgcgggcgtttgcggtatgtaacgtatgttatgtacggtacgctgaaagagggtgagtaggttgaataataacacggcaaataagagaccgggatgggcagttcaatcaaagagcttccgtcgggtgatgtgcaagactagcgacagcctcgtggtcaccttgagccgaacagggagacagaagcgagaatggaagcagaatgaagagcgaaaagcgaggacagggatgaacttgggaagacaggggtggtagtgggagagcggtggagggaagaaggaaagcggag

SEQ ID NO: 10384 - DNA, 2245 bp, Emericella nidulans
gaggaacccgctgagagcaagccggtggagtccgccaaacctgccgcgccaaagtcttgggcggacttggttcgaaacaagaaccttgctcgtaacgcagctagccagagtgctccatcgggtgtggtcaacggcgtctccaagagccagtccgttgccgatgtcttactcaatctaggagacgatgtttctcagtatagcgataaagtgaccttccttgaaccccgagggctcgtcaatactggtaatatgtgctacatgaattcggtgcttcagattttggtttcatgcgtgccgttctatcagttcctggatcatattgggaagcgcgcgtcccacagtttccacagcgactttcccatggttgacgctctaatcatgttcatgaaagaatttcgagtcattgatgccgcccgcaacgaagagcagttgcgaatgaggctgaaggcgaacgagctcgagcaatacggagaggcttttattccagagtttgtgtatgaagttatccgccaactaccccgtttccgagacatgcgacgcggccaccagcaagatgcgcaggagttcctgggttttcttcttgaagaaatgcatgaagaatgcgctcgcgctactagtgccaattcctcaaccgagcctgcatctactgatagtgagaacggtgacggctggttggaagttggccacaaacaaaagccagccgtcacacggtcttccggacacattgcctctgaatctccaatcacaaaaatctttgggggcaagattcgatccgagttccgcgtacctggtaataaggcctctgtcactcttgaaccgtatcagccgctgcaacttgacatcggcgccccagagatccataacattgtggacgcactaaagggcttgaccaagccagaaagtattcagggagatttcaattcttcgcgtggtccatatgtgactgcgaccaagcaagtcttcattgagagcctgcccccggtactcatccttcaccttaagcggttccagtatgacagcgtcacccatggcacgcagaagatctggaagaagattgggtatcctttggacttggaaatccctcgagaagtgttcccgcctcacagacgtaatgtcatgatggctcaaggtggacttcccaaatatcgtctcactggagtcatctatcaccacggcaagaatgccagcggtggtcattacaccgtcgatgttcgtcgccaggatggccgcgagtggatccgccttgacgacaccgtcatccgtcggatcaagagcgaagacgttgcagaggccggtggagaagaagatccaaaggtgcttgcggcggcattggagcagcataagcgtgataaagatcctgccaatatttatgaccacatcaaccagggcgaccagtccgacgatgagcgaggttggagccaggttaacgggactggctctgggaactcgagcaagaaatctgcgtctgctatcaatggcactcccagccagtccaatacatcctctggtgttcgtaccccgatggggcgttatagcactcgtgacaacaaggtggcctacctgctgttttatgagcgcattccatgagttggcaccgttcaaccggcttatgccttgaattgaaatgcgtggagcactcagctacatatgagagcccattcaacaaacaattttatggacgatgtgctatgctatatgaccagctgcgtgactccacataaccgttcctgaatctcggcttgatcacggaactgtcatcagttacgtctggtcgttgcttttaccctccgccttgttccgactgcaatatttgtttcgtttcctttcgatggtacctttgaccgcctgtgtctttctccatacttaccctcatgaataccttatggtagctgcttgctatcttgttcatttccgccatctactcgtgatatggtatgcttccttgtctctgtttacgacgccgtatctggtggatgcggatgccgctctgatatatacccgaatttcctcgcatagccctttggtttacctcgcccatggcagtttgtgcttcgacttctgcttcgtgtgagacgggattataacgactgcatgattttcctttgatagatgtgcgtgttatgaagagcgtggttgtgttgttgctgctgttgccgagacggcttatcgctacttggagtgtgtatgcgttgggtgttgtcagagtaggcagttatgtttctactatgcttatattaatggtggt

SEQ ID NO: 10385 - DNA, 1825 bp, Emericella nidulans
acccacccccgtaatttaagaagcgcgctcatatcccccctagaagtgagtctaaccccctataaatgaaaggatacaataattaaaggaaccccccaggggccccccttttgagtatttttataataatgcaaagagggttaattatttaccgcaaaaatagtttttggacctataggaaggagggaaggaaatttttgtcaaaaggatactcttatttgcaggttaggtttaatacccctatgttaataattatcttaaaaattccggtttcataaacataggtcattggctgttggtatatttcacccagtcttttaaaatttttgagagggactgggacccttaataccggtgttcatgtgttaatttgggtgaaaagagcgtattgcatactagtcgacgacaaggtccaatttcataatggagacaccaggctttaacgtagattatcctgcctgcgttaaacgaaagcacatggttgaatcctgcttcttgcatattgatacactgccttattattctctagatagagtttgctacataggtatggtatgcgacaatagtggccaacgctaaaagtatatgcttgtgctatgctccaacgccatcgtacgaccagtacacagggtgaataaatatataagatggaaaaaaagcaaagaagaaagagttaggacgcagaccgactacctcatccacagtccagtcagctagttagactggtagtcacttcatcgcttctcatccccaaactccggataactgctcgcacgcgcatcaataacagaaacctttagcgcgttcctcctctgtcccgcaaagcccagtttctcgtcttcgtaggttgtctgtgctgtcacagccgcgggcggaccagcagatgcgaaattccggctcggcggctcgtactcagggaccggttgagagcgagattgcgagtcagcagcagaatgggcagttgtgtggggatttggaatggctgtgagaggaacgtctgagaagccgtcgttagggtctaagtttgcagcagggccgggacctccatcgccgcgatttcgatcgtgggatctgaaaagtgagagagcacgaatgaggccgaaaagcaggtttaggaaccagatgagcaggatagcgccagagatgagggcctccgtggctatgccggactcaattgcgctggtgacgcgaaagacgacttctgtgatcttgtttgaggttgaggcgcccgcgtcagagaggaagctctctgagctattgtcgtctgacaggctttctgctgcgccgcgcgaaaacgtgtcgttgctgagttctgggaaatcgatatgtgcgttgtcgtgtacccatgttagaccgcgctgaatacccgcaatcttgagaccgatgagacagtcgaacacgtcctttagggggtcgtagaggagggttccgccgaatgtatcatttaggacgccagtcgttttatccacgaaggtgttgagcgtatcgttcacgcctgttgtggtggagttcacccagccaaagaccttatcgttgagttctgtgtttatatcgccgatggcgctgtttgcgctgagcgcccactcggcggaggtattatcgagtgacgcgacgactttgtcagcaaaggcgcccacttcggaagagagttcagggacggcctcttcgacggctcggaggaggagatattggcagaggcaggcaaagaggccggctatggctagggctaggacaccgtgggctgactaggaggggcgtaggccataccccaacggataggatctgacaccgcttgtgcttgagcgcttgccggcttaatccctgt

SEQ ID NO: 10386 - DNA, 390 bp, Emericella nidulans
tgacgaggatttcggaattgaggtacgtgattgcaccagccctaggacgcggagattgggcgcgacggcaatgtttcgtggatcttcgcgtgctgacctcatgcttgttttgtgtaggacctggaaaacgagtgtctcaagcctggaccttcggagaagctcttggagattggtctctgcctgcttaaatgggtttcgtcgcatccggactcaggtatgtagatgtcccgctccacaatatgactgcggaagttataactgtatctaataaccgcagattcgataactttgacgagtatacgagacgccagtacaatgcgaaactccacacatccccaatcccttcgggtacgacgaggtcccaaagcggttcttggactttgatgtatt

SEQ ID NO: 10387 - DNA, 478 bp, Emericella nidulans
gcggcattccgctgcgcgaggagtgatgagggacgaggcgagcgggctgcctcgtcgttctcgaacgtctgccgccgtataaccgggcgtatatccgggcgatgataaatggataagaagtggagtgtactcttatcgcgagtcgactccctgtcatgtttcctttgcctcagtctgcgccttgacctgttgcagcgcctgcagaatcaagtccagcttggtgttcaactcttgtcgcacctcgaccatttcccgcctcaacccctgcacgtccatccgcaagctccggatatctacctttaaggtctgaaactcggccgcgattgtaggcccgctggcgatcgtcagtccggcgttcgggtacggcgtatacggaggcatgggctgggcgaccggcattgataacggcatcggctgtgacggtggttgcgacggtggttgcgataatggctgcggttgcgatacggctggcggtggg

SEQ ID NO: 10388 - DNA, 1545 bp, Emericella nidulans
  unsure (1)..(1545): unsure at all n locations
aagtaagcaacataatttgatatacctaaatttagatacgagcaatcatgaccctgcattgttaaagcatcaggaaaattcgacattttgacagttcttgaagcttgtgctctgagccattgctgcgccaggacatagccacgatcagctagggtagggagagaataaccacgccatggaaggactggaaaaacggaggtcacgaaaggggccatttggtcggaaaacagcctgatggagatcaacagaaaaacagcctcgctcacttttagcgatgtagccaggaaatgatcatttcggttatcggcaagctcaggccgggcgatgagatgacttctagtatagcgtaccctcgtttcttctagcttagcacttacattcgcccgttcatgcgctgttcatcatcagcgccggttactcaagggttgctgactttccgaagggtgagtaacggggtgatgaagaccgcgcagtgctctgtaaagatggatatagggacgtcacgtgcgtttattggctgtgggaaagggcgcaacaccatcctcgatccttctctgctacgtacccgtcattcgcgaggcgcaatgccattgcattctccgcttcgctgctcttgcgacttccgcaagtcaaggaattatagcaccattcatcactattccccacttgacggactggacgcgaccgcccatgttattccgtccttaggcgctgggttcgccccaagctcatcctcttctcttatcgattggaaactcgtgctcgaaaaagcacaggacgactgcgtcctagtgtcgtctggcgcgtagccagccagtaccgttcgaaacacgtggctgttgttggatgcaggtccggaaggaagagaaactatgctttatccaggctaaggctgcgaagaaatcctggctcaagttttgagattccaaatcaaattactgatggcctggattccaaaaattgtagtcctgggtggggtccctcaatcaaagacaattctcgagtccccatctcactgctgggctcgggctgttgctcacgagtcacagacctgcaaggccgcggcgcgcaccaggccccgccaaccatggtggtcagcccaggcgtttaattggcgtcatttatgggtcgattcttaggcgaggagctgctgcccgccacgctaatccgagttgaacttaagccgtgcattcttatccacatggggtttacagccgcaataagaaaagagcacgacttgatcgacaagccaccacatggtttacccggggcccgcttnttgaaggcttttgaaaccttccgtttgcactggcttggctacccccgccgcaggattctttactacaactgggcgtttataagaaaccggatatgtgcccctttgcggtttgggggtccttgaactctcacaccccctttttgccgctaaggggtaaccaccgccgtttttttttttatgcgcgggtattcggggtcaacggtcaaacattgtattctactcggtgggtgccctattttctatcttcttctcctatttaccttctc

SEQ ID NO: 10389 - DNA, 1300 bp, Emericella nidulans
agacggcgtatttctactaccacggctgcggaaccggcgttgcaaccatgaatccagccgcggacggtacctcgcaacagctcccgaccatacaactcactccctgcgaaactacgttgaaggatcttcttctcgacgtcgcccagtatattcaagactgcgatacagcgaacagacatggcgatgggactaagactgtccttcggttcacaggaggctgggtgcgggataagttgttgggtgtggaaagccatgacattgacgttgcgataaataacatgactggttatcagtttggtactatgcttaaagaatatctggatatccccgagaacttggataagtataaagggcagaatggagagaaggaactcagcctccataaaatagaggcgaacccagagaagtcaaagcatctggaaactgtgacaaccaagatatttggcttcgacgtggacttggtcaacctccgaaaggaagcgtacgatgagaatagtcggacgcctcaaatggagttcggaacagcggaggaagatgccttgcgccgagacgcgacgataaatgctctgttctacaatttaaatgaatcaaaggtggaggatctcaccgggagaggtttggacgacatgcgtgatgagattattcggacgccgatggagccatatcagactttcaaagacgacccccttcgagtgctgcgactcattcgctttgctagccgactagggttccgcattgacaaagatacagagaatgcaatgcaacatggcgatattggcgccgcgctcaagctcaagatcagtagggaacgtgtgggcatagaggtgcaaaagatgcttcaaggccctgatccacgtggtgcgcttcacatcattgatcgccttaacttatatcccattattttcgcgaacttccaggacgacgttacagcggactattccacttggtctctcgcttacgaagcgctccaccgcttgtgttcagaggatgattcaggaactatcagtcgagttcgcagcttgctcgttcgtgaccctctcgagacatattattcctgggttattgttgcatttgcaccttggtcaacggttcctacacgcgttcaaggaacgaaattgataccgccgcggatggcggagaccgcacgggacagcctgcgggcggataacagaaccgtgaatatactaaaacaaacaggtacccattggcgcaacatcattgatgtgaaaaccgcgctggtggaaggccgaatggaaggaacagctgcggaagttcggcagcaactcgggttgcacattcg

SEQ ID NO: 10390 - DNA, 163 bp, Emericella nidulans
acatgaacaccgtgcttctcggcgaacaggtcatgttcccttagtccaagtacgacgcctagcagatggttatatagggctccatcgacgagggaccgtacttcttcagtcgagttctaggcaatcgtcgagttcatgcatctcggagagcgcgtaaccctcc

SEQ ID NO: 10391 - DNA, 936 bp, Emericella nidulans
ctgatacagaggtgcacgcaaaaacatcccgcatgaaccaagatcgtgtaattgaaatagaatggaccccgagacaaaacctggcagggaatagagttgatttccacggagtctttatccagatcttcatattctccgagcccatgggcccggctggtttgagaccatactcgcgtagccctagcgcagcaggccaagcattctttttcgtcttcgtcttgctgagcccacgggagatcgaattattttgacttcgatcgatgcgatcatgcgcatccatcggttattagatccacgctaagaaaccacatatatgtgggtcggtcgacccaaattccagcctagcctgctggctgctgaagctcctgttggccgtctggcaaaacctcggggcccatccaacgttggcccccaccgctaggacacttagggcagtcgctacgtctgcttgggaagttacggggtacagttagggctgtggagaggcctgaaacagcagtaatcacgacggatggggccattcaatagcttcggtctctactacggagtactccgtaggtccaaggttccggcccttccgaggtccatataatctcgaaatccaaactctgattttcctgcacggctagttggtggcttcggttggctgcggtgggctgaggcttctgttttgatgcgacccaggtccacaatgagtgaaagcgagagagagagagagagagagggagagacggaatgtgcgtgcgcgcacatgtttgagggagatcgtaagagagtcctgtgtccaatttaagagtggtccgtggcgcaatttcttattgcttcacgagagcataaggtacaagctaagcagctaggcgctatacggacgtcactgccggtgccgtattccgcgtatacgggctcgttcctgcatgcgccacgggcttatggcag

SEQ ID NO: 10392 - DNA, 377 bp, Emericella nidulans
  unsure (1)..(377): unsure at all n locations
nnnnnnnnnnnnnnnnnnnnnnnnnnnnnnnnnnnnnnnnnnnnnnnnnnnnnnnnnnnnnnnnnnnnnnnnnnnnnnnnnnnnnnnnnnnnnnnnnnnnnnnnnnnnnnnnnnnnnnnnnnnnnnnnnnnnnnnnnnnnnccccctttttgggggggggctcttgctttgttacttgggccagatggtcctattggcgggggtggtggtggtggtatactctcggaggggatgtcgggcggtagtgtatctgcggctgggggcgctgctaatgggggtgtttctggcagtggcgttgttgctgtgggtggtagtgcatttgggggttctgttgggtttgggttgggtagtatggctattggcgttgttgttgttgt

SEQ ID NO: 10393 - DNA, 1264 bp, Emericella nidulans
ctctcagtacacttctcttgcggaatctttctcacttttatatcttcctcagcaactgctatacctggcattcaatccatcggtcatccgtcatacgactgctgcagatttggacgccaccaacaggtctatgctgaagtggatcaggcagagtaatagactttccaccatctgtctcaataggctgtgaagtttcatgtaacattggaatagttggttccgtacattcccagttcctagtatcgcaatttgagtagtacgaggttaatttatcgcgcaaccaccaagtcactcctcaacacccatttctccccatgcgtaacctcctttccctcgtgtagtagacattggtccccatgccgatgtaacagcgccatccccatttcaggtgctactgagatcggctccgggttaggatccgaccgtgttcgctgcggatagaagactgtttctccccctgtgcaggtcgagagatagatcaagagtgtccatgtagttcgggctggcttggggggcattgagggcgataggaatgagagagtgttggagtcatcgtctacgaggctaagttaggtcttgttctttgatactaggtaacgactacagattctgctcttcctccacttcttttcttcgcaccaggaaaggtatttagatatatagcaaaaggagacgactcacaatgctgtgcaaagaattgccctggagaataccggtaaacacgaatgttcgcattcaatcccagcggttccccgccccagatctctttcattgaccgacctccgtcgctatactccccgactccatcatcgacagaaacagggtttgtcacaagctcctttagcgctgttccccgccagaggttctccgcaaatgtagcatcctggatctgaaatctatcgttgacgcggacggcgtcgcctttcttgggtttcccaggggttgtagtgagtggtaaagaggcgaggaaggaaacataagtcttgcagagggaggcagggaggaagttgcgaattaggtagatctggtcggggaggaggggatcgaggtagagatcggaagaggggactagagggcggagagggggccagttaggaggttgctggtgggataaagattgagatggatggtgatctttctttgagggttttgattttggcatgatggtaaatattaatgagcgtattccggcactggtgttattaactgttgtaatggagtacaattcttttgttgttagatccgcatagtcgtgaattatcgc

SEQ ID NO: 10394 - DNA, 123 bp, Emericella nidulans
  unsure (1)..(123): unsure at all n locations
ttgaaaccttatcaggatttagaagctttaaagcctataggctntgcattctatgtggaccgattatgccaatcnaatagttatctgccgngatagcctgcacctaagtttcaagacggcttt

SEQ ID NO: 10395 - DNA, 977 bp, Emericella nidulans
ggtgatttgggttgtgctgttagcgccggcggcgagaacgctctgctatggaacgagtttgatgttttgatagccgcggaggctgaatatgtatctcgtcaaggaatttaattggtgaccgacagctttcgagttatccgcctttgataattctagcttgtaattttctggtgggagttctcatttgacagagtccagaggcgtatatcaacctggttttactggtggttctgtattcgtagcgtccctcgatgattgattggaataaagcagaggaggtgcagtttgtgattttcaggaccgttatttgtgtgaaactaggtaatataacattgttcgttgatgcggcgcagatatatatttagacgcggcgatacacaattttagcacaaaaagcgcgggtcggtagagggacctagcaatagtgctacggattatgagtccagtgatgcctgtcaagatactactagttgacaccagaaacctcgttatcgccattccaaacaccagcgattaagagctttcaaccaccatattatcatacgtctcagtctacagtattagattgtcttatttctccaggcctaactaggcacgttccagattagattgaataactgtcacgcgttaattacacgctagactcactacagcttgccactttgctaaatatcgaaatacgaaaacgaaaccgacctagctgaagggtggccggtagccgttcgtcaggatcagactgacctgaaacaggaccgtcaagaattgtaacaatggcacaataatggcatgcataatcaaggcgatccgtgcagcataccaccgcagcggcagtcgatcataaagcgatgatcatcgttgtcacctcatcaagacggagttgagtctggacaggctcgactgtggtttgtgctgtaaattaatagtggcaaacgacacggcctggatggcccaccggcccacaaatgggagcgtgctcg

SEQ ID NO: 10396 - DNA, 477 bp, Emericella nidulans
tagaatatattaaaatttattaggtttttttttagttaacttatgcttgcaaaatactaagcagagtattaaaataattttcctaactataaactacctgaactacctgctacatataataaataatttataaaaataaaaagataaaaataattaaatatgaatataatactagcccttatttgtttaagagttggactaatagactgtactagtaaataatagaaaaataaaaaatctttttacaaggacctagggctataaaaactaccttaactagattttaaaagtgaagaaagactactaggaaatcttataatctagaaacatatataactaataatgaagtagggtagatccattagatagtttttagagaaaaaaaagtttctaataacttgattataataatagaatctagcttaccataacctgagtatctttttagaaaattaagaaaagaagattatatatatt

SEQ ID NO: 10397 - DNA, 507 bp, Emericella nidulans
cttgcggatagcgggcttgatgacttcctccttctgggagaagaacgatcccatggtgcgcagggactgcgactcaatatcgaagactttgatgtaatagtagacgtgctccactggcagaaccacctccggctctgcaggtgcggcgtcttcaaggtttgcgggcgcctcggtttggtcctcggcgggggctgaagtctgatcttcagtgggtggttgatttggctcctgctcttggttatcggcaggtagctgcgtttcttgggtttcttcatctagctgttgaatgtcgcccgcgattacggcggcaatcacagcatcattctcatctgatgtggcctcagcactggcggccgctcccgttgaggtatcaggctgggatgactctgctatctggactgggctctccgcgtcctctggattttgttccgtggttgaaggtgcttgagcattcacagcaactacatcagcagacactggtgatggttcgctttctgacaccacaac

SEQ ID NO: 10398 - DNA, 453 bp, Emericella nidulans
gtgagtctgattcagtgtaccggggcccattcatgtgccacagctctgatctccttcaagtcgatcgtatgctacacggatataaataatttgtgccccctagccatgatccttaacgacctcggcatagtctgggcaggcattgcgtagtgagtcaatcaaccaacggttcttgcactgactattgaatgggctcggcattgtcataaccagaaggcactgatcctctcgaatacctggtaatgaatacttgtggtactgcgtccacatcaccagatcactctctgggcacaacctaaaactgaatctcatagactgaatgctgaaagaaaaccatccgtaatatatcttaccataaagacagccctggaatttaccgagtacttatacagtaaacatctcgacttacatgaagggaactatcacaggactctgcggagcgacctctcttga

SEQ ID NO: 10399 - DNA, 459 bp, Emericella nidulans
ggggtcgcggcaccgatcatgagggaacttgtgtgcgggggcacagcacacctgacgtgctcatgtgactgcgtgcgggcataggaaaattgttgttcgctcgcaatcatgctctgcagtcaaggcggaggcacgaactgcttaccctattgtgcatagcaccggagctaactggcattaatctcgctgcgctaagtgatcgatgtggagaagagatacctggtgagactgtttcatcgaataatcggacagcgcactagcagagccggtttgagtattaggacctctttcgatctctggctgagtagctcgatgggctcagtcgcagggttgagggctgccggatgatgtcactcactggcgttaacgctggcattcacggatgcaatggatagcggcggcaccaacttctgagcaggagggcagtagatggaccagatcggtagacaggacgagacg

SEQ ID NO: 10400 - DNA, 1436 bp, Emericella nidulans
ccaggttgtcctgaagtcaggactataatggtgcggaggtcccacaagatttgagaacccgggtagtgtctattatggttagttctgggatctgcttagagtacgtatatataatgatatcatcttcgccaacggtcagcgcactcgcaacatgaacctaaactgagaaaagccaataaaagggaggaggcttttaaagaccgaacagccgtttgtatgtctgcttcatgatactttaccccatgcactagcagaagaaatacagcaattaactactctggaaatttgctccgcggacctagacccctgcttcggcatgcccacgatctctgtagttatggttatggatatatcagtcggcattgaggccgacaagcggctctcacatacgactccgacatcaccagcttcgctctgccctgagcttctgtttcaagccggcccctagtgccttcgtgtctgcccgaggccatgacgcgaacaaaggtggaagtggaaagtcccccccagccggcccgacaccatccaagacgccggcggcctcgtgtctcatgcgaggaatgtcgccgtcgaaggatgcgctgcgacaggcagcttccttgcaagccgtgccgtatctcgcggcagcgcttgacctgccgatatcaaaacagcggcatggagacttatggcgctggacctccgtcgctccaagcaggggctggaaactgtggcaggggactgaattactatgattcacagccggggctagatacttcatctggtacatccgccaaagcggatgctggcatgatgacacctgcgggttcacacgggggacttgcctcagaggccgagtctagtgggggtcttcttccccctcagcctcttctcctttgcaacacgcgagagaagactaagtgtttccgcccgggcattggatatacaacacggatctggtcagtaacaggaaccgcactcagaagctatgcaggactatgctgagtccaagcagtttgaatggagcaggacccccctgaaggatagggagctgaggactctggaaggtcaaggagtcggcgacgggaggagtctagcaggcttaataaaccgatgctgggatctgcagcgatcaatcaaagcatcagaacccggcgagaggcggcggcgcgtggccaggtacagccgctgcactgccaggaagcttcccctcgccggaaatatgcagcggagtacgtcgatgcctacatgaacccgcagccatgcagtactccgcagtcctgcagctcgcattcgatctggacagtctctgcagggaactcaggcaggttctggaggcggaacgccccgctctaacggtgttggtcgagatgcaactccgtcatgcgatgctcgccctcttcaagccatttgtactgccaacacgcactgatgcccaattttacctcgctcggcag

SEQ ID NO: 10401 - DNA, 358 bp, Emericella nidulans
taaattagccagaaaattaagctagtattatatgatattatatagttagtagatgaagttaatagtttatatattataaatataaagaaaaggcagcaaaataaataatttaaatgataaataatatttactaagggcctatctatacaggagcatgagattttataatataaaaaaataaaacttggattagaatatactctacgaacttactcagagtataatattcaaagctatactagagtaagatactctataaatttaattatatagaaattattaagatatatataaattggttattaggcatagcttaaaatatctaaggataatattattacttaagctattattatat

SEQ ID NO: 10402 - DNA, 1750 bp, Emericella nidulans
acaaattagcaatgttgcctgcgttcatgcggttctgagtgtaatgttcttggactttgttcaggtgctatactggattagcaagaccctagcgagaagtaaaggcttaaatgcaggctcaccagaatcaaagctctcagggtagcgtaatgggcgtccgggagaccattgataatcgcgtgaagcgaatcccgtcgttgtatgtcatcgtcaatccctgggtgaatatgtcagcatgaggcattgattggacgtcattcgagaaggcttacgggctgcgtcaatgaagctggaatacgcttgtgacgtgaacaatggatctggtaggtctctaaaaaactgtttcaggagacctgcaacactgttcacatcatggttaaaactctctgggttggtgaagtcgacttgggacgagtctgccataaaaaatatgagtagcctttcaggagatagcttgggagaacttaccattgtcaaataaagccttcatctgactaatgtgagtagcacttccagagagccggtagataccctcgacatcaagcccgaacaactccactgcttgaaaacactgatacacaatcataggaacagcagtcccatcacgggcgtacagctcatttaacgagactccaaagacaggcttcagcggaggaaggttcaaatttggtaaatagccacttcccggggctggatatggttctttcggcgccggaggctgcggctggttcaagggctgcggctcaggaggaggtcctgacgcagttgggtacggcggctggaagggtggtggcgcaaacacatctggattttgagggtatggggctgactgggggctctctagtgggcctgatgatggtatttggattgggatttgaggagcttgggtggaagtaggtggctgatagacgggctgaggaactacaacagactgccgcttcgtctgtgtactctgaggactagaaacaggtggcgcagttggtcctcctagtgtctgcagaaggttaagcaagagaaacaaatcagaagacgtcataactcacaggatggcgatggtattgaatttgctcggaggtcacggcgccaggattaaactcatggcttaaaatgtaatcatggtaatctttctggttgtcaatttgctggatgacttcgcggagactcttgggagcagcggcaccctcccctggttcttttaatggactgatagataagccctgccctagcagcagcttctcattgaacgttcctagaaacatagtcagcagctgcaggctagcatagcatcaaaacagcgcaccaaacttctgcatctgcagagcaagtcccgagtcgcactcagagatcaattgctgaatgttgtgtacagcctgaggccgatgggtcgagatcagctcttgtcgagccgtctgagcggcttgaaccttggccttgtagtccgagtctgcactttgaactttgcgtaacaaatcttcctctctgctgggcaacagatttggtacccttgaagccgaactttccacctgctttctctcctgtctttacccggtcatactgctccgccaatgtgtcatatttggacttggctttctcagccaaagcttccgcctccagcactcgtttctccgctctcaacccttcatgtttccattgcttcccccctcgatcgatgttcccagcgagttcatacatgtaatcggccatatgcggcaaagtcgtgacttaatttaagaccgtgatccctttagta

SEQ ID NO: 10403 - DNA, 1793 bp, Emericella nidulans
agaccgattcgtcctgaacgcatcgcctgtgcagctcattttagttgtttgagtatttggctggcagattgggggggggtccccctgctcctgcatggaccccggcccaacgagtagccattgcatcgagactctgaaccaggacccagaactctggggcgacacttttttgccttggactatgtttccaggacagtagaagagcccttgccgcaatgaaaacacaaaacgtgaattggctacttagcggtgacatcggaagcgagcttttcagataatggtttgtgatggatgccacttcgaccgccgccgcctggcatgtgtccatactacagaggctcggcaagcggctcttgaatggccattcgggtagcggaaaagcaatgggctggtgcaggaggatcatggacgcgttgtgtgtgacgtgggcaagagtcaggttagggtccatccgcgtcgagccctgctgcgcgacgttgactgtccacttctgcggaagaagcatcttccaatgaacgagacggagatcgagctccttgaaccgggtgagccaagcgccaaactccttctggtcgttcaagttgactttctgctgcagaaaatatgtggttacgcggctcaaggactcggtagcctcaatgcagtaagcgtaggccccgacagtggacatatccactactgacgatgtagcaccgggagacgttccggcctctgaaggcgcgtctgcttcgtcttccacagctcgtgctggggctggggtaggatgagtagggaggaaggcgattgggttcccgatccggccggcggatttgtccagatgcaaagtaaggggtcacgaccgggttctctttacgccaggtgatcccatcgcacggcaggcggcgacggacatcatcggcggttaggctggtgttccatcccatgctcaccgagcagaagcggtccagggcaaagatggcccagaagatcctccgtcgctcttccgcttcagtccagtcggtaggcggcgggagtactctgtaaggctggcaaaaagggtgctgaacagcttcgtcatgctcgactgtgagctggaggtactcaaccatgcgcgataacgagcccactaggggccatgcctgaaaagcgcggccgctaccgatctgctgagtcttcagcttcgccatatatcaataaatggataggaatcctacatcattagaggctaagatgacaagagcctgcaggttctcaactgatggctgtttcatggcctgtgagacgagccaatcccgcgtattctcagcgtcgttgatcaatgttgccaggtgcgacgctgtctcggcgtcctcgatatatggttgagtcacaagtatcatagactgtatgacgagttgaagcttttcccgatcacaatcatctattagccgcctacggagtctcccctcgtggatgacaggcgtccacggatgaatgtagttaaagtatgcttcgagcacatggctgagtacctcgtcgtccggtagaagagggatctcggctgacggggctatacagtgaacctcgttctcgttcctccgtcgctttttagaagacgggccggcgcccaggctcccagactgttcgagtttctggaaaccggcagccagtgttgataggatggcttggatggcggagttgctctgttgaggcagcccagcgccttgcagagctctccagcccggcctgatgtttctcgagagagcgttccagtgcgtctgatgatgacccgttagcagcatcgttagcaaacccattagcagactcatcagcag

SEQ ID NO: 10404 - DNA, 595 bp, Emericella nidulans
taaatccaacgagcaagccccagagttcaaacgcaagacgaccctaacgttcgtgtgccctgcaagggaccccgagttcaggcgagacgatctcctactcgagcatgctccttacgagctcgcccccgtggatctcctgcaccgtttgcgcgcaaggcttcgcccgagaaacaagcctcgctgccgactgtcgccacccgggagccaaacaccccaccaacgcagaacactctaccaacccaagaaccaaaggcactcgaacactacagaggagtcccgatgaaaggcttgggcaaatttgaagactcggaagcaactaggtttcacgagttcggaagctctttcgaggaggatgccgaatgggtcaatcgggaggctgactacaaggataagattactttgaacgactgcatgaagaaggaaaatgccatcaggaaactcgccgaggaggcagaagaggaggcctcgacgaagaggaggaggatgccgatcttccggatgattcatccactttgcatgaattatcctcgacgatgacgatggaaatgagtctgataacgaggctggcttcgctgaaatccgatgagagtgacga

SEQ ID NO: 10405 - DNA, 139 bp, Emericella nidulans
ctggaatcacgggaaggttcttgatatgcgggatgtctgttgccatggtgtatttgtacagcagggagagggtcacaagaatgaagaggagtccagcagagtaaccttgcgacaaagagacaggttaagccgtgatatc

SEQ ID NO: 10406 - DNA, 1122 bp, Emericella nidulans
ggggattccagggcagtacgataatccaacctatcagcaggcggttgagaagattgtgtgtgctggcaagaaggctgcaaagcctattgggatagggggcattggaggccggctggatctgctggagaggtggtttgccttgggcgctacgtggtcactcagcgggggggatagtgccattttgcaggcggggatgaagaagattacgcagacctacgatgagattagtgatagggttgagaagcagacgggttagccaagtgatatcgcatagcgtccgattctagaatggaggcatcccattgtcccaaaaagagatcccgcgcggattcccgtaggcatactctccaagtcctgcctccatactccacacggtgtcgtcccaaaaaagcgacccgaaggagaagagctctgcagtattgaaatcctggccatgcgccagcgcttccgtcccctgcgggatatcgcttaaagctggaagtagcgcttcgtcgagatgattcaagccagacggcagatgcgtctgcgcgatgctgtcagcacctcccttgttgcttgcatttggctgcgcaaagcctaagtgccggtcagtgcctgttggtatagcgctatcccacgtgccgctctgccggagtttctgtgaaatgtgacgatacagggcttcatagacggcaacgtattgcgctgcgtctggtagggctcggcccaggtcccttaggctgtgctcgcatcgcgctagcgcatcctttgcctggctgatggtcctggagtccggaccgtcaatgctggacaggcagaacacgacagaaaggccggcagtgaagagggtctggaagtagctccgtgtatatgtaatctgctggctctcgtagagacggcagaaaatcacaatgatctgggttgcattctggagacacagcaagagcaggtcacgcggcggactgttaccacgcttcggcaccaggtccattgctttgcggacgaggatcaggcgctcgccgatccagcgcaaatcgaaccagtcctgggtctcgtagacgcactgcgtacgctcaaatactggcacagaccggcgccagaggttgagctcttcaaggaggcggtacaagttcgtgtagactc

SEQ ID NO: 10407 - DNA, 332 bp, Emericella nidulans
gatctagaataggttgtgtgcctacctcgcctcagggagagcgcgctacagacatacaggctacaggacgatgattgcgacaccgttcttgaaccgatccttgtgggccatggacgacgccacgatgactcaacttggaccagataccaccggccttctaccctgatactggcaagaatcatatccaaggtcgctttttcgagtggctaattactatttggggattagactaaccctgaacagacgtgcacaagattttctgcgacgacgagagctataacaaaggccacggtgagcttaacacatatctgggtaatagttcacaggatcgt

SEQ ID NO: 10408 - DNA, 545 bp, Emericella nidulans
cttatatttctgcaattgttgattcggaggccaggaccttcccaagatggctgcttcacaaggtgtcaatgtgagttctcgcaattgtccgatctacgccccttcgtaccatgactgactgtagcccgtcctcgcgacataggttcttcgttactcggctctcgtagctggtctcgtttatggtttctaccatcagtcctctattactgctgccaacagacgtgccgaggccgaacgcgaatatgcccgccagagcgcctgatcgaacaggccaaggcgatatggaagaagaagacgcaacctcaggacagcaagtcaacgggtggtatgttggaaatcaccatatgatcaacatatggaagcaattgcggatgctccgctcctttgtttcattacggtgctaaccggttgtctagtcattacggatcccgaggacccgaagttcgaccttgaggcattcctgaagctgaaggccggtgagcttaaagggccgtggacgtgcaagaataaacaataagacaaaaggcgaaatgaggggcggccat

SEQ ID NO: 10409 - DNA, 1384 bp, Emericella nidulans
ccttgcccggtggaaacttaatctgctgtaaaacattgcgggcaaagattgtatttgtgaaagacattgtgttggtccggagctttctgctagtatgacaaagcaccgttgtctagtggttaatgatatcttttccgttgagcacatgaaagctctcgactgtaggatcgatacactcaaaaaaaaaaaaaacttgtatagtcagcccctccgttcttctggtggggtggcgtggaaagatacgatggtattgagtagtcaaaacttgggtctacgaagccattgagcgtttctatcaaacctaatttctgttactacgcatctcaaacgtagtaggagccagctattatcactatgcccactgttcatctgcttgattatgtcgctggaaatgtgcgttccttggtgaatgccatcaacaaggttggatatgaagttgagtgggtgagatcgcccagcgatttgaaagatgtcgaggtaaggaaattatcgtcgtcaccattgtgccttgtgcctcattatgtatctgttacacggaaattcaggctaacgtgggggctatagaagctcatacttccaggagtcggccacttcggccattgcctttctcagctttcaagcggtggctatttgcagccgataagagagcatattgcttccgggaaaccgttatgggaatatgtgttggtttccaatcccttttcgagagttccgaggaggatccccaacattcctggtttgggtacaatcccagcgcggttgcgcaaatttgacgcaaaaacgaagagcgtacctcatatcggttggaactcggcaacagatacccgcattgactcgactggaggccagaccttctatggattgagcccaagcagcaagtactactacgtacactcatacgccgcgccatatgagccgggaattcttgagaaagatggttggttggtcgccacggcgagttatggggaggagaaattcatcggcgcgatagcacgagataacatctttgcgacacaattccatcccgagaagagcggccaagcaggcctacgcacccttcgcgctttcttggacggagctcagctccattctgtcacattagaagactcgattttgacaggagagaaaaacggtcttacccgtaggatcatcgcctgtcttgatgttcgtacgaatgatgtcggcgatctcgttgtgactaagggcgatcaatatgatgttcgcgagaaggatggtgcggatgctggagggcaagtgaggaacctgggaaagccggttgatatggctaagaaatattacgaacagggggcagatgaggtgacgtttttaaacatcacctctttcagaaactgtccgttagccgacctccctatgctcgagattc

SEQ ID NO: 10410 - DNA, 286 bp, Emericella nidulans
gatttctgaacgagacagtggcgaagaggaatccggattcatcgaaggtatgaatctggatcttagaagacgtcgtaaacatcgccaaagacgtcgtcgcccccctcatcggagtagtaggagacgtcaacgcactaggtttaggcggaatcatactagtatgctgaaaatgttttgtcaagatgtgatacagcagcgcaaagctaattgcatgaggaagcagatcagccttggtaggtcgtccctgagtaataaagccctcctcgaggttcccgaaccgaatgct

SEQ ID NO: 10411 - DNA, 123 bp, Emericella nidulans
cctcactccagacctctgcctcttcactcttcctgactccacacttcgcaccattgtgttgcggctactgacgcgacttccttctactgtctcgcccgagtccgcctccctatccttgtcgct

SEQ ID NO: 10412 - DNA, 1289 bp, Emericella nidulans
  unsure (1)..(1289): unsure at all n locations
gccgcccccacaattgggcaggataaccaattatccgcaaaatggatggtccgctctggatccaactttcaaataattagaacccagcatcaggccgtttgcactctcgccgctgatttaaggattgtttgtgtacatgctccggagcaagtatttgacaaactaagaatcacaagcttcgatcagcggaaagacaacatttttttgacgatttctcttgagatgctcacccgagtatgtgatcagttgtacgtcaccggaggtatcgccaatcatccagacctgttcaagacgatctgcggcccgagcatccacgatcataggtcaagcattccccatctcggtcgtcttaccgggctcgtcatcgacctgaaagacggcttattatcctgtcagttgcctcatggtgcacactactagtttaaagacctctatttccgctaagcgcatatctcgggctaccctgcgtctcggctcgcgaatcgaagtatgctgggaaaccaatggaaaaaagcttagttagctatgatactgtgcctccaattggaccttttcaggcaagcaacgccacagctgcgattcgtatcgttgttctacgtatgcctcacggcccaccatctctcatcgtagatggggacgtttgttgctctgataagaggagtctttctcgcggcggtagcgctcgtagccgaagtgcaggtattctgtagcgaatttcttcgtcagttgccaacccgacaatgtcgctagacgttaactgagcccagcgggtatgaaattgccgccgagacttgtcttgtgtcgcttaacgaaggttgacgcaggctgaactaatatggacaccttcggctatgagctgaatcacgtctatcatatattaatgcagtctaatacgtaggacagtgtaacgagactgtaatgtgcgatctcgactgacccaatacagagaagactgagataggtcgggagatgagggagatgaagagctgacagcggatcgcccatcgttatatgctgaaactctgaaaagatgaatcagctcaggttgtggtaaaacaaagcaaaaagatgcgaaccagtgaagtagttattgtagcagattgagaagtgccatatctcaaaccaccgtggtaggattgcctgttgagcgacgcangtagtctgtatgtgtcggctgcacctgaccgcgcgtcttttatttaacaagctgggctcagttgactcgctgattctctactttactacttggcaaaccgtttaagcagacatttcgacttgctactcactat

SEQ ID NO: 10413 - DNA, 1469 bp, Emericella nidulans
gttatcattagtattgatcatggcgctcggatcataagtcgcgccaaacaatgcatatccaccgccatctagaagacgcgatcacggtcatatcgtcaaccagccagatctaccactggaggaagggggcgggggttcgccttacgaatccacactaggacgggaagatccgatgcgcccgcagcggcatagacgttcaggaacaaacaatcctcgtctccagggcccgagttaaagccgtaagagggcggggtcccggccgcacccgactgagggcacacggggggctgatcgatagcggaaatggctcccataccatgggctggaggctggaccgcttggggcggctgccaccgtaattttcctacgggtgcggcggcataccggatcctaccaagcaaataccatgtcagtaacctgttagtaagcaagcagggaattgcttgggtattgatatttctgaccctttccatacgttcagcccagacaccgaatcgtggtatccctggtatatcgcatacccgaggttaacgattggaccttgcgcggcgactgctaactgcacaaagatgaaactggtagcggcgacgaagaacgacctgagcgtcagacgcatagtgtgatgaggggtgcaggtggtcagcatagacaggcttttgaggtgagaatgtgattcgacccaatgcagagagcgagtctttaagtagcattccaatctgacagagaggctgcagccgcgctgattaattgcgctaccacccaaaaatttaattagaaaattagcacctaaatgtttctcagaataagaaccatccaagcccgggtctgagctctggggtccacgttcaggatccatccatgcttcgctccggcgccccgggaccggcactgtggaagggccagccgcctagatgggtgatctaagccctgaatatctagctgactcgaaggttctcgacctcgaagtctgctactcaatccctattccgctggaaatcctgtcgacgagtctgcgactgtgggccgagtcgcgtccagagagaaatggtttggcatttgatgacctgctcatggtctgggcgacggtagggcccgctcttcaaatcgtatgaagagtcctgacgggcggattccaggctgtcagtgttggactatgtatcagtgggctagtatatggtatgacggaaaccaacacgagcccatccactgcatgacctaacacgatccagggcctccgtacggaatgggacgacacatcgaggcggtggatgaagaagatgtgaaaacctttatgctggtaagcattcgctgttgcttcctctattcccaccctgaccaaaacagggcgactacatcttcagccacctctacgatttcgccatcgccagcacaaagctcaaagacttagccctctaccatcgcatcttccctaaacccgtcttccgcaggattgtcatcctaacagcatg

SEQ ID NO: 10414 - DNA, 1927 bp, Emericella nidulans
  unsure (1)..(1927): unsure at all n locations
ccggcaactcagatttcgactgatctcagcgagtgtacagatctaagaaggttgtaactgaacacgatcagtcaaaactgcgccaaaaaaaaaaaaaatattatgttctagaattcggtacctcgtgcatacaggccaaacactggtccaaaggccgggtggggatgcctaggctgaaggtttctcttctattggtttagtaagcgagagctaacgcaaagcagttggtctccgccggctgatcagagacttgtgttgactttttccccgtggcgaacttcgttcttctaatattctctgttcatacaacatcaggggttcaggttcccttacttcgcctctgttgctgtgggaggagccgctgtcgctgtataactctcgacctatatgaggtttttttttatcatgttataaaaggtatggaaaacacgaaaaccccttccaagccataatgatgaagcaagatttcacacagacctgttctgagcattcttcggagtatgcggatcaacaatcgttccaactgctgtctgatacatggctttcttttctgctatgctatgggtgtttctcttatttgtcattgtactaattgacgcccaggtttaatagtgaagttccaattgagttgtcatgagttcagagaaatttaaaggttctctagctagctgaacaagataaggatacaaatacaacgaatatatgatgttgagacaataagccttgtatagtatacagttgtctgtcacccaccgtgtcaataataacagaagctcgcaaatttatcaaaccagccctcccccagccagattctcaaacgaataatccctttcatatanaatttccggctgcactttctgtcggaaaacatacctcttgaagaaaaatggaatctggcgcagcccataccttgcatggaaccttgttgaaacagaaaacacctggtccaactcctccagtgttttgcccttagtctcaggcatgaacatcagtatcatccaccagccgacaatgcaccacccggcataccaactaaatgcgccctggtccttgaaagcaatcctcagcgacggccacgtgattgcgagcacgaagttgaagagccaagttgtggccgtcgcacagcgccatcccgtacgagcggacgtagagtgggtatgcttctgccgaataagtaaaaggcactggaccctcgccgacagagtaaaagacgccaaagaggtatgtacccagcgcagtgcagccaagccgtgcattattcccagtgtcttccggaatccagaagctaaaccccgtgaagaacatggagagtgccatcagtgggaatgtgctcaagagtagattgcgccggccaaatgtgtcgattgtgtagacggcggggattgcgaagagccaatttatgagcccccagccaagcgacgcggttagggctttgcgttggttagagacggtcagctttgagtgctcgctagccgtttggaggaagatttcggaggagtaataggctaatacattcacgccgcagaactgacaggttattagttggaagttgccctaatatacttgttattttgtgacaaacctgctgcataaacatgacaatctcagaagcgaacattgcccggcggttacgagggacgttgatcagttctagcagcttgttctgccctaacttcatggacttctcggcttctagcagtgtgtacatgtagtacatatcccgggctgcctggactttgttgaagcgcaaactgcacattgactggtacgcgcgatcatatagattccgcgacatataccaccggggcgactccgggcacatgaagacgaagcagcacacgatcactgccgggacgagggcggaggccagcatcaaacgccagttaaggcccacgatgccggatgaatcagggacctggaagaaagc

SEQ ID NO: 10415 - DNA, 111 bp, Emericella nidulans
ccttcaggaactccgaggctcatccgttcgcgagacccacgtgctgccgtcctaatttgcgtgctctaatcacctaactctctaaatggcagctccgcgtgtcgccgcctt

SEQ ID NO: 10416 - DNA, 541 bp, Emericella nidulans
attatgatgacagtctgccgaacgcatctcatacttctgacatgaaaacatataaacgctccacctgactggacgatcagtcactaccattgacagatagtcaaagtgatcagaactcgacagtccatatgcagggcggtcatactgcctgacatacatagcgctcctttgacctgaaagctcatgaccccacgccacacactctgcaggtggattacgatatgctcctggctcctgcatcgacgcgggcttctttccatagtactggccagttcagagatgtgacagagacctgtagtcgcaatggcgagctcatgtggatttcgtgaagtaatcagagcagggatagagcgtcacgctgctctatcacagacgggctcgaagtgcgatcaggatcagccgagattgccgcaccatgagttaacggccgcaggcatctatcattgatcaaaacgaccgtcgtagtaccttgcggtaaactcaaggagtggatttgggacgaagttgaccatctcgacgtaatgaaaaaaggccaaaaaaa

SEQ ID NO: 10417 - DNA, 193 bp, Emericella nidulans
cttccggtccaatcatcggccgtttccagtggtgcagcacactcttccaagttctcgagcgcgactttctcatgttactgtcgctcccacgcacagccggcccgccctgggcctctctcttcaaaataggcccgctactctttgccatcggcgaggactttgataccaatgcgcccctcttcaatgaagtcgg

SEQ ID NO: 10418 - DNA, 1725 bp, Emericella nidulans
  unsure (1)..(1725): unsure at all n locations
tcatcatcttcaacatactccaccacactactatactccctatacagtccgcaatggctccccggccagagctctatcaccttcaaacaccagagcacattatatttccctctgagttgcaggagtatctgcgaggtccaaacccgacgccagcaaggtgcaccgatggcaaggggccctccgtgcctcctcctctcgcctacacagagtttctcaaagctcttagcccagtattcggcagtcctctggagtccgcaactacaccttactcatacactttcaacaaacagcttccctccccgcaatcactcccttcaacagcgtcaacaacctccttttccagcgacaccgtgaccgcagtgagggcaccaaagacccacagacgcgcacgctcagggcctccaactcctttgaacgtgcctaggtccgctgtggaatcaggacagctccgccggctgcgcatgtccccatcctatccgtactcaccgggcgtggtggactcgcccaagagcgcgtatgccgttcggtccccgtatccaccgctggatcggcaaatgcgacacgtgggttcgcctgctagtactgggaggtcaatcaccattcagcatattgtcacgcatactgtgacactgaagcgagttccttncgttgcgccgccgccgaaggggaagaggaggcggatgaaccagactacgcaatgagtctaactcgtgcattaccgctgccctaacgcttatgcatcgaatacgctatattccctagtctcttgttgagttatgttctcgctactaggctgcatttttcctagacgggttagctggatccgagccctggcggttacggaagaagcctcagacccggacggaagggacggagttagcactgttgttttctatgtgtttcgctgtatcaattgaaaagcgaaatcggagttaagttgagttgagcgtcttgtctactcagggatcctaagttgtttgttggcttggttgcgtggtggttgctggcgttgggtccgaagcgtgttcctatatctatctacctatcctacgaactagttacatagccatacataatagaatggaaggaatgactaccaacttaagagtaaacattacgctctctttctgtctgatccttctaactacagacaacatccaattcgggaccaacaaactggacgtcttattgggctcacgttacattgatagcctgctaaatccacttccatcctttaccaatccttcatgcttcatccttcatccttcaatcatcgtccgcaactcatcccaaagttgagtggtgtaggtaggtgctcaatatctatatttcatggaccaatcagaacaaccctcgagcatagtgttgttggctctaaacgcttaggtgagagctagacgctggcccccagctggaattgactatagacaaagacttcaaatcaaagcacagacatgattggagttggtggcgcttggaatcgtagccgcaggattatgatggatcatggcgcttggtcgtggccatgtgccaattgagcttcgggagatcctgttcttggcggtggttacttgattgttggcatgggaatagagagggtttcgatagaaacgaggacatgaacaggcacttcaaaccataaagattagctctgcctgtccacatcagagacatctacagctttgctgaaggagtgatctactttcggaaagaaatgcactgcgg

SEQ ID NO: 10419 - DNA, 441 bp, Emericella nidulans
tgggtggtacggaaccagacgccatttgcacgcacagtcaccgacggcgcgtgacagtctgtgatactgcttatccttgaaaccgcacagaacatgcagagtgtgaggaggtaatccaaacatgcactggcccgacagacatgccatactcattggggtaactatctgtcataaatacggaagcacactgacgaatatttgataaaatgaaccaccatatacatagcggtacgggccgaatgagacaacagggcagtaccttttatgactacctggacgcacgggacgagattatttaggatgaattgacgttatagcgcgcaacttgcaagaggacttatcggcccatatttcataagcctggaaagacatgataaatcaatcccaacccgcttttgatgttcaacagacaggcacaaaggatatcatgtttgcttcatc

SEQ ID NO: 10420 - DNA, 113 bp, Emericella nidulans
cttcctagccctccccacccttacacaccagcaccgcctcatagcctcaaaagaccgttggcaatcacgattgcgctggtcgaacccagtcgtagcacctcatcccttccccc

SEQ ID NO: 10421 - DNA, 351 bp, Emericella nidulans
ataccgtgagatcaaactgccgcatcagggaccatagagtgtcccaagagggattgcgtgagaggcagcacatatccgactagctggcatcctatggagactgaagcatcaataggggcatatccgtcttgggatggacgctcttaagcatttcacgatcgttacctggttcgatacgccacctagcgcgtgcctgactcctgcaatgacaccctgatgatacacgagcgctacgtcggtatggctgacacgagcgctatacaagagacgcgtgccacacttctaagcttacctacagagcagtcagttcacatatactcggcgaccaggcctatctacatgcaacagagc

SEQ ID NO: 10422 - DNA, 1448 bp, Emericella nidulans
ctatcaaactgtcctctttgcgacgcgaacaaacaccgcaagctcgtcgttaaaccgcgactcgtccaggacattcaataggttttcgcggtagggtccaatacccgcagttttccacgtaaacagagccttgagtgcacacttctgaatttccgaattaccatggcaaagcaaacccaaaagggcatcgtgaacctctgatgctctgtacaatacagttggattaacgaactgccccaggagtttgagaaatgacaaacggtcgtggaagccccaagggatgtacgactcctggccattctcggcatcagttgttgcctccagaggcgactggccatcttcctcatcccgtagagcccatgagaggaacagtggtacaatctggcgagagcgcttctccgctaggttaggaatagcattgaatacacgaagcgcttgagtgcgcggagcagtcggggccagatctaggagagcgtggtctttttcgaagtcctgcgtcaaggccaccgccggctcaagagaccggaaatgcattgcagatagactctcgaccttggctgcattaaagcactgataataaccagatacctggttgtcttcgtcatcgtcctcctctgtctcgctggcagttgaccctttttcttgaagccacttcgtcgccagttcagtgacgactttctctccttcagcgtgctcgctcatggacttcagggcagatgcagagtcatcccacaatggagccagtctcttggagaataaaccgaagcaaaatgtcggaagaagtctaggcaaccacctgcgcgaaatactctgaggatacgatatggcaagctttcgtacttgcatcgacaaaactcttgcgctctgcaatgtgagaggactctcctcgatctcgatggccagagatatgagcgaagcatcttcacccagagctttaaccagatcgcgtagaatttttaacgatacaagtcgcagctgctgagaaggcgctgcaaggttgtcaatcaaggcattcacaaaagcttccattgcggacgtatcgacgccgacgttatcagggcatgcagaaacgtaagccaatgtagcctcgaggaaggcatgcagccgcgagtattttgcagcaactgtaattactcggttccagaggcctgaatcgagttttcctaggtttgaaccaaggtccacgtaagtcttgaacccatgtccaacaaagaaggaagtcctaggtgtgaggctggaattgtcctcgttcagcgcggagaccaagttgtcatgtagaacctcaaccatatcaggtaaaagagaaggctccacagacaaaacccacgctgtgggaaagcttagggtatgcattcagcagggccacaccgtgattagtatgttcaggtttacgcaacgtctctgaaatctttgatttcaagaagctgggcagacaatatacccagggc

SEQ ID NO: 10423 - DNA, 1892 bp, Emericella nidulans
aagcattgtccagcttggccagcttactcagttaggcctaatgccgtgaaattgtgcaaatttcagccctgaattgcgtcttcgatttccgtttgtcatggctccccacgttacattgacaggttgcggtcactatacccacttggtgtcattacgcgatgatcttgtatgcacaccaatattaaagtcttatatagaggatttctcagtttattattgagtgaatcattctagaaaatgctgatacggactcgtggattattgattgtatatgtcttctgggagtactcatgctatttgcgatagtcggtattcatagtagtagccctaataatggccttagccacgtataataagccacgattcaactggagatgtgagttctcagtctaggttttctgacgtgactccatcgcataaacggtcactcttacgatcggacccagtcggtataggtctgttcagtaattgcaacctggaggacaggagttggaggacagggtaagaggacctaaggcgccacagtttatcgggttctctacgcatagtccggcataggagggcaaggataggggaatcggtggtttgcatctgtagcctgtatggaagtcggggctgattgggtggaaatatagtgcatgaaacggtcagcaggcttcgcaggactcaatcgcctgaaagtagttcgggaaacactcgactgtttagatatggttgagagctagcaaactcaaggatggtgagaaaatggctaagaaagtcgaggctgaggaagactgcagggaggcaaagtctatgtaagtccgcagatgccagatcttatggctgtttccaaagcatatttataggccctgtcaacagactcaagattgcagcatcgacagcgcaaaaaggcagcgtagaggcttggtttgtcaataatagagacggggttttcatatgtggtgactcgcgcttagggcttctgaccagactcccatccagacaaaaatgaccagtatcctcaggaagcgctaagcatctagcagaagacatattaacatagttcattgaccacagttcataggaaaccatgtctctcaactcttttctacttgctaaaagtgattgtcactggatactgttacagagcgatagacgatggcggtcccagaatccaccgcgccaacctgggcgctcaatattgaagcgccaactgcaaaggattcgctcgtagaaactgcgtagttgtcgccgagaagattatacaataatggcgctatcagtgtgtcaaccgacacttcttgccccagcactagggtcctatgccacagaagctcacttggctcaacacaaaccctaatctcgcttttctctgagcaaggcagcctggcggcccacctgggtttcaggcagtgaacccaacgacgcagctggggaagtaacgggtgcgtcattcacggcgagcaagtacaattggagaaatgatccaccatcaacctccgccaccgacctcttcagcttgcgacacagcgaggagtgtgacaacctggaagatttttgcgctggcctatgttcaatgagaagcgccaccatgttcgctgtctcagggtgctcaactaggaataactggtctggctgaatctgggccagtggagacgaggatggatggtatatagatgatatagattctaatagtacttgatgcggcggggagttgagcaagcgttttccagtcaatgaactgtcttcaagtcagggaggtgtccctaccctataacctcaagaaatggttgatgggctatgagctgggaaacaatactcaacgaccaaaaaccgcgagcagagcgtaatatgttgaagttcgcttgtcctgtaggtgatcagaatctattcataagctgttgcggtcg

SEQ ID NO: 10424 - DNA, 1251 bp, Emericella nidulans
aacccttcacacactgcagagcgcgaaacgcacggcattgaggagtcgtccaactctagtattggtgaggacgacaagctgcagcgcgatctgaaggacagcaaggcgtaccagaatcggcgtaaaatggctgtggtgcagggcgtcaacctaccattctttcatatcgacatcaccagtgcgttggagagcgcgttggccaactcgcaggaggagcctgctgatgtctcaagcgattgattgtgatctccctggatggaggctgttttgatttttcaacttctattcccttcctgttatgcttttgagcgagtgattgtctttgattatctactcttaatcttgatccactgatcgcataccgtcgctacgtataccccacagttagctgtcgatcatgtatgtatatagattttgattcgatgcaatgcatctatttgccatgcaccagataataagtattgccgtgcctcgatagtaactactgtgaacttataaataatgctcattgccaagccggagccagtcaactcccgcttcccctcccgcaattcctagccctaagtcagtaatcttgtaaagattaataatgccctcttctttctcgtccctaggttcgctcactaaacttatccttagctaactagattattagatgagctcttaaaatagacggtttcagcgaaaatatctggaatcattgttcttgctcccctctccgtgtggacacctcttgagaactagctcactcatcatattgctatcggactattcaagcaatgctacgccccattccgcctatctctgattgaaagatagatatatgcctaaaataaatggaataaactaactcaaatgtcagaaaatatgtgatcattagctgagctggcaatgtgaaccaagcagtcagtccctgtcacagctcactcagctgcggtcgtttcagccggctgaagaggaagagatggaagagaagttcgcgaaatttgttgggttcctcgcctggggatctggcgaaaaagtactgctcgttaagggtgtccaacagcaatcatggaaggaaagagaagacgaagaagacgataacagaagaaagaaaagggaagaaagctttggccgatctctactcgaatcaagatttatgacaagaaaggtgccggcaggaggaggaaagaagacatacacaaaccgacgaaggaggaaatggatgccgggtcttggtggtagagcatccgtactaatggtcagaac

SEQ ID NO: 10425 - DNA, 1310 bp, Emericella nidulans
ttgatggctgggctcttttcggaccaggtattgtgtcttcggagttgattcgtgatcccaatgccctgaggatttccacgaagttaaatggccgcgaggttcagtcttcgtcgaccaaggatatgatttttgatgtcgcgcagacagtatcgttcctatctcgaggcactaccttgctgccgggtgatctcatcttcactggaacgtaagtccgtatcctatgaacagcagaggccaaatactcacgaatgcatagcccccagggagtcggtatgggcaggaagcccgcgctctggttgaagcacaacgaccaggtcgaagtctcccttgaaggggtaggctcctgcttgaatagagtggttttcgacaaaccatctgtcaagctgtgaagcgggaagcctttgatcggcataattagtgtgggtttcgtgtagttttatgcaatatatagattcctacttcatgaaatggcccctgactggggacaagacagagtcgcaaaaacagtcatttcataatgctgttaaaatcctaaatctacgtactaaacagcttgtgccccatatcccttgatgctctcagcaaacgcccagttctgagcctcgacctgttgatcttcatgcatctcaattccctcctgcgtaattaaggctagagagtacttgtccatacttcgcgcatcacggtaccagagaactttgagacagtccttcaaagccgacactgcatcttccttgctgatttcctcaatagggcgctcctctgggaacaatcgacgaaggattgggatcgcgagatgagcaccaaagccagtagcaaggtgcggggctgaaaacgtagttccgagcaaatcggcagagctcagaaaaggcttcttttccgaatcaaatccagcgacaaggatatggttccacagcggattaaaatcagaccgccgcttgtagaaaactttcgacagataggtgtgaagattcttcgcgttgagctgattaccatgcactgagtagttttcgcggatatcaatggactctagaaggcggtcgatgtactgcatgtctgatacgtcgccgctgaatccgatgacagcggcgtcgccgaatttgcgtaggcgtttgacgtctgtgaatcgggccaaagatccatatgatgctaagagatcaagtgtcagagcatggtcgtgaaataaacgtgtacagaagcgagactgtacccaagttatcggcagcaatagcaacacctccattgaatttgacggcgatgaccgaggttccagtaactgctggcgactgagtgtgtgttttaggtcccgt

SEQ ID NO: 10426 - DNA, 1296 bp, Emericella nidulans
accgttccgcccaagtaagatgcctaccctcctaataacttaagacggctccgtgttgtcaatggctctcaagtattgttgcattgcggtgtcgtaatctcctttctgataaagataatctccgtacctgcggtatatggtgttttgctgatacgcgtcgacaccgatcttctgcgccaggttgatggccaggatatagaggttgcgctggtaaaggatctcgagtctttgttgaaggctcttctctcggtaccgataaatctaagcaacattagcatctttgatatacgatttgctgcatgcctacctttccatctgttgtaaggagatagagattgccccattctttgaagatctgtcttaccgacgacacgagagactccgaatgagcgatgaacttgaggtcagtatctaagagagtaaaagtggcagagctgaatagttcatctctaccaacaccaagagtcggcagtcctgttgaccctggcgttccacctctaggggggcaaaccaaagtaacatagtctttgaaaatgttgatggagctcttagggctttcgaaggcataactttggcctcgtccatggggaccgtacgtatatattgcgtcctctcgagccacaaggacgtcgccgctttctctgtccagagtcatacagccaaggccgcatcctgtgtcttccaatactcgtgccggttgtccctgtcctcgaccggaaatcacgagcgccaggatccggttcgtcgtggagatatagagagtagtgaccggcccactttgcacctcaagcccggtgatgggctcctccgattcgaatacgatacgttgtcgcgccccgcggtcatgtattaagtcgcctcgaataatcgcgacggagccgttgccgaaaccaaccgcaacttgggacaaatctccaagcgccgcaaatgcggatacctatgggtgagtatctcagctgtgagctacaccgcctaatgtaggaacgacctacaggaaacagcctccgcgcattttgtacgggtgtagtcgacaaacagcgcggaatccctgtctttttctcggggttatcgagggcccagactttcagtactggctcattcaatagatcctccgctattgtcactaggagcgaggtcccttccagctgctttatatgggtgatcgagccattatcagaggctttgaaggactggacgaccttgaaggatgaagaaatggtgtgcacgaatccgtcagtggtcccgaggaagagattagccgagccagaacataagcaggaggtttcggactagtaa

SEQ ID NO: 10427 - DNA, 2325 bp, Emericella nidulans
gttctgagagaagactagaatgtaacggcagaattctgcttgatcctggcgagatccagcgccgacctggcgtatactatgatcttgaggctgcccctttggatatatcgaaagactgttggccagctcggagcgtctagcgcggtggacgacgaaagttgcttcagaggacgagcaagtcgacactgtggagcagccgggtcaatctagctctgctgcttcttctaggggcgctgccactcgccgaagagggaaacgttcgtagcggccgtgttgggtagactgcatttgctgggctgaggctgggtgaaaattatttttgtatttagaagcacttaagcagatagtagtcttaggaatgtatagctcgtattatcatgtggaaacagcaacgtgtagaaataggttggattcctattgcgtgatttgcaagtaaacccccggcttctatttcaataaagctgcagtagttccggagagcatcaggtgccaatgagagactaaacaggtaataatatcatcgtcgtacataagtcatgatcatgaccttcgttaaatgagtgttttatcatgcccaacctttaatccttctgtgctacagaacaaagcatacagactcgcccgttgcctacatcagcatcttcgcgatgttcatcagtccattgatgttgctggccatgccgccgcccccactaccggagcgcgaagagctgcctccgaatatatgcttcggcagatgaattccgatcatggagaagagcttgacaagcacaccgctagtgatcaagggaacgacaacaagcatgaaaactttcaccggatgacgccgggcataattgacgatgtcacggaataagcgcctgatgtagcggaccacacggtgaatgaacccagagcgaggacgtgcccttcgcgacgaggaagagaacacagacgggcttgagcgtccacgagtactcccgaaatcaaagatcgaaggcgcagaatgacggctgtgatgggtggaatagccagtagtggaccggcgtgaaggggaccgatctgagcgcttccggacataggccccagatgtcgaaacagaggaccgacagtcgaaccagcccattttgaactcgtatgatgatcaaatagtgagatggcgagttgcttgtctgttgctaccaatatcgagagtcgatgtgcttaacgacggtcaattatcgactgcttgacagttcttcctttcctcttgaagcgattgagtttccaagtatccgtgcctacttctcgatgcgacgacttgctcaagcaatcatagagcagttgcggggtcctttctgcacaacacagtcttaggctccgttctgcataggttattgtctccaccgcttctttcaggaaattaatcagatcagccacatgcaatgatacaaccgagcagatgaacataccgagagcatggaacaagtgtaccgaggacaagctggaggaacaattacttacaagccgtggagcatccgtcaaaaagcgttgcagaaggtaagagaaagtctgaccagcctcgagcggagaccgaacatccattgtttggcgagaccgagggagcccctgttgtgacaaagtcggtggctggcactcgcagctttagttctgccccttctcgctggtgattggtgtaatcctcaggggctgtagcaatcaagcctcaggcagcgggttgtctcaagccagacaacccgtcatgtgattatggcctggaggggttcaaacagccataaaagtgtaacgttcttcgataatctcaggcttatgtagtctcaaacggagtagactcgatctgagccgctaactggatccctagggttaaccagtccgctcttagcacttttggatccgcggttccgtccacactgtcattgtctcaaccaccgacgtcatcccgtcttgtctacaatacagttatctggcttcagcatctcagatcttgctcttcgtccttcctccctccactttacctgcctcacttcctcaccgcggttactaccagggcttgacagctatcgttatcactttcacgctctacctaatcagtctagcgatcgatcaggatgcccagtaagttcgattcagattaacttatctgcaacccgctgacgtcttatgaacagaactccctgattactgtaagacaaaaaactacgccaacaagcagcttcttactctctgaatagacaaagtattgggcgttgctccaccgccagccagcgagagattcgcactgcctacaagaggtgcgcatacatgcccttcaccggtttgctatagaagtgctaatgtgcgcagaga

SEQ ID NO: 10428 - DNA, 540 bp, Emericella nidulans
gtagtgaggttgtcaaggctgcttcccgtgagaatcagcacgcacctcgtgactcccagaccggatccatcagtgagattcgccgtatacggctgaacgattggtccgctgtgatccttgccagacgaggaccagaacactgggatccaacttgagctgtctgcatgctggctggagcacatttgcataaaccatgacgctggcgttttaacactcgtcatccatagcttccaaattattactgaaagcccgacaatgtccgtgccgacaagcatctgacgatctagaggtgatgtgcccctcctatcccgattgacgactcccaggtccgcacccagattttaaccatcttttcaggcagtgtgccctacaagtaccgcccgagggcttgttattctacaaatacagcataggttttgactttgcccccggacataccccatagaataacattggtagcggtatttgcaaaatgtaccccagtgggctgaaaatagggatctgtggccgggctaatgaaaatccccgcaagtgccgaat

SEQ ID NO: 10429 - DNA, 561 bp, Emericella nidulans
taagggggtctactctattgaagcggggggtgaataccctgtaccaatccatctcgaccttcttgggtcggttgatacctccgctcccgcgtgtgccttctatgtgactatgactgtgatcagctccaaccatgactagcgtgacatcctcatcaaatgctcacgcaatttaccggtgtctgcgaaacaacattgatacatgctggtgaagcgttcatttttggaattgattctctatcgcaagatggctgtactgcacactcaggagacctgtgagtactttattcgggctgctggacacacttattccaatagagtcttccttttccgtgccgagttacatcactttgcagggagggcgctcagtacagcctaatttctgtaaccctaatatctacatccgtctagcggattctccctgtcatgtattacctgttttttccatcgtatttatccccggattgcctcaaattctagattcctggaaaatggtttaatactttcgccttgtccttttccttggaatttatcctttgccttttacctaaaacccagggtaac

SEQ ID NO: 10430 - DNA, 1622 bp, Emericella nidulans
gtagttggccatgtcgctgagtgaaggcttgagcgagtattgatgagttgagtggacttgagatgggattaattgttgactgaaatctggccgttttcttgctgcctttatacttcagcatcctcttttctccagatttctggaagctggatttcaaatcagtccattatttgcatttctaatcagtacctcgaattgaatgcgccgacttggcctgttgatgctgcccgccgggttcatgtttgatgtttggtaggtatagaagctgtgtcacctctgaactcgtatttatacttggcagtcatacttcgtttttgaacgaataggaaacgtcggtgagtgactcaaagaatgcagccaagccttatcaaactttgttgcgttgctctttgatatgattggacgttgggagtaagcattctgcagaccatccgcagtacccttgatatactggaaaggtcaagatatgggctctctagcatagaatctgcactctttttctgagagtatagtcaaccaacgataggaatagctatcggttagccaaggacttgtattgttttcaatgttcggttctcttccgcgttctcttccgcgattgcggtgtctttctggagaatagaacaaactacaactacagtcaaccatccactccttcattgttgcagagttctatcccaatctcaacattctttccatttgtagtgggtttagagcatagttatttccacgaaagatgctgccgatgcggctatatataatcaactccacaattgcaccttaagcaaattgatgaaattgagctcatttcgctgccgatctggaacttcgtttgtgccatttaaccatgcaatctcgtctaaagtgagcttagaagcaacatatgcataaggaaaccttgtttatggcttccttgttaagtgaagtatgttgacggtgtcaactacggtgcatacacggagcagacgggctatgtgaacacctcaggcatcattatgtcttatcatcacgtgcgctgccacaccgcctgctacaagcgcattccacaaagaaccccgctgataaggtgggatatttttgtctttgactcaccgtcgttcgctcgttgactcaaccccacgcgtatatacattctctacggccaattgtcttctccgcctatactggaaaaattgacaaccaacatgacggaagctcttgctgaggctacggccaagctggtcctcgacgaggagaccggcgagatggtctccaagaacgagctcaagaagcggactcagaaacgcgccaagaaggccgccgctgccgccgcgaaagcaaaccaggcccagaagcctgcgacgccaaagcccaaaactgaagtgaaacctgcggaggaaaccccgctggaccctgacgccatgttcaagcagggcttcctcgccaatgtcttccgcgagcgccctatgaagccggtcctcactcgattcccgcccgagccgaacggatatctacacttgggacattgcaaggctattgcggtaaacttcggttttgcgcggtaccatggaggagagacggtatgtggtcgcgaggatgttgtgatggcgcagacgagatagatccttcggtttccgccccga

SEQ ID NO: 10431 - DNA, 2102 bp, Emericella nidulans
ttcactgcctgtggtcattggaatgtacagacgctgccgcaaagttcttgtagctatcattttttggaagatctagctctgtgcaataggattagctgatatactacgcggatttgagacagcaaaacttacggttaaagcacgtatgcgagcttggaagacggtctttgttgccgtagtcgcgatggatgttgaaccgactcacgccattcataccttcgagctccttgaagccattgaggggcactttgctcgtaccagtaacgaattgcagcaacttcgcccgttcttccttgtcaaatgagcgcacggcacgccagaaccattgaatctgaggggaagaagcagagtagttgtggtattccgtgttggccttccagtcatccacgtcgatttcaggaagtccagaaatcagtagctccagctcttgttcgttgaatatcgaaatcagttcaggagggataatctcgtggaatcctttcaggaagttgtccagctgctctcgaaccgacgcgaccagacggtaatcaaccaccttttgcacgtactcctccttgttttcttgtgtcacaggaatatttcgcccgttttcaatcaggtcaatggtctgcttctctccaaagtcatccgtctccacagcgaaagtctcagtgatgatatctgtaatatcattttcgagcatccagagaagcgacttgtagtagtctagatccaatgtttccatatctttgattgacacgttgcggccgagaatgcacttgtagactgctcgactaaaatggcaatcaagcacacgtccctcgtatagagcctttccaatgatccgcccaatgaacttgaagaacatcagatgctcagggtttacgccactcaggcggttaggatggaaggttgttctatcagcggcaacgggaatgaagagcgcgtaatctgggttgaacatgccccgagcgaggacctggaaccattccctagtaacgccgcccgcatcaacgccttcttctccgtggaaacgcacgttcaatttgccgtgcttgagctcttccgcagatttgaagtataaggctctaaatgagtccaggaaaacctggtctctccgcacagccagctgaagaggcgggtgggggtgacgaggttcagctccgcgtgaatgtactctgcgggtgaagtaattgcgtttattgtcgaactctagcacctttggatttttgaccaatagagagaaggtaccactcatcaggcgaggattttgacggaccaactcgttcaagatcttgcggtgttcttccgtgaacttgaagaataaactctccatgctcagacctgtgtcaccagagccgcttgagacggagagctctctgctattgcgggcaagcgaggtgtccttgagcgcggcgcccttgcagacaccccatctcgtcccccccccaggtagctgactctcctcactccctacccccccccctattttttccccccacacccaccctaccctaatctctcctcccaaacactaccccccccttccccaacatcacacctaccctacttctctccccatccccccttccttcaatccccctaccctcatccactactcctactcctccatcccttctcacctcactacccctctctccccccactctttaacccccaccccctatcaccctcctccactattccccaccttctcctccttccctcatccccctccaccctcaccttcttccccacccacactctcaccctctcctatcccacccccccctgttctccttctctacatcttctcctcttctcccattaccaccactcacacctcctattacaccccccctcccccactcctccactcccccactacctcactccatctcttctacataccttcccctcgtatgtctttccccgcatcccatcctcttcccctctcacccaccctcttcacaacctacccccctcccacatctctctgccctcccctcccctttctaatctcctccccacttctccttcactattccatctcaccatctactctctcttacatcctaccttcactcttcccatcctcctctccccattccaatacctccccc

SEQ ID NO: 10432 - DNA, 772 bp, Emericella nidulans
atgactgcgcagaacagttgtagcatataacgagcggttgttcggccccaagtttgtgaagttgtccaaagtcgcactcgaggcaccagatgaagttcttgtcggcgttgagtgcatggcggagggagagtctatcgtatctggtactctgttagccctaatggaaccctgaaaaagatatgagaagcgagtaccgagtaaatgtctcctcatccgcaaaccgcttgatgtcctcgtgaataaaaagtgtctggcactggggacacttaatctcatcccagaatttggtctccaagtcgtgcttgatgctcttcgacaaacatatatagcaaattgacggtgtatgctgacaagcaatagacagtgtgtcgggagccttcacaccatccgctgaaaacggttcaaggcagataatgcacgcctctggttcttcttttggccttggtactgatttcctagctttcttgactgtctttgtccgttccgtcactcgctgttcgcctgatgacttgaggtaatccgtatatagtgcttcaagctcctcatcaacttgttgtaaaaatgcctcggggctcttaggggttgtattcggttcgggtcgtggttgggtgacagggtcatgctccggctctttcaccttttgctcgcgaattatcgaggtcggggctatgcgaattgccgtccaaacagtggtattccatctgtttcatcagagaatataagtatatctgcgtcggggccagtaataggcctggatgtggagttgaccgat

SEQ ID NO: 10433 - DNA, 302 bp, Emericella nidulans
agctatccagccgatacctctggctctgattcaggcgcagcagattccggctaccgtatgcttcgagctttatagctaatgctgtctccgacgccgcctcacactctgactgcttctgacgccgcagattctggctaagttgcaaaatcaggcactactcatacttccggtgaaacagaagatacagactacactggatctagttccagctgctagtacgggctaagtcgcaggtacacatttaataatcggatatgaatccaactacaatgctactttcttctaaatatacaaattattca

SEQ ID NO: 10434 - DNA, 1600 bp, Emericella nidulans
gcgattacgcgacgtagtaggccaagtcgagcaggatctagattaacaagacgaaagcacagcgcagcggcggctatcgtaaacacaaacaccgtcagaattacctacctttataccgcctacccactacaaggatatcccaccctacgcacaaggccgtctcgtgcaccgatctgaacccgatttgaagacacatacgtcgtaccttgttttcgccgtcttgccacgcgagtggagtgaagaggacgagcgtaaatgtgtggagaaatggccgagtcagactgtggatgaggaggcggcgcagctgctaaggcgaagagtcggaggcagatgaagaaagaggcaaaggcggccgcaggggtgtgtgaataaagctgaggaggcgaataggtatgaaaatgaaggataggaattgactaaacttgttctatcacatgaataaataatatgacttcaaggggtctccagtgtacgtgatggctaccctgtgttccaaatttagacgtagcaatgacagtagggtgaggttcggcttatttaatataaatcagaatgggggtaaacaagcttcgaggtaacggcatgatagcctggcagtcaatgtacgttcttgtcatgcacgcagaaaacatatctatatacagcatatcaaagggatatctcgtaaagtacagttccactgctccgtttgagcgttgcactgcggcggaccaacgcttatccagatgaagaaatcgaccagcaacagtgatttgtagtaaatgcagaagaatgtgggtgggagtacgcaaaagagcaagagcgttaaagattattctcggccttgaacttatcccaggcttcgtttagcacgccgaacacagcaccggctatcatgcgctgttctgttgtggcatcagttggtatctaaggcgctgattagttacgctcactcgtgcgacataagaaaggtatcacggcctaccttatcaggatgcactttggcaatacccttcatgtactggatcttgactttgttcggcatgattagctcggacatgttaattttcttccaattggcctcaggccacaagactgtgtccagactgcccaggagtgcacgaaggttgtcttgtttgccgctcttccacgctgccagacgtgcatcaacgctctctgtcagagcaaacttctcctcgtcgctacgttcagcagcctgattagcttcccggagacggttcacggcctcgaaggacgatgctgatttgcttgcagacggcgcaccctggaggtcgtcaagggcggatgttttcttcttgggcgccggggccgcgggtcgtcgtgaaggagctgttggcttcggtgcgggcttgctgatacctgcggccttttcgcagcggttgcggccttggatactcgtgcttcccccatgaccgttctccacagccaacttccatatctgtgcggcgtccgcccatttctctaactgctccaaggcctctgctttgcgtaccaaggccttaccgtagaaatccttcattggcttatggggctcgccattacagagatcgatgctttctgtttcgccttttgcagggccaaccagttctaaaatggagtc

SEQ ID NO: 10435 - DNA, 373 bp, Emericella nidulans
gggcgcaccgtatcacccagatgaacgaggcttgaatggtgcgactgacaacttccaattgtgacgacttgactattgggtcgcgagctcagtttgtagctgacatggatggctaggccacttacgtggaccaattggcgtaccaggctaccatcccagaccgagatgcactgttgggtactctgttggagactgatgagggtacataccacaatgtagaccaggatgataacgacgatgacgacctgcacacactattggatatgactgacgcagatttgggagttttccagctcatggttaaggacacggctattcattgaggcatacggtcctgagcaccagctcccgcgactgattggctttagtgctc

SEQ ID NO: 10436 - DNA, 440 bp, Emericella nidulans
gcgttgataaacccaggccaggggggcgcgctctgcgacatacagagaagagatcatctctacgctccgcgagctctccgattacagcgtccgagcgcacgtctattacgtccagctcggatctaggccgccggctgagtcacaaacctaatcggattacagaaaatgaccggagaagcgtttcgtcggagttgtctgtctccgtaagctcaactctgggtgttccgcagcagtctgtggatgtggtgccagtagtagtgatccctcagcgacactcgtcactcaagggcccttcaaactcgtcgagcaagaaccccgctatatcgcgctctcggccgtccatacacgcgcctgccgtacccggaagccgggtcggctttcaagatcttccacgtggaaaacgcaccgtggccgaatcgcgtgtcaacgatgaccatcgc

SEQ ID NO: 10437 - DNA, 2579 bp, Emericella nidulans
  unsure (1)..(2579): unsure at all n locations
ctcttctgtcctacaggacttgtattggtgttagtatatggcttgcccgcaagtatctctgaatctcttctgtgtaaaggatgttgtaggaacaatacctgatgccagctcgtcgtcttgataaattggacggtgggctcttgttgattaaccctggatagcgcattggggtcaatcttcctatcatccagagccacgtcatcaatagcctcttctcatctgtttgattgagtggtttggcggctttgaaaggactaatgaggccctagtttcggcctgttcgctaggagcacctcatatttggtacttgttcaccagcaaaagacacaggacgattgcgtacatttcaccgtaggggcatttcgtcctgtttctcgaacaccatgttttgtacatttgagattcatactcgttgcctgatgccaggtattgggagaattgcttgttaacaacaaccatcctccgagccgtaagcccagcgctgagccatgcattttctcaaaggtgcgctggtaaggccggtatggagggtgagcaaactcgcttctcgatcatgtacgctgttatcggcatcaattctgagggcgctgtctctgcaaatcctgctctgaggccactgaaggattttgaaagcagccgtttggttatgcacttgacgcaaaacgaaagcagaaaatgccatttttatcatcgcggcctaaacagagccgtagtccataatttctagatccattgactcgaaagcaatgaaatctttgacaagtaagctctatgttcgagtgtagtagtggcaatagaagttgttgatgcacacaaggagactaaattgtggataagcggttagtgcccagcactgcctgcagatagcgcggcgccgcgtgggcgagctcaagatcgagactccgcattcctggcagaaaggcccgccaccaaaatatttcaccaccagcatctattaagtattccaacgctngtcgctctctacttaaactgctcgtgggccatctctccggtggtggttgcccgaagatggtgtgtttcgcgccccgttcgctccctcccagcacagcgtctcggctaccgtcaagatgtcgtcacaacaaccaatgcaagctcaactgaatctggctgctctcgctggatctccatcacctcgaacaatgcgaagcctgcggaagattcagtctcatcaacacctctcctctcgacctcctctgatctcccaagtctccttcgatagcgcctccgcaggaggcgaggagctctccaaaccggctcagctagaatcacccgtccgactacgaacacatcgccgtgcaaggtcaaacagtgatgcgtcgtctcgtgatcctccgaagctaacggcacggcgacctggaaggaagaccggttccggcattgggttgaagagatctcttctggaatcgctattgcgggacggtcctcagcaggggaatgtccaagaagcactccaggagttgcggtatttggtcctatcaacgagagtagaagcggacggtgatggcatggtatgatccctcagcaaatattcagcgtaccttagcctccatttgcctcgttatcaactgaccccttacatccagtcaacgtaccgagtctatttatggctgatcctcctggacattcctccccttcccaccgatcgctatctatccctcattcatcggggtcgttctcctgcgtatacgaaaatccgcaacgataccttccgcactctagccacagatccgcttttcaaacgccgcgtcacggaagccagtctcatccggttgctcaacgcagtcgcatggaagatccacgatgcgaaaaacagaaacaacctcaagactcgttcgtcctctcggaggcgtgaaatggaactcctcatcaacaccccgccgagcatcgctgaagaagagccgtctgcggacgatatgactcccgacagcatgatcagcagcaacagtagcacgtcagcagtcagccctggtatcaccaacgagactgcaatatatgtgcagggcatgaatgtcctctgtgcaccttttctttacgcggcccgtagcgaagttgaggccttcgcactctttcatactttcatcacccgcgagtgccctggctacatccgcggcgctatggatggtgttcatagaggcctcaacctcgtcgaccgatgcctggagattgtcgagcccaaactcgcggcctacctcttctccaaaggactacaagcgaagctatacgcattcccgtccgttctgaccctctgcgcctgtacacctcccttaccggaggtccttcatctttgggactttctgttcgcttacgggccccacctgaacatcctctgcatcgtggcacaactaatcttgatgagggacaccctcctcaaaagccaaaagtacgtagagtctcccgttatgcttttcccccttcacctttggccggccagccaagaagtctcaagaggctcgatttttcagtcgatccctcacatcccaagccagccaagatggcttgcatttgcatccgattgaccgcttttactctaatagatctatcagactcactagcactct

SEQ ID NO: 10438 - DNA, 1305 bp, Emericella nidulans
gaggtcttccacaatgcgtagttgtatcaacactttaatattgagatttctcaaagcgctgatccttagttgggtaatcaacagcggtaatatcggagacagtcgtgaattcagccgaggtgtgatatttgaggaaggtgaacgttgggataatgccggagggagggacgtaaatgcagagctcatccttccaaacggagaattgctgaacgtgcttgggcagacaggccattatgtattgaccgtactggtgcaggctatcggccttgtcctggtacttgtcggccgggttgacgacgggagcgcggagaggaccgggggctggaatcgatcagcaaatcagtcaccaaagtatgggtttgggggaaaaggcagcaattgacgtacgaggccgcgctgcgtgacgcatgttgggggtatcagtgccagccgttgtcgccttggctacctgctgcagaggggtcgaagaaaaggcacggcaattgcgggatgaccgggcggccgacgccagggagcggccagagcccagccgcatcagagagcgaggagcggccatatttattgcagcaatcccaacacaagtggtgaggcaattggagggcggatcggacggcgggaggatagacgtcggcctcgtcccaaagggagctttcgcgtagtacacgtgaccgcaacacgtgattggatgacaaagaatgcaaaatatgcaaacgcaacccaacacatcaaagcttcaactttgattcttgtctctttgcctccacgcatttctccgtcagtgcttgcttgtgtccctcgccctctacgccgatccccatattactccatctcctccctccgggcttttctacttcacgtcaccgaactaaactcgactttccatttacctctttcctaaccgtctcccctgccccttccgctggtttggtagatgggcttttgcatttgaccttgctacgattcgtcccttgtctattatcctggcgttgcctcctcacaatttgacgcaataatgtcaagtcgccagcagatcgattccgtcattgatgatgacgatgagttctggtatgttgccatataagttggcttggatctgctcgtgattaggaactgacacctcggtctcttgtagccccctctgcatcgaagagttcgacttgtcggataagaatttcaaaccatgcccctgcggatatcaggtacgtctaatgacctcctaacgggttgcgacagcgaaaaacggcaaattgattatcagtctaacttgcaaatcagatttgtcaattgtgtttacaaatataagac

SEQ ID NO: 10439 - DNA, 1038 bp, Emericella nidulans
actgagctatcctggtaaggccaatataaaacagatccatactcatacatgaacgtttggagtgaattatttgtaacatatagagcatgttcaagcataaccaagaatcgaataattacatcgcaacctaaccataaatatgaccattagccctgccgggaaacctccccaacgccgaaccagacagcaaagatcttgagaccgaaaatcattcctccatagcgtcggcatcctcctctttgataacagtcattctactgtccagagtcgcccggctatcctcattctcatcctcctccatgatactgggctccacggatacaccgcggcgcccaaagccaggctctacggacggccgaacacttctggaagatcgaacactgccaatgtcactttcgacactgctctcgcggccgcgtgcgctagaaggtcgcatgggagccgccagtagcttgagcaccacgttcttcaccttgacgagggcatttcggctagcagcatcagccgccacaccttcttcgatggtctggtcaagtagctccttgacttcctgcgcgagggcaaggttttcgggattgagttcgccatgggagcttcgcacgctggaacggaacgagtcgtcttcgggggcctgggacgctgagcgcgaaggtgccgttggcggcgcaatatagagcttgctcatgagtgaaaacaggagttttcgttcttctttagagcagcgattgctgccttcactgatcccgagcactcgttccagtatgtccttaatcagttgcaagtggataatgccacaaacattggagctagcagggcccccagcaaggacccgttcgccgccaagtccgatcactcttcgctcatccgtccactccgcaagcataccaagaactccgctcatcagggccttcaattccttctccccaacagactcatcaatatcaccatcactgtcctcttcagcctcaagtgagtagtattcttccgctgagtttaggatggtccggatgacaggtacagtaatctttctcatatgct

SEQ ID NO: 10440 - DNA, 1434 bp, Emericella nidulans
aagggttggaaccaaaattacttccgattgtaggttgaaaatcctgggaaaaccggacggagttttaacaggttttttttcaagccttttaacaaaaggagggtttaatgcaaaaacaggcccacccaaaatcagggcgaccagcgggtaattgaagcaagacccttatatgcgggatgggacatctgaatggacaagcaggccacaatgcatgaccctgttggagtcgaagcagaagaacaagcagcagcttggcgtgtcccttccttcaccctttctttaaaacccaacaaatgcgccaggccgtcaacggcgcaggggttctggtcaaggcagcttttctgaaaacagacagccacgcgatagtgaatagattatgagttaaggcgaagaaagggatgagaggcccgatgggtcaggactgcggaacttgcggtatgcagcggacgaactcgctgggaaatatcgcccgagggatttcccttgcgggacagaggaggggaggaatcctgttttagactttgagtggacaataatcagctaaatagcacgacgagatggagggagagagaagcacatggaagagtcgatggatttgatggagagcaggtcggacgatagcacactggggaattaggggggtgggaaaaaaaagaggttcacaccgtgccttgacggacgagcgctgttgaagccacctctggggggcgggccttggtttggggagatgctgggatctcgacgcgctcacgcgttctgttgttttggctgtggcgcgagatggctccacatctacaatactagtcatggaccgtgactatgtgattacacgcctctgctattgtctagcttgtagattttctgaccagaacactatgtcggtaggtcctctgcgtatgctgacggctttggctatcgtcacttttattttgaggagttggtgcctatggggagattcaaccctacgacgttgggctgtgttcccactgcccagattctcgtgccgcgcccgtcttatcgatacgcttcgctgcccgcccatcgaagccaaactcagtcccttgcatgtgcgtcaataatgattctgtttatgcttttgcttacccaagcatgtcgccactcagcacaactgatctctatgcttatcatcaacgtcagttgggctgagccgagtggcaaagctggtacctgaagcttttgaacgccgagatacatcacctaatacaatacaaaataaacaaacaaaataagttagcagcagaatgccaaacgactcagaaaggcataggccggaacccaacgcgataatattaggttgaggctttcactaagacttacgcttgaatcacaaactctcttcaaatatggtcttgaggagtctcgacagaacgtcgaaacagcaacaaaccccctctatccacgtgtgacgttggg

SEQ ID NO: 10441 - DNA, 2203 bp, Emericella nidulans
gacgtctcttgctaactggcccttttcgcgtgtgggctttagtatattcttgttcttcctccaagcttgacttaatatcgactacctcatcctccaaggactgtaccttttccttaagggtcgcttctgcacgtctcgcaaggcgaagctcttctttgacagacaggagctcgtgtcgtagctcatcaattgcatctcgcttcgctgacaagtcatcatttaactccttcacctgccggctaaggacggcttcagcattaaaatgccgcgccttctcactatcgatgacttcttgcagttttgattcttttcctgtgagcgtgtgttccacctgctctagtttttcaatggttcgcttgaagcctgctgcttggtcctctgccctgtccttttgcacttgcagattacgcctcaaactttcccatctatcttgctcaagggcaaattggccttccttgtcttcaatctcatgatgaagtgattcgatctcttcttgcaatcgctcgatgtcctccatatattgtgagcgcaaattttctgcattctcagccgcattttgtttgacggtgtcgagtgactcctgcagctcgcggatattagactgtgctttggccaattcgttctgcaagttgctggactcgtctgttagggcgtggtgtcgagtgtgaaggagagctttctcgtccgttttacgctgtagctcatcatgcgcttcctgaagctggacgttgaggtcatctcgttcctggcgtgctacttcacgctctcgtcgaacttgggtaagttcttcgagcaatctctccctttcactatccgtggtctcgcgggaattctgtaatcgttcttcgaggtcgttcatttgttgggttttagactccagctcttccttgagagtactgtttctttggcggagttccttcacttcctcctccaattggcgagtaagcccctttgtgctgatcgacttgttcgacatctcgtcgtgcagttcttgaaggttctgctccgcgcgttctttttcctccaaggcctgtcgttcagatgttctagcctctatggcatcagacttcgcttggtcaagagagtcttgtagctcctccagctgttcttttgctcgtcggagttcggtttccagctcggaaagtgagtctttctcttgactgtctctgtctttcagctcctctatctcttcttcacgctcctcgattgttcggtctttctcccttagagatgcttctaaatcctcgatatcgtcacggagtttgtcgatttcttctgaccgggaatccctggcttcccttaattgttcttgcagttctttcacgcgctggtccctgctctcaagttcttccctcatcaactccatctcgcgttgtattgtctcgtctgtatgttttctgcgcatcttttctttgaagtcctggaattgttggcgataggcttccagatcacgttcggcttgttgaaggctctttttataccgtgatatgtcgcgttgcatcgtcaatttcgagattttgagttcggtattctcgtgaagcgccgcttgattataagccggcccagctttctctaattgttcttgaaggaagtgaatcttcagtttcagaccgaaattgtccttgtccagcttatcgattatctgcaaaggttaccaaatgttcgtagccttctgtggtgtatttgcctaccttctcttgttccttgagtgtcatattacttccgtcgcccagaaccccattatctctgctcgtgagtcccgggagtggtgtgccagccacgctgctgctggccacttgcggaactggcgttggttcgtcagctgtcgcatcctcttcatcaatccctgtcatttccatgacggttaatcctggggtgttgccattgctccggtagccccctctcgcgtaagatggggtcttaggtccgcccgtccctctcgtcgtagacacattcttcatgtaattgttcttcatcgcactcttcaacattggtgtaaattcgccctttgcccccattgttggaagttgccgcgaatttaacgcgcttctggttgatttcgtgccggcagtcgcacgcggagtattaagttttgatcccgcaaagctgcgcccgcggccgtcgcctagaaccttaagaacatcttcatcttttgagggcgtctggaacgagttctctctgaacaagcccgaaggtgttctcg

SEQ ID NO: 10442 - DNA, 378 bp, Emericella nidulans
ttggggatgaacttatatatggggggagctaccaacctaagtcaacgaaaagcaaacttcatcatgcaccacatcgatagtatgaaccgagtcacatatcccctgtcaataagaacgatatacaccacttgaagctttgtctgactagactaggacggaaaccataccgactctagcgttaatttgatggatgcccatggatcccatgatatacttaacataggatacactgacattctggtgggtataccacatcatggactgctaagaatgagaatctgcaaaacgaacaacgttctggtaatcctgatactgcatactggtaagactgtaaacttccaccctatacgttttggggcattcctaaacatgccatcg

SEQ ID NO: 10443 - DNA, 145 bp, Emericella nidulans
tctttgcggagcatgggggtcgatgtcgcggcagtctcgctatctgcgcttcatctggagacgctcgacggtggcgcgccataccgagaagcagcgccccgcgccgccgatggttctcaaacatccggaggtagagggccgggga

SEQ ID NO: 10444 - DNA, 1685 bp, Emericella nidulans
tcgggatagactttcgtgtgtccaacacctgttcggtcgcaaaacagcacttaaacttggcgttttaccctcaagtagaggattataggtctcacttcgtatctttagctaatctgcaatcattagatatttcccgaggtccgtacaaaccatccgttacaactcatggtcattgatcacagattcggatgggccaatgtcgtcataagtgtgctaagtaaaattaccccaagcctgaggctgaggctggactggacctttcagctccagaaatccagcgctaaacttccgtagtctgattgggatcgtgatcccgctcgacaaatgcagtttcgatcgaccaaaggggttggatctggatccctcgactaattgacatgtcttaaccatgtctctcttcgtcgtgatgcgaactcagagtctttttctagcagattgaggctggaagttgagattccttccacttgacggccgcaggcataaggatggcccagaaaccgtagacggcgtcagcaccggcagctcgcaggagtagtggtgacggagcagacgatccacggaaaaccaccgctgttccttgttctgcgagccaattattggcactcaaacaaccaaggggctatatgcgtcgcttttattatgttctcctctgctttcttgcccggggtagacggagtcagatcatccagtttagccgtccaggcaagcgaaactcgtcggtatactctagcggcatctccagggtcgataatgctggctcgatactatgctcctaggtagcagtagattaggcacctgcttctccaccaggcactttagtacgagccgacgaggccagcgggctgatcctggtatagaaagtcacgatctcggttctggacatcctgttatctgtcctgttatctgtacgatgtccaggattgaccgagtcctgagtcctgaatcctgactgtggatctgcggatataaagaaaaaccgtcaattcattaccaaattttacaaacagagcaaaacgaaaacataaaattctcttctcctcagcttcattttctcttcttcattcccaataattcttcatctcctcgaattccctcggccaggcggccaaacgcattcctccctcctcccctttgtccaggagtcgttcctcctccgccagcctcgaccgatccctcgaccctccccctccttatcctcgcccgaccttgctgccatcccaaccgacggttattggatcaagggactatgttttgaactcggacttcattcgatcccttctctttccctccgcctcctcccagggttccggttcttctgacgcctttcgttgtacttcaatgaccctgtggaggcatacattcgtcggcagtctccctcctaccgatccgcccctcaaacattcctgacggctccgggttatctggacgtcctacgaccagagggttgcctggcagcttgaattgaatggttgctaggagtacaccgctgctgacatgagttgggatcagcctatccacaggtatgttgcattcgtacacttattgggctttgggcctgggaacattatccgaggtcgtactcaccctttgcccttcatttgccttttgtctgtgactagtccttcgtttttatccccctcatacggctttagtgcgcttagtatgtgtagcatgttctaacagag

SEQ ID NO: 10445 - DNA, 2249 bp, Emericella nidulans
acttttctacctctggttgcaacagcagagtgtattatcggaattgatattgagtattggaagacatgcgccactggcattgaggctttataagaactgggaccaaaaatggctaaaagaacagacaaagactgtcgtgtccagcatgcccttaactattccgatcaaggtctatcaactaatttgaaggaacccgggatagtcaaggactctgcaccatcatctaggccacctttacccttacagggaggcttgggcaaacgcagaaacccactagactggcttctcacctaggagagcgaagctcccttctttgtcgaccttggcgtagcaatggccatcgtgtccagcctgtctgctggtctgcactgcctcctttgctcgcgggcgcatctgcctctcatactctctgatggcgtcagccatgggcattcgaccatcagcagcggccttgacaatttcgcgagatgacaggcatccacaatggcatggttcactccctcgccgtggtctgttctcgtgttagttcaattaggctcggtccagttcggttcatttctgtccagttccgctcgactttggctccgtacagacaggcagacttacgaatcaccatacaatgcgccgcatcaccgatcaaggtgcaggggtcctaattgtacctgcatatctgcactgtagcctatatcaatcatagccaggccagtcaccacattcagatgcggatggaatcgtcgtgcttatccgtttccataaccacttgaccttcgtggtactgaaccccttttcagggccgagctatagttgctgcctggtattcgagtccgaggctactctttaagaaaagggaatagatttctttttgtattgattcatttttctggttctgctgttcaacagttcaggctcaatacctgcggcgtgcgtctctttccgtataccgaatgtataaaatcatgtactgtacaagggcttgtgacagtttattgtcttaccaaatcacgtgtcacagatctagccctgattgttttcaacacattcgaccattgggtgattcttccccttatgattcagggtgggcgacttggtggggtactgcgttatagctatcacgacgacacaattttctacgttgcagcaatatcaaggctatggcgggggtagactcaacttaaagtctctggtcagaattattacatgcgacgggttccagcttgcaccctgaacgattctttcgagcatcgtgcagtttctgtagtcacctggcgttgtctaatcctgatcagcagggtaaataatataatcgggaccagtgcttcaaggccaggacttggtttggatcaatgcgtctcaaaaccctactttcacaacgaggaaaatgcacatcgttgttgacgagcagttactgcttgtatggctctataggaattaccacagtgatttggctgccgtagatattgaatacttgatagttataatgaatgacggaaatatgaccaggttgatacaattgccgaaaatagattcttgcagatttgagtggaatctgggctaggtatgcaggcgcgggtacaacagcctggttatactctaagccgtgagcttatgcagtcgctttatagctcaataggggaactatatcacagagaggtggaagtgggcattataatcctagaagatctggatttggggcatggtctagagggaatctacagaaagcaaagtgctggcgctttagaccgagcaaaaagaggatattaacgtaacctgttttccccttgactggacgtaatgcagccttgtctacgagcttcaggacaggctaaattccgtcaaaagcatacctcatgctgccatttatgctgcctccagtagcgtcggttcgtgcgagtgccgacggagttgtaaagtggtatatactgccacgtacttaagttaccttctactccatcttcttgctccgggcagccgtgcccctatagctccacttgaataatgcgtgcgttctgcgcgtcttgtttgtgtggagcttgtccgtggcgagattccatagcatcaggtcagggcttggcgtctcaaagccctaaatctgccacatatacccattgtatctttatcattacaggttgcaggttcgcctagcatacactatataagagtttcgggaagtgcgacctgaccggaaaaccggagcgtattaactatcgggccctttccttgtcagcagctattgattatcttatcactgt

SEQ ID NO: 10446 - DNA, 1217 bp, Emericella nidulans
caaggattttaggcttgtggatcgtggagtttggatggggagcgatgattccagggcatcgatttatgcgtcagaggatgcgccgccgtgttggggtgaggagctgttgggtcagaaccagaatctgaacagggaccaggagcgggagcgggagcaggaccaggatgaagggatgggtatgggcatggatatgggcgtggcgatgtcgacgacggcggggttgaataggataccagcacgccctggattcgcgaagaaggtggaggagtcgagagagcatcagatggcgcgggcagtggtgaatgattgcttggagagtgggctggatagcgttgatataaggtatggtggcatccttaaattgagttgctgttgcaatgattctaacaaaacagcaatggcaatctacgcgttattccatctggcctgctccgacctctccagcacctcaccaagctcccatccataaaagaagctcccatcagcgaagaggtgtacacttcactacaaccgttcctccgtctcttcctttccggcaacagcttgaataccctccccggcgagctattcgagctcggcaacctgcgcgtgctcagcctgcgcaataacaagctcgccgagatcccacccgcaatccgcagactaactaagcttcaggagctgaatgtcgccgtaaaccgcttatcagtcctcccctgggagctcctctggctgatcaagaagggcgacctgaagcatctcaccgtccgaccaaaccctcttaatgaaattgatgatccagcaacgaaaatcgcccaatggcatcaaacccgggaaagcgaaaacggagtggagcacaaacctggacctgggagtctcaacgccgtcaggtacgaaggaccagccccagaagaagcatgggcaccaatccacgttgcaaccggcccagttcagtgctttaacatggatggcttccccatccaagccttgccaacgactacctctcccacaatgtcacagtcccagcctctatcccgcgtcccctcccttcgcgaagttgctctcctctctttcagtaaatccgcttacctcgacacactccccgacgatgaactagcgcatttcccggaccttgcactccggcttttttgtacgcgcgtgacgtacgcagcgccggcgggcgcttctgctcaatctgccatcgcgggtttgtcatcgcgcgcacagaagggatcgag

SEQ ID NO: 10447 - DNA, 1528 bp, Emericella nidulans
caaacgagtactcactcggaatgaacctccttgtttcagcagcatcctcagcagcccgaatcaagttcaattgagatacactgtcttcctccccgtacaacgatattgccgagatgatggtatggactttatgctcattgagaatgtgtgtgatagaggggatgtttgcgtaatcaacttcaacttgcttcacccgggatagaatttgattgttttcttgcgcctgcgaacgtttattatcacctgaagtttccgcctgtggttaaatgagagcctaccttgcgggtcaaaacaatgacttgatgcttcgcttgctgtgttaggacgtcgacaattgtcttgcccactccaccggtgccgcctgcgacggctataactgacatgtttgctgcttactagatgaattgttgctgtgagaaggacctactaccagggctgactcattcatgagtcattaagatggttctggagctcaactgtagcatggcagtgggagcttcagccgaaaatgccgccaagccgggaggtacaccattgtggcctttgcaaagcctgtaccccgctatggctcctggtcaaatcagagggcaaaatcgtattccagcactttgcctcaggcgataacggtgcagttttagggtgagcatatactaagagacatttgaatgattctttcgaaacagataagacgctcattgtcatgcaacacatggccgatcctgggcctgtgcattgcttccgttgtgggccggtagtacgataaaggttcaatcttaagtgctgtatactacagagtaaaaaggagtaaggtaggagcaataaaagatatgatgatattcggaaggttgagcctccatcgcttccaagaccgtaaaacccattatccagccaagcacgttaaaaaacactagactgtaccacttttcgtacctagatacctataatgtagcaaattcttttaagtaaacaacaagcttgtcaatcccagactcagggatggcattgtagtttgagacgcggatgccttggggtgcgtgttagctagactgcaaaaccgtcctagaaaacgcttagagaactcacctccaacgctcctgtgacccttcattcctgtaatgccacgctcggtgcctcccttgaggaaggtcttttcagattcgtcgatgttgccgttctaagccaagagttagtgatgaaccgcatgcaagttggagcgaatgcgcctaccttgacaactcggaagcagatattcatccgcgagcgcacggccttgtccggaacgatccggtagacctcggggtacgcctcaagggcttcgtaaaccttgcgggctttccgttccgcaacaacctgctgtccgtcgaccttgtccgggaaatcattgagaagcttcttgaggacttggcccgcaacgtatacactgggggagattagctaattaagtagcaagcgcagatgcaagactcactcaaagatgctaagggtgttgtatagactgttgttcctgtgggcgactagatagtcaaga

SEQ ID NO: 10448 - DNA, 1671 bp, Emericella nidulans
ggtctttcgcaacggtgaagcgaaactggggaagctgtaggagaagatgagcttttaaggtcgtcggtggttatgaggaaccaaggaaagtgacggaaggcagaaggttatcagtcgtcgagcagatgaggaatatgagtcggagctgataagataaaggtaatcgactgttgacagagggaaaggacaagatatgaagacgaaaagctacagggaatggtataaaaataccagatcggagagaacagactcgagtgatgagacagaagtgcaagcaactaacttggttgacgatgttgtcgctggggagaagcggcgagggcgtgacctgcgataacgggcagcaagacgcaatcaatggcgatgatcagaaaggcggtctagagggcggcgctagtcgaggaacctggggaaacagcagtttgctacgtagatatctaccaaaacctgcctaaaaaaaaaataaagagagcgtaattataggctctgagatgttctaaagcagctggggatttctcgaatgtagaagatgagcggcaaatgagtccttgaagcaatcaatgataacatatttcggcctgaggcagacaaaatcacgttatagattagataagagtcgtcaggcttgacatgacgatccaccgtccttccgtacagtccacgataccacgatcacctgatggctgcttctggttcccgactccgcaatcgtaccgttatcgcttgcaaatcgcaattgcattccagtcagagtcaatccatcatcgactaaggcctcttgagactcctcattatggacgctggtgcggactcaatttccaacgtctgatgtctgcccaatcattaatgggagtgcgggtgaccaccccctcaatgactcaccttaaacaagtgcgcttgccacttcacttttcatggcttcaacccaagatgcgattgcgcagtcctggcttcggcttgtcagtggccattcctctaaactgataagctagtgggctcatgctccgttctaaggtcgacgagcaagtcaggactcataacttgggtgctttgacctccactgcacgcatgatggtccactactggggcgatcggcaagcgtagccgacttctttcatctactctgagtatgtactctatatagcgagtactccgtaagggataaggcagacttagcacaaagagtgctctggtcttggaaatagtcatcggggtcctcgtgctcttgctactgtttctaatagactcaaaattggaatataaatagtaatcacctggaccttgcatatgccggagtcagtctatggggacctcgatcacggtacttgcgcagtaagccacattttctgtgacggcggggcctggggattctggataccttcctatctaagaaggcccaattcaggtggcacctggtccataatccatgcgcaggcagtttattgtaccgaattaatgaaatgtagcaaaatactctctgtctttccattgaatgaatagtaattgtatcatatagccataacggctgtcttttctcttcataacattagtaaaccagcgtagcatatcgtagcatatcgtaacacagcatccatatataatcaacataagtgtcagcatcaaacagtcataaaaaaaaatttcgagatgagaaaaagaaatgggaagcgt

SEQ ID NO: 10449 - DNA, 114 bp, Emericella nidulans
gatctggcgaatcccatacggatggatcaggaggatgctggcgatgtatgccatggagatcttgctcagggaacagggccggcatgccatccaggagatgtcatctatgtaggc

SEQ ID NO: 10450 - DNA, 1435 bp, Emericella nidulans
caacttatgtatttgtcagctcaggcgaacacttaatatcaataaaggtcaaggcattcaagatgatatccatgagtagtgaatgacaaacgctcgaagatgtggtggtggacatcccacgcgccgttagggaagaggccagcgatatcagccatcattcaactggtaagagagctgtggttcttgcagcagcaccaccggacacattcatgtctcgctcagacaccagctagtattatttgtgaccatttgactccgatcgtcgctgctatcatgtcaacgcggagagtccgagttggtcggagtgttccgtagtatctcagtcttgcccgggttactccagatcaatgattgtacatacattttatgcacccgcatacccacgatatatttgtttacatatgtaaatcgacgaacgtcgcaacagaaatctgccaacgcaatgaagaactctagtccttctctctggcaatcgatcctggccggagaggctgctgggggctttgagagtcctttgacactaagtccacggttaaacaccggcgcagtattaattttcctagtaccctaccgaatacctggaaaaccaggcagcaattacaagctacagcagctggagtacgagtttcgccatggcggctgtttaccaccacgattcggcagcatggcctgtcacacatgtacaccggtagcgcggcattctgcgtctccaacgcaagcaaatccggagtccagttcttcgcattcgagacagcacgccaattgatgcccacggacacttccgcaaggtccaccgcacggggaatatgggggctggaataatcgcgggtgcagcagagagtattcttgtcgtcactcccggcgagacgctaaagaccaagatcatcgacaacgaagccggagcaaagcgatatacgtcggctcgcgcgctatccggtcggcggttgccaccgagggagtcgccggtctgcaccggggcgtagtgacggtgacgtcgaaacagtcagccaatgcaatggtgcgattcaccagctataacttctttctccgacaccttcaggccatgtccgggtcagactcgaacaactccgtcatcggagctactgttgttgccggagcactcgctggagtagtcaccgtatacgcgacgatgccgttcgacacgctcaaaacaaggcttgaagctttagatgctcggcagcgctttaacgagactctagattgcttgaaaaccattcgtttctttgagggggttttgtccatgccgggataacccctcgctagccccgtgagtgaagctgaaccagcaatggtgacatatttgactgctgactttcagaatcgggttggagttgttttataaaggtagcaggactgttgtgcttctgggtagtgtctaacagtttggagctagttggcttaacttggcttaggc

SEQ ID NO: 10451 - DNA, 1258 bp, Emericella nidulans
gtgctatatgttctgtataggtattgtgcacgaccacttttagcaccgctgtcgccgcccatttaccagctcaccaaaacctttctttatttacctcctgcgttcgttggcggcttgaacaactacacgttcgcgagattgattcctcttgagcgcttgactccccatgatatccagcaacaacctggtgcgaagctcgcattggccctagtggttccgaccattatctgtattattgtgacccagacccaccatattcgtatgggtggtctgatgccacattatctcaaggtttacggcacgatggcgctcatacttttgattctcctcccacttcccggacttcgtctacgtatccaccattacattctcgcaatcttattgatgtacgggacggcttttcccactcgaccctcactgatttaccagggattactgcttggtttatttatcaacggcatcgctagatggggttttgcttcaattattgaaacgcctgctgccttgggcgaactagccccgggagctggcggatcacacggttggtggggagctacctggcccaacataaataatagctctgttaccatatccctacctgacagaggctctggcgagctttatcacggcaacggcaacatcacattctcactatgggaaaaggaacgcatggataaattaggcgtggacggagtgtcggtccttgtgaacgacgtcgaacgctggcgtggttacgtggacgaggatccagaaggggaatttacatggcatcgtcacggtcattcgggtcttgacctcaaacatctctccactattgacgacgacatatttgcgtcctcggagctcgaaatcaaacaagctgattcaagcgacgatgcgaagccggaaaccctcttcttccgcttcgcattcttgaatggcgccgaggcggggacgtacggcggccccgggatttggctcgaagacgggggctggatttctcctccacagccgaaaaactagataaccgtctttattagaagtactgtgcatctgttaaaggatattatagctacgactgttgtgattgggttggatacgattggtatagctggactgcagattatcttttatgagttacgaatgaattactaactactttttttacactcttagaaccagggcataatatgctcaaacacgctaatttttgtcaggtacacgtagtaaactcatttcaggtctcagacaatgaatccataacgatctaaacttagta

SEQ ID NO: 10452 - DNA, 905 bp, Emericella nidulans
gcgtaaagctcatccacactgttgacgatcgttgcacccgtcgctctggcaatacggttgttgtccgttttcctaactcggcgaattgctgtgacgttcgccttcatcaagaagtgttgtgcgagatctgaagaggttagagaagcaatctaaacctaggaatgggagaaaataccagagacgcctttctcggtaatgacaacatcgggcttcagagccagaatagcgtcacacatgtgtttgacttgctcctcttcaatctgtaggatacggttccagtcatcttccttcgtaatctcaatattggtctgtgattcacccttcttgtactccaatgggcagtccagcaggatgaccctggggttttcaattcttctccgcatcttggggtgggtaatatccttgttaaccatcacaccatcaataacctcactgtcctcaatctgaccaccgggaatcttctcaatacgcgcgtatcgcttaatgtcgacctccctctttccaccgccggcatcaaaagacacagtgcggaccgcctttagtgccaaatcgcacatgagatccgaccacctggaaacgaactttgtgccgatagatgacttaataagagtgtacatcgccttgtcgtcatcaatgtctacagggagcgaaacttcctcaatgattgcaagtgcatcagcgagggcacgtttgaaggccgagataatgacgacggggtggatgttgcgttcgagctgagggagcgcctgggcaagcatttcaccagctaaagagtcagaatcctttgtatgtgaagtcaagaaagtcacaatgaattaccgagaatgataacggtggtcgttccgtctccgacttcctcgtcttgtgtacgactcagttcgatcatgctcttagcggcggggtga

SEQ ID NO: 10453 - DNA, 443 bp, Emericella nidulans
acagttaaggaaacccacaccaggaccgaatttcaggcgacctatcaagcacgatctaatctcacataaatcgacggcggggtaagacttacacacaatagccgtatattacatcacccagggcctgcaaggactagaaaagacatgccgtggcccggagggccccgaaagcgaacaaacctcctaccctaagactgttcgcacccaccatctaaccaaaccacagcctgcaccttcgacggtggcgtctcaccaaacgaggacgaccaagcatccagagtccaacttgcggccaaatgacccccgcgggagaaaggaggtaacgcaaagtgcataccctatcaatggaggacctccctgggaccaagcactaaactccccaaggagcaggaccaatactgccagcaacaaaagcgttgaacacccaaacacacttcgctgga

SEQ ID NO: 10454 - DNA, 1667 bp, Emericella nidulans
tgaacgccgctagattgagaggcgcttgagtccagctttcgtcggaagcttgcttctctgggaatggccagcattcgtacttcgtaaccctagggtactccgtggtagctcaattaggaaggtgcgcctaatcgacctcccttgagctagaacctcgccagccaaggataagcctccaaccctcgcgcacgatcagatactggagactctaaattattattgacccggggtttgacagttctaacggcttacaagtgttttgattcgacatatccactgcagctacggagaagaacctgcagaaatgatactcgctggttcatgcttcaagctaggagattttttgaggacatctcaccctgtctccctgcgatgtaacaagagtcgcgccgtccgttccacatctgcttctttccaacgaacggcggggatgctatgctccgaacccgaagcgggactcacaaaatctgtgatggctggcgagatgagacggagggatccggagaaaagcactaacattcttgatacggcgtagccccgtcgaacgccacctcagctcagtcaacgccgtctccttgagacagcgttaagggtgggacctcaagacggaacgtttgctctttgttcttttgactttgtacttttgactttgctagactagcgctaacgggtttcagacctgatcggcagctggggattcatgcacatcaccagcgacccagttcttgaagacagcatctgacacacacccgcagacgctatcctggtcgaatccttgaagggaagatcgccagacacctggcactgtgtcaacatgagttcggtgagatcatctgcccatgcggaccattcaaggcgttctttgaccacaaacaacgtattcctcgtccgttatagcaatgatatcgtggcctaattaaatgcgaaatccggaaaatacgtctcgtggtctgcgatagcccaataatactctcgactgttacctatgtgcgtctccgatcatcatataatagccgatattaatcgacgaatgctagcgagctcgagatcgcgcgccggcgcggcgaccccctatactactttcggaatctcgcctggtccaccagccagtcactttgcgtcgttcacgggcctcgatgagagattcctttatgccccgcaggtggctccacctaaatactaagggcgtcattcttatattataacttcgaacaggtgagctaagaggttggtcgaacttcaatgtctgacgggactgaatccgcctcgatcatcggtacgaacaaatgatggcgggacaatccgacctcctgcgttctccgtacacccagctgaagctgccacggtcagtccgatgaccgaagggtaatttaacagtccaaagtaggtatggcagtcctttgatatgcatggactttcctcttaacaacgactaagacattctcccaccctgtgtttattatcctcagaatcaatcagcttccaacccaagtcgagcacacgccatccggactaacgcagcccagggaatccaacttgacgagaaatcttaaatctccttaggctcttggcatgagccaggtatcatgaaccctccgaaatgggtacggatacagcagcaatacatacatgctcggtacttaacgccactcgagaggagattctcg

SEQ ID NO: 10455 - DNA, 487 bp, Emericella nidulans
ggagagtccgtgttcaatgtgttgactaggagtattagtggaaaaggaccccgataccgtagacatcttcagaaatagagacacacccagctatagatgtgctatatgagctactgctgggcttctggaagcgccgcttagattccggttctgcagctcggtgggccttgtctggcttagtaaagaagtcagtgtcttgttttggggccccaccggcggttactagggctatatgcgcgatgaggtttttttgtgacagggagactattgttacgttcacaaggtttcttgtaaaaatagggtaggatataaactgtgcatcagctagtcttcagactatacggcccgattgatggttggacgatacaatttgcgctgaaattacctgccacggatctatattggggtgtcccagcgcctaagtaaagatcgacgtgacggcctgaacctgcactggttctttggagatgatcaaccgcccctgggt

SEQ ID NO: 10456 - DNA, 127 bp, Emericella nidulans
  unsure (1)..(127): unsure at all n locations
ctccatcggttcgtagctgncgggatggtcgcaanaaactcgcaggaaatgggcgagaatatgattgtgcgcggggtattcgcggcaataatgttcttgggtttatttgttacgtgctagttgatat

SEQ ID NO: 10457 - DNA, 229 bp, Emericella nidulans
  unsure (1)..(229): unsure at all n locations
cgggtgccgacagcgtataactgccacggaaacggccgcaacagagcgtgagaatacagcactgcgnaggctgtcgtgccactgtgcaagatcgttcgcngagtcgacttctctgggaatgnagctctaaacgggcgcctaaatacaatgtacacgccaacaatggcagccaaatgatagngcagacgtagagtgatcgcacgatgaccagaancttgaaaagagagtt

SEQ ID NO: 10458 - DNA, 534 bp, Emericella nidulans
  unsure (1)..(534): unsure at all n locations
tttaatataactccaccggctgggggccgctcatataactattggatccccctttctgcatctattcgtcatcaaccttatcgatacccccnacgtcnatcttaaatttaaaagggctctggtcaaaacaaaaaacagaatctaccccccttactccatccataacctactcttatacttccctcccttttactttgcatacatcagcacctttatttaaattctaccatctaccccctacaccatcttatctcaacttaccacccttacatcacatccttgaccatttttatccatcaacccctttttccatctatatcactccctctaaccaataatctattatttacacactccattcccatccccccctttccaagcgcaacatacccctctctctatctattttcataatcccttccttctttctcctcttcaaacatctcccctccccattctcggctccccttgtccccaaatctttcctttgtccccccaacttacttactaccaacaacatccctcatcataacc

SEQ ID NO: 10459 - DNA, 2543 bp, Emericella nidulans
ctccgagatctctgaccccgagtcaccgtcttcgtcatcctcgtaaaagtcggcaaatggttcgcaaaagtctttgatctctaagtcaggggcgacggtcccgaagtcgaaggagtgaacctggacggagcggatgaagcgcgggaggggcacctgctggaatttgtcgtggataaaagagcggatgcgctcagctagagcctcgccgtccggaccagaggtggcggtcccccaattgacttcgatggacatcacatgtggaggtgaaagggagttgactgactgttgaagcaattgacaaaaggaaggccagtattgtccggcatatcacgtgattgagcaagggccatcgagcgatccgaccaggtgccctcaacagcctcaactttgaacttgcatcattctgattaaccccaacgacaacaaagatcaagctccattgctgactcgagatatatttctgaacagatattagggcctttagctgccctctctcttgttctagcagttcactgtgtctccttgattaaaaactgggttcacaccgctttaggtttacttccgagcttctaccgacccagcattctggctcgcgctgtgcggcctcaatccttgccgctcctctgtttgactcagcagagcgtgctcgacggaacaaagccatgctctccgttgaatattacatgatctagctgtctcaagtggctcaacgtgaggaatctagagatgccgggcccgagactggtgatacctaccatggtcttttagccacgagatattcgcgagtgcggtccaaagaccatactaaactccaacactcgagctcttgaatccgccgctgtaattggtgttttgtcgtctctgcacttggaaatgatgggtcttgtgggtatgcgcccacccatataaacccttcgactccccttgatcctggcttatatttcatcaaactggctcttcttaagagcatctttccttgcatttccatatctgtggagcacaggtgtgtcggtacctccgcgttactttctttcgggcctgagattcgtgatagacctcttggcggcgaggaagcagcgccacatccggcaagtttctttgtgatgacactcgcgaattggccctcgctaacccacaatcccatcgttaactcgctggccttgttttctgcggcacggacgtcgggcatctcctggcgatgctcagcgaatcaatctcgtgtcacacttgcagggtgccagatgtatcctaagagacaataataaattgttctatgcagcaaagcctaacttccgaagcgatggaatgtcctttcactttggctgcacccacacgcttccaagagctaacactagcattttcccctcccgcgtcccggttggccctacggagtaggatgcttcgatcgccaccggatgacccaaagcatcctctccaaacctttctatgattcgaggatacgaatcagatgacgagaactgcctgcggtgctaatgcgattcccatgtagagtgctaatcattgctgaccggaaaggcaaaaataacggatactaatatgtatcccatctctgattcgtttctgcgcacacacgccagctccctccaaggtacgcgaattcacccacattcgatgggatgtgaagcggttggagggtgtcgtttcccctccaccagctatcagcgttactttgtccttctcaagtcaagctattacctgaagagcgctgatgacgttctcaagactggaattggcagctagcggagatattcatgaagaggttaggctatactgcctgctgataaggtggtgtgtgcattaagtgccatctacgagcctgtctgcatatattctcttaaaagcggacaggattggcccgggacggggactcctccccttctatcctacagtatacgcttgacaaacttcggtaatctggatgtagagaaggctgctgccgccgcgagattgtggctgttttgtcttcctccttccccgcttcgtatactggaaacgcgtctttagatgggaaattaaagtgaagtttggctgcactagaggccttttatgatagaacaccggacaaaaaatgtccagtctggcaaatatagttaaagattgtagtattggtggtggcagcaaaaaacacaaaaatcgtactatccagcaaactcgacacgaaatgatcaccaattcagaaaacgacaaagataaaggacacaaaaattgtagcaacaaaagcgacataacagttgaaggtgcatataactggtccctttcgcacatccctccttaaatcagagtttccacgcaaaaaccaacgtccatatagcggtcaaaatcttgcaaggctgcaagcaaacttgccagggatctgctctcccggataacgccgatgccgattatccaaaagagctctgatcattctcttgccctgggggatatggtaaccgttgccatcctgaagatgcatgttagtgtatgaatgcacagtttcgttctcgcggatatgggtcgggacaacagtggtggtgaggagtgcc

SEQ ID NO: 10460 - DNA, 1429 bp, Emericella nidulans
tcaaacgatgtgacctgcggacgccgccgcaatccgagacacagactccggtcgcgcaggataatcgaccaccacagcctcttcttcattgatgctttgactacctctgtttcggatccagcgtcggcttcaagagcgccaggtcgacagccacttccgatgatgagcgcattttggatcgcccgcgtcagccatagactgctgatttgcggctctgaagcggacgtatgtaaagtcaggatgacggctccttgtgctaggcaatacggcctgtcttcagcgtgaaggtcatatagcgttttaacgcgggcatagaggccattacgtgcggcgcgtttatcgctccaaccgcattggcggatcgtctcgatggacacgtactgtcaacacagatcccttattagctcggagtcactttcttggtttgacgagaaaaacggaaagggggatcatacgggagacccggcaaatatgacggcctgaaacacgaagagagaaattttcttgcccctcccagcggcagtctgcgagttcttgtagatatgccagaactccgcttcgtctaccaccggggaactcgggtggacctggaggaaatattgacggacgaactcatcgagtaaagtctccaccggaacgcttaggcaaccttttgctgcaaggaaggcgaggtctgcgcggtcgagagtggtgagagtgcgaagttcgaggaagggataatctgtgaagctgatgtggcccggaaaagagctcgacttagaagtagacgaaaaggcgaggtctcggtccaccccgtccgcttcaagtgccagagcccggatgcgctccaggtgcgggtttgtcgcgttgatcgtgtcttggtcctgattattgccagcgttgctctgccctatgaagccggtgaaactgcgcgttatcgagtcaatatcccgttaccggttcaaacaagatctagacaaggaagcgctcactttcgcggcattttcccacgtaaaacacattccggccgcccgtcctgtcgacagcgcgtacatggacaaccccggatcgaggcatcgcagcggactttacggtggtgacaccaggaacacgccttgggagctcgtcgtgtacggcgcagcatctttgcctcagtctttcgtcagggcacaactggcatggatatcagatcaaagtgtcgcaaacaaagtgtcgaatgagagctgccgaggattgcaacaagggaaaagagatagacaaggtgatgcgggcaagatcaagtgggcaagggagatcaagtagattgcaggcagcacaaaagagagctcagtgcgctagcagtaattgtttagattgcggcagtgaagccatgtggccaggatgcgagcagttgacgtagaaggttcaaggcttttgcgtggcattgtaatctaccacctagccgaggacg

SEQ ID NO: 10461 - DNA, 1903 bp, Emericella nidulans
aggtggtgttgtagctatatttcttgtcggatctccttaaacggactcggtatagcggcgttgctgaatatagcgggatcctttttcataacattcaccctagcagcatcacctccaaacaacagattgcgagaaattgactagaaagtgctaattgcaaagcaaatgggacaaaaaggttgaaaagccaagatatcacgctcatattccgaactgcaatggctatgaccgcttgctggagacatccaccttggtggtaacttggatgccctgtgacgaaggctctattatttcctctatatcaggactagagctgcagcgagctgtttggtaactctcattacggcctttagaccacgaggccccatagtcaaccaaatcaacggctgatccgctctctcgaggggtgctcgtcttgtttgggccggtgctgttgtttgtgcgcgatgccattgatgaccatattgagttatcacgactgcgaagcgtgaataccgagcgaacactacggattaatgactcaggggctctaccccgtgcaagcagcggtccgtaacagggcagacatgcagcaatgattgaacagttcggctcgaggatcatgaaaatgaactgtcgggactgggttgctgggagcgaagtaagtataagtcagtgaagtccgccagtctgggatatcgtggagaataggggcactcacaaaccatggagccatcggtggctacctgggaaagagacgatctcagaagcaccagtcggacaatggccgcgacacagcaactgatccagacagtcagtgtaggttctcttgacgagccataaagcaggacgatggacttgcaatgctccaagccagaagatgagagcgacggcgatctttctccgcgtaggcatatgaagcctccatataacaggaaggggaaacatgagaacaataaagtccaaggcaatgctagtgccgacctgggactctccgattgcgacagtgtcataccggaatcggccaataccggtccaggcagcgctgattggatcaccttcgaagaggaccagctgcgactttgttatttcaaggaaaagggccttttgtggacgacatcttacaaagaaaaacataatcccccatccacctattacatagatcgcgatccaggcggcggttcggaacttgcgcgttgcgaagattctcatatacagaaacaaaatcgaaatcttcaccaccgagaggctgacttgtaaaatcaggctcgatacaaggaggcattgaagcgacctagatacccccaacgcgggatcgatcttgtagtggtctatcccagtgatggaaccgaagacccaggcattaacgctgagaccgaaagctgagacctgcgcgtcgcatgttagttagactgatagactaagcccaacgccgagtatgcccaagtatgatttggaatacttgcccacgatgccaggatccaccagtcgtcggcctgcaatgataatcgggctgtttggcgggccatataccggatcacgatcgccatgagagacaggacaggaaaaatggcagacaccactatcagggcggtgctcacaaccgcgcgaaccggtgagacttccatcgtgttcttgttagcagtagtaacgaaccaaaatttgctgttgggttggcgagactgtcagcgagaggggaaagaacaaatatgggaacaaaatacgctacgacagatgtgagactcgaccagccgttctaatttaggtccagactcccgaggggctgcaaggtcaaggtggtcagacaagtttgacattggaccaggttggggatgggcaaatagaaggcagaaagctggaccaggattgccgtgcagcgttatgagaatcgaatctatgtatatcaagaacattgggggctgaa

SEQ ID NO: 10462 - DNA, 219 bp, Emericella nidulans
  unsure (1)..(219): unsure at all n locations
ggacactacgcacctcagcgttgtagggcacgtaagtgtcacatagtctctgcgtgcatctctattatatcgtccgggcgtgcatctgtcanaggcgcgatctcattcagactccgacgttgtacctaggacagggtgcaaagccattcgctgtcgtgtactaaaggcagcaactccgttagaatgtatgcatcataggggattataaagggtacaata

SEQ ID NO: 10463 - DNA, 1053 bp, Emericella nidulans
gtattgactccccaggctatgtcatagcatgtaaaatatgtatcctttaatcatatacttgaggtgcagcgggcgtatcctggactcctctagcgagaatcaatgcgctttctcagcagcccgtgaattcacggatagtgactatcagtccataaagtcgcctctgaggatcttctcctggaaaaagtcgggtttattgacttgtttaggttgcttgggcatttcccgtgcgggcagatccagggacgcaacggatgcagaccggcggtgctgggtctgcggggcctgctgggcctgggctgaatttggagataaagggccgcgttcggcccttgctcgaagagcttcagaccagttgaagccctcgcctattggtcgccaagatttgttagatatatcgttctggggaagaccgttatatgtacttgcagataatgatactggagcacctgtgttggttgtagggctggagagaccggcagacgacgctgtccggcgctttccagtggcaggtgatacagggggggagagatggtatctaccgttgccgatgcttccagcgcgggcatctcgcagcgcctgggcaccgaaagaaagtcggcgaacaaatggagacctcggcatggtgccaggaggcgagttttcatcttctgcgatggcttcttcggggttcccggggctagatcccacggagcttgagatgctaccctgccgaaagtttcggttcccatacggcaaagtctgagttggagagccggacaggcccagggtcgtgatggacagcctgcgtctctggtttgcttgagcattggccatagtactggccatggaaccggttggagggctggctaaaccctgattgcctggcttatactcagggaaagagagcccagacgcgaaggatgctcgacgctggcgggaagaggatgggggaacggaaattggaggggtcgagctgtggtttgacatgatttatggattgtagagcggataggtagaaaagatatgagcaggatagctgcgaagcgtgttaatgaagtaccgaatagagat

SEQ ID NO: 10464 - DNA, 192 bp, Emericella nidulans
  unsure (1)..(192): unsure at all n locations
ggacgagtcgccgtnacanatgggggcatagatgggctagtagaaaaagacagttttgcgcacgagtaaatgctatgcaacggtatcggtacgcaccgcctggacgcacngccaacggatatagctacacagggtatattcgacgaattgacngcgcttgntgatttattagggcccagcttggatggattg

SEQ ID NO: 10465 - DNA, 1609 bp, Emericella nidulans
ttggttaccctaaatacctcgtcagagcatgaaacagccttatcaaatctttaccaaatctacttagaagccgctacagcgaaatatatgtatcgtcctcctacttacatgcagaatgattccgaaacgccagccgaggtactgagcgttactttggactaagccctgtcgacggctcctaccatgaggccccaaaatatgaagaaaatgtggaggattcgcctaagctctggatgtaaactaaccccctatccccccacatgaaggaaaaacaacggtggacaccagctgaagactcaagacgccctagcggccttggtgcggcgcgttgaggattcattggctgttggggaaaccgtgcgccacgatataggaagggctcgctctagaacgatttagccgatattgggtgcgcgccagcgtaggctaataagactgagccaatctcacccatgatcgtgacactgggatcttgtgtcactattgcaaaccccttttctgaacgagacaaaggtctcatggcaagatgggcttgtttggcgcgtgggctttgtgcctatctctactgccccgtaagcattcttgcgtattgttgaatactgctgctaacgcaccccagtctcccttgcccaagattgcaatcgcgaattctacattactagccaggctgatgcggacagtgtcggacgagactgcccaatagtaaacagcagtgtgctcataaacggatcgtacacgggctctctggttctgaacagtgtacgcaatatcacggggacccttaaggctgtttggccggattcgaccagcccccagcccatgtcggttgaactgccggatcttgaatatgtgaacgggatcgacttccccgcgttgacagcatccaggttttccgctccgatgctagagacagccaactatatgtatctgggacaggcagcgcccggaagtgagcttgatctcccgtcccttgtgactgtaaagcaatcactgagtctcatcgggaattattcgaggtatttccccagcccaggaacaagcccatatcgctgatactcgcaagtgtgaatctagcctcgctgaaaactgtaaaagatggcctctcaatctgcagtatcgacggctgcgcggaggaagagccctacagtgcaatgaccagcgtcatgaatctgacgctctcatctctaacttcggtcggccgatttaagcttgctgtgaagacagaaaggtttgcccttcgttactcggatggcgctgaatcctgaaacaatactgatatggagatagtatttcgctaccagatctcgaaacaataaccgttgctagcagcattctctctaggattgacatacgtgtgctcgacgccaccgcatctctcaacattccgcgaataaatcatctcaaaagactgctctatatagagggatctatatcaaggtacataagaaatcatatccatcttgtcctctccaacagagtttgcgggctaatatgatctccctacccagcctcaatctatcctccctatatgatgcggaggcatagcataagcatcatgacttcgcacccgctcaatattagcccttccatattcgaggcggaaggtctg

SEQ ID NO: 10466 - DNA, 806 bp, Emericella nidulans
taaagctttattccattattcatcatgattattgattatttgcatttgtcattgacctttgtgttaccccgccactaacttgcatgtgcttttatttcccgttccggggcggctgtccactctcgcctcgtcgaccgaactgctcttcgtctttgttcggcaggaggcagaatatcgctggtcatgaacactgcttgtacttggagctctgaattaagtgactcgcccagtcactttctgccctattctaagtgttgtggaacagccaatgcaatgtccaacaccacatataccggaccatacggcccactcccctctccaacgggcttcagcgataggccatagaagcatggttatggatatttctgctcattaccgatggtcataccagtgagacagtgatctttcatccagtgtcattaatctgtagcaacccatccgaagatgcgggtcattaactatatgtgcatggttgctctctattcagtgcctggctgagtctagcttccaaagaggcctttgtgcaaacacgtcaaacacgtcaaactagtcaatagtgaaggcatatactactttgatccatatgtgattgcagcggaaaggcacgattcgttctccatcgcggtcaagcttgaagctttagggatttccttctcgcccagtcattccgcctcaagaagcctatcacgaacgccagctttacctggatgatgaaaaaagactatgcgatgagagcttctgcgcaccataggcgtctattgtagcctgtgattggtgagtagaggcatgaggctgcgaacgtaaaa

SEQ ID NO: 10467 - DNA, 1308 bp, Emericella nidulans
  unsure (1)..(1308): unsure at all n locations
ttttttacaagactatcatggtcgctggatcgaactggttcccaccgtcattaattaagcaaatgttcaccgtcacagtccaactaaggaatgtacacgccatgcaggagttactgaaagtatgcaaggagaatcagctgcagctgccaagcgctgtagcatacgaggttattcatctcttcccccaggacaccttcagcgccgtgcactacgtgctccaatgtctcgacagcccacatgccgaacttgataaagagacctacgaacagctcttcgtcaatgcctttcagaataaacacttcaacatctgccgcgtgctttggagatacgcctgcatgaatgagtccacaacgaaacccatgaggagcaccttgaacttccttctaacgcaaaataaagcatcaaaccgtttctcggaatgggaccaacgatggtggacgaccgctggcaaagtcatcgctggagtctgtctacatctccccaagtacccgctcaaggatgacctccttcgtgtcatcccaccagaatttcacgacagtcccctctcggcctttgtaaattctggcacggtcgaagggaaggaacgtgcgaggcagcgcacagcagccaaagcaatcgttaggcacgactatcagattggcgcgtggtaccggccgaaatactcggtgacacacatgttggaggctgctctcgctctagataaggaatggggcagtgttccccgtcccgcgaattggttcttacaaaacgccctcgacatccctattgagttggatttgaggaagcgcaagagacataagaggtagaactgtgtctatctccgagacttcttcccacccgtggaaaggctttatggcctgatatccttatatggctgggccttgtcggatcggaacgtataaatctcctattgtactatatcccatgtatattcatttacgccctacttagactaagccacccggccgctgtacctatatactgtatataccaagtgctatagacattgtatcataaactttgncttctanttttttttttattttgagtctgtatgctatgccgagcaactaatcggatcaatgggttctacgaggtcaatgagaggaccattcacctttgaagaccgatgtcgcgctgcgtactgtagcacctggttatcaaaccttgcccttccgatgacaagaatcaaagttcaactcaagcgagaggcggagtaagtgaaccgcacaatatgatgcccttagatgctgcgctagcccgagcctaatggatgcaattttaccgtctctgtcgtgactcaatcca

SEQ ID NO: 10468 - DNA, 106 bp, Emericella nidulans
  unsure (1)..(106): unsure at all n locations
aacaattccgggtaattcggggaactngcccaattcgcaggcggctcaaagagcacggactcagcgcagtgctcagctagcagtaaccaggcctgggcagggcaaa

SEQ ID NO: 10469 - DNA, 1772 bp, Emericella nidulans
tccagcccggaacccttccgcgttcacctcgcctcagtttacgaactcggtggcttccctcagaacctttcggacatagaagcacagaaccaacaggcagcccgacgcagagttcgcacaacgctgtctgtactcgaatttgctggctgcggaaggtctgggtaatcagcagatattagctggtcctcagtctcctgtcggtggtctgggcggacttggaaatactgcatacggaagccctgctgcggctgtaacccctggtcttctttctggtactagccggactgtataccttggcaacattcccccggagactccagcagaggaaatccttaaccatgttcggagcggtcaaattgagtctgttcgcttgcttccggacaagaactgcgccttcatctcgtttttggacagtaactcagccacccactttcactcagacgccattctcaaaaaactagccatcaagggtaacgacatcaaggttggctggggtaagccgtcgcaggttcctacctccgtcgccctggcagtccaacaatcgggagcgtcgcgtaatgtatatcttggaaatctaccggaggagacaacagaggatgagttgcgggaagagcttgggaaatttggcccaatcgataccgtgaagattgtgaaggaaaaggccattggcttcgtccatttcttgtccattacgaacgccatgaaagccgtttcccagcttcctcaggaaacgaaatggcagactccccggcgtgtcttttatggcaaggatcgatgcgcctatgtctcgaagacacagcagcaaaatgctgcacagttcctgggaatcgcgccgggatatgcgcatattctcaactcggcggaccgggacctgatcaccaacgctctagcccagcaatctgtggctgcggcggcggtggctacctccgctggcggtgtcaacaaccttggaaaccggactatctaccttggcaacatccaccctgagactaccattgaagagatttgcaacgtggtgcgaggaggcctcttacaccatattcgatacattccggacaagcatatttgctttgtcacatttattgacccgacatcagctgcttccttctacgctctcagcaacctacaggggctcatgattcacaacaggcggctgaagattggctggggtaaacactccggacctcttcctcctgcgattgcacttgccgtcagtggcggtgcatctcgcaacgtatatgtcggcaacctagatgaatcgtgggctgaagatcgtctgcgtcaagacttctcagagtacggagagatcgagttggtaaacacgcttcgagagaaaagctgtgcctttgttaattttaccaacatcgcgaacgcaataaaagccatcgagggcatgcgaaaccgggaggagtaccggcgtttcaaaatcaacttcgggaaagaccgctgtggaaacccacctcgtcagacaggtaatgctggacagcaaacccgcaatggcggtggttttgagggcccgcagtcaccctcaccagccctcaatggtttccatacccttggccaacctggcgcgcacgctagtccaacgcgcccggcactttcacccgctcctggctctacgggatctcagaacggccaaccgaaccgacacccgcttcagaccgtaacatctccgtccagcattttgaacaatggccctaataacccattaacgatgtacctcaaccaaatgtctacgcagcaggttcaggaataggaagactgctgaacga

SEQ ID NO: 10470 - DNA, 141 bp, Emericella nidulans
ccaacaacctgcctaggcagtagactcaccaacagtcaaatcagtccaacggacagggtaacctaatcgcacacgccgtccaaacatattgaactcatctgccgagatctctcactacaccgccagccctgggcactaagc

SEQ ID NO: 10471 - DNA, 299 bp, Emericella nidulans
cagatccagatgtcattaacaacgatgtctaagagctaagcactctattgtcaaataccggctcctttgcgtgacgcctcgtcgggtcaagacggatttgctacatagacattgtgggcgctcgctggattacgtcctcacgaaacactacgacgtagaggtaactcggaactaaccttgtcgttaactcccggcttcctaggaacgcatcgtagatggacgcgtcaacgacgaagtcggtgctgtcgcgcggcatgcagttagcgcgtaggacctatactcgacgaccatactcgtga

SEQ ID NO: 10472 - DNA, 383 bp, Emericella nidulans
gtatatgttaatctcaacacggggctggggctcataaaaaaaaaccattattaccaccaatatccaatcaaggccctcactaaaacctctgttatattgtgagctattaacaacttcccactacataccagcatcaatcttaaactagaacttctcatgatactaaaaactgatctaacacataacaattattatcccctcaacaacttttttctagacactaaacctcaactgatcaatccattaattaaatggccaacctatagacatattttacttcaaaataccactctacagcctttacttatttactaaatgcatagcatcttttttctgaataggcaagccaaatcagataattcaaacgcccacaaacatatatt

SEQ ID NO: 10473 - DNA, 430 bp, Emericella nidulans
agcgaagagcggaggaaatgggaggggcaccgcagggcagaagaggggagttgagggagcggcgagctaatgcggaagtgaaccgaaccgacgacatggcggaataatgggcttattcacaaacgacgcgaatgggcgaaagataatgggatgtggaggaggggcggacgagaggcccttgtctgctgcaagcggattcgaccgtcggtaagtgaagacgcgattctcaacgcgactgcaacgcacgcgaggaaactcgacgtaggatgctcgggtgtaaggagagcgcagtgaaatcgcatagtgtccacgtcatcttctcaagtgactgctgcggacagaaccggagctggcctgaaaatgattaacagtgcagaatgggaggaggggtgtcgtggaaggggcaagggaaaaagactgctggtgatgg

SEQ ID NO: 10474 - DNA, 155 bp, Emericella nidulans
tctagtaacggccgcgagtgtgcgtgtgatgtcaagtggagtttggcttctttcgggaatggcatttgattactcttacgagttcataccaggtccgtctgtctcccaggtgcatgcgtcgtaatgtcgtaattgtacctctccggatatactcg

SEQ ID NO: 10475 - DNA, 1463 bp, Emericella nidulans
acaagtcctggaatcgtcttcctccgcgccatggttgagcgctggctcagtaaaatcttcggcgctcatttcatctacatactcagcatcgcttgtagattctgacccgtcagcaccgtcgacgcttgtttcgatttcgagttcctcgccgtcgtgcacgaatgctgatccattagggtatgctatgtttgtatcatcatcgttttcgtcgtcgtcgtcattatcaagcccatcctcagcttccaatgttgatgccagcccagtagcgtctctgatattcatccctctcgttcccatcatcgccaaaggttgttgggcatcaggaggtgttggaggaggaaggaactggttccatatagcgaacggggcgttcggtctctggacgacgagaatgacttcgccgcgcgggtcgaggacataatccggttccatgggagtctgttagagaagcaaagtcaacggatgtatgggaataataagccagcagaagggaggattataacgctggaagcggactggacaaaagattctagatatcagcttggctcctttcctcgataacgcgccttctatcttcagactttcgcccacgccaacaactagctagatgcagagcccattttactggcccacatggatcatctgcatccatcgtggcttccaacccgggctcaagagcagtgccctaccgctggcgccggtggtataacgggcattccatgcggcgcaatgaagaggaccaacagtccacttataacggtaagttggccttaggagccttcaatccctgttgttctttcaatttcgttgttttcgttgttatttcggtttcgtcagcttctagaacgtagacctagaatcttgtcagggatcatgggactagcggtagtccatctgtgatttcgatctcaagcacgcttgtgcctctggtttatacaatctcttcttgtatatgccccggaagcagtcattgcatcaaagcctgcattggggacctctgtggaacctgcctcgaggtatcctaacagccgccgattcctctcgtctaaagaggtagccctaatcgtttggcaaatcaaccagttctggtttgatacgcgccggagctttaagtgtccttgtagcctcttagaacaggctttctcaaaatatgtcgcgaatagatcccgggagatctaacgagttgaacataacttctgctctccccgcgactcccacggtacttcgatcatttgaataactggtgattcctggcatcgccaggcgtagtcctgacttttaatttgaagaagcgcgaaccaagtacggaagcttctgcaggagacagaagggatatcagcatcgctatccaataagcttttcacagcgcctattcggtcgccgttgataaattacttctatattgtgaatgacagcctactatctaagcgcagtatataagacatataagcagtgcccgcaca

SEQ ID NO: 10476 - DNA, 1473 bp, Emericella nidulans
caacgcgcgcatgataaccggccacccgtatatgatcacaagcgcgttgtcacggtccgctacgtgtggtttaatgccgaggacgtcaactggtttaaggctttgcagctgtggactagacgtggacgcagcgggttcatcaaggagagtcttggtacgcatggttacttcaagtgtacctttgacggaaaaatcaacccgcaagattcggttggaatcagtctgtacaagcgtgtgttcccgcgaaaggcgagggctttggaggaggttgcgaactaagcaaccagcccttttatccgcgcctactgctttatattggttcttggggtagtttgttgatgatggtgaggcaaagaagaggaataatatgataccataaagtggactgcatgatatgacgaacttcctgacttcagttacttgggaatattctctaaaaagtcatttgggctatataaatagatgtcgttgaacggcgaaccagaccgtaatgaattatgattggactcctgcatacttcatgataatacctacctagtcctaccaaatcaccaaagcgtaaataagccggcgaaagagagcaaagtcaaccattctacctagcgagaaaaagtaacaggagttatttcgatcacgtttgaatgttgtcatgtcaaacgaaatccaaaccctgtgttggcgatcgaagggacggtgagtagagagagggacaactcgaaaaggatttgaagctcaagcaaaatcatcttcctcgggcccttcgattccgttttttactcgcaacaagatggttgtcttccacttgtctagcttgctgagctggtcgaactggaagagcttatcggcgaatgcttcctggtcgtgcgcttcaatggtttgaatcaggtctactaaaagctggtgttctcttgtagaggcgaatgtgggatcaatgtcgcgatagctctctagcgcgcggttggcggagaccatgtcctgtttgcgaatcagtgagcagaaacatagtagattatgtgcaggtaacgaacttgagtagctaggtgcaaagcccggccttgagaaggtaatccttgacggaccatttcatcagaccgttgttgatggacgagcggccaatgcgctcatagtgctcaatagccttgtagtaatcactttccagcgcggccagatcggcagctttaaggtaatgcttgtttgcgaggctgcacggggcgaatattagagacatgaaaagctgtaagatcagggagttggtgtatactcacgcctcggcattatcagcatcgaaccactccgcagccttctcataagcctccagcgcgttctttatatcccctaattcttgctcataaacttctgccagatactgctgctgagaagccgcccgacgcaggttcccgttcagcacgtagtgctggatagcagtagaaagcacacggacggcatcctcgggatctgacttgcggtagacct

SEQ ID NO: 10477 - DNA, 1439 bp, Emericella nidulans
ttaagaagccatgcttaatcccagagaacctgagttcgtacaatctgtttgacagggacaagctaccgttcgctgcagagggttacctggcgattcccctatttctgggggatgaatgccttgcttacctgggattaatgtggtcagatgtgggattgcagaatcgaaagctttcttggtcgttcatcgaaacagtgctcttctccttggaggacttggttgtccaacgaatccaggaggataggcgtgtggcagaacagcaacaatctgtcccaggctcggctctaggtggacgaaatatagacgatgaaatggcgccgcctgcgcaaggcgcgcagttctcttcgcagcatctcaaaccatttgcgcgcagctctcgcacgaacttcgtacgccaatgcagggaattgtgggtatgttggatgtcatgcatgcaactgtgcgtgatgctcttatcggcaaaccccctccgaaaactgcatacgtctttcaatcgctcaaggagagcattgaaatggtccaaggtttgtacggccttcagtaccatcggcgttgttactaatacctaaacagatagtgcgaggagggctgttgaagcagcggataatgttgtccatgcttacgatctcaacatggaggtccctaaaacccctcaggtggagcgagacagcatcgttttctctgcttctcctatttcaacatccgagagtcggccaaacgtgtttatagagggcaacaacatggccgccaatccctacaaacgtcgaaggagcaacccgccagaacttgggaaaacccctactccgaagccaaaagctcgtcgacttacgtctccgaaagagctctccccgcgtaccgaggaggtaaaaaatgccgtgcatgagaccgacaagatcttcaatacttcaacacctgctcatcaaatagaagccgtaatggctagtatggtcaatcctcggccgtccttagctgttcgaagatcggcacctcatcttctgctggagggcatcaacgtcaatttccagggtccggcactacgcttcaccaagcttcgtgatcttcttcgattggtggttaacgaatcccttcatgttggcggcaggcccgattttgtggtcagcggcgcgacagagttgggtgaaatgattgaggtccggacgcggtcatctaatggagaagtattttctaagaccatagactggtccgtggacaatgcagtacccgatgcgctgtttgcggatgaccgagacctggccaagctgatttcctgcgtttttcttaacgctgtcaaattcacaaacaacggtttgatcacggttagggccacgctcagccgcaaaactaacgatatattgatcaacgttcgtgacaccggccccggtatccctatggcattcttgcccaatcttttcaaaccgtttgcccgggaagatgcgtca

SEQ ID NO: 10478 - DNA, 139 bp, Emericella nidulans
gttgtcctgcagttcatcatgactattatgtcgggtctcatcgatacatgtgccaagattcttatgctgtcatccgttgcgttatccattgcgtcgtgtctatgggttttatctcccgggctgtgagaacatcatagag

SEQ ID NO: 10479 - DNA, 110 bp, Emericella nidulans
tacgttctggtcgctgctgaaatagtggtcatagacacttgcgaaatcctgatatgtccgcgtcttgcgatacatgcggtatcccgcttcctgagcctcgtgagttcgaa

SEQ ID NO: 10480 - DNA, 473 bp, Emericella nidulans
atattcacagtggttatgtcttgtggagacagtgagacggatgacgcggatattgtggcctttcgacggagactcccgccagagatgaatgaggctcgggatattggggaagatgtcgacgattggttgtccttgtccttatccgattgagatgtgtcttttgtgttttctttcaggtctggttctctttgggatagaggaggcatggaaggcacgggggcgacttcgttggcaattcgtgcgagcatgaaggttacgaaagtgaaggagacgctgtgggctggtgaggaggcaaggctctcgaggacccaagcctgggagtcttcccaggagagcggaggctgcttgaccctttcacgtgcttggatttgttggtcaaggctttcccagacggtaaccgagattatcccatctttcagggagcgtaggaaagcgacaagaacttcgcttaggatcttcaggcgatgcaacga

SEQ ID NO: 10481 - DNA, 1275 bp, Emericella nidulans
agccctgcttctgcgcgaataaaatggcatcttccttggtcttgaagttcaggtgcgtgccctgcatggcatcagcggaagattgccaacccatcaaagggttctcccatcggtggcccttctgtaaaatgtcccaatccatcctccagtggtggctgtgccactctccagactgcgtagcgggcttcgaaggccggaagattctgaatgatgttgttagctgttatatcaaaatccttctggaaccaatttcatacctgacagtgcgcgcctgaaggtcggtgggggcaccagagagaacagcagcaggaaccgtctcgccaggctcgcttccatccatgacacgcttaggcacaggagaaaatttgctttgaatgggtcagtcaaactccacgtaaagtataggggccttcgtacgaggtgccatgatcgaccgtcgcgtcataatcaggctgatgacgagtcattgcctctgcgggagtctccttctggatcagtgtgctctcggaaagaggagtggtcggagcgtcagcaacgctgctgctgggcttaacggacgtttcggctctgaaagcagttgctgaaagcatacgggtgttgcggtatgtcacgagcctgcccacccgggagcaagcgatgtttccggccctcataaaagacattgtgtcagttgcacctgttgtggtgagaatagagcggcgaagacaagcgtggattgacgaggtgaggtattgcaaccttgccgggccggcgcggtctgaaggcaaagcctaattaggtttagcgtgctgtgcggctcccctacgttctcttccgacaacccgccctcaggcacttctaaccatcttttgtcgctcaccatccacttgatacattcgctcacgtcaaggtaagataactgatacctaaatactattaaagaatcaccttgagatttggcgcacttcggattgctaatgaccttctgtcagaccgcgcaaagatgagctacatcgcccgccgaggtctctcgaccctgattcctcctaaggtagggaacctggagagcgaactgggaataattattctgaacctacgtttactgattcccgattatctcagattgcttcccccaacgtgagacccctcttatgccccataccgccgaccccaatccgtgacggtcgctcgaggtcgacgtcacaaagagcttcaatgcgtctgggctcaatgaatcactaacaactgcaaaggcaatccgtgctgccaggatgccgctcgtatggaccgtgttgt

SEQ ID NO: 10482 - DNA, 439 bp, Emericella nidulans
gtctgtgcgtaaggaacgtggtgtccgggctgcatcgcgtacatctgatgtagaagcggtaaatcggaatcgagaagtatttctcctccgttgtttccttacgcgcgttgaattttcggcccttatagatgtattcgccgcattgggtgcatttcatgctgaagggggccattaggcgcacggttattaccttggggcctgagaagcggagtgcttcggcgtgccggttatcgcccaccgggtcgaagtcgggggggtagtattttcgtccttggggtgggagtgagattttccctcagggttatatgacacatttacaggacttttcgttcagacatgtttgcaagggtggcgcaaaaggttctggttgtgtgagggatctaaagagctagagaaacgatgggcctaaggggtcttgcgatatttcctatttaaggtc

SEQ ID NO: 10483 - DNA, 2109 bp, Emericella nidulans
  unsure (1)..(2109): unsure at all n locations
cagatggcagctttgacgatgttatcttttttgcggcggtagtggtattactgcttatgccagccacttatttgacttgattaagaagatgcgcgagggcaaagccgtcacgaaatcggttcgagttatatgggccctgagagacccggaatctattgactggttcaaggaagagctgcgcatctgcagagaccatgcacctctcaacacagtgcactgttacttcttcctaacaggtgccaaggatgacagcggccacccgtttccatcccgggaccaacaactataccgtgacatcgtacaggagaaaatctatgatacgcttcaggagattgaaaagcgcagctcagcatacattcgtgaagaagcagccggagacgaggagcgagagaaggaattgcgtagagaaaacgaagataccctcactgcacttcctcctcgcatctacacagcaaaccttccgcgttcttccaactaccaaccctccttgcaaagcaccggcctctcaccctaccaacattactcttaccagtcgcctaatcagtctccctatcaattacaacagtcccaattccagtctccatccccgtatatccacaaatccacctacgtctctccgcagacccccacaaacatccccttcgacttcggctttaaccaatcccaatcccaatcccaatcacaaccccagccaccaacgacagcccttccccagctgacaatccaaactatttccgccgcaactgcccgcccaaacccacgctttgcatctctacctcttcaaaaacgcaacgggtggaaaatcgattattgccgtcctgacgtttcccaaatgctcaacgatttctcaaagacgttcgggcggcggacctgcgtttatgtctgtggccctccgagtttgcgcatggaagtttctgatgctgttgcgaggctgcagtcgttggtgttgacggattcatccaaagatgagattttcctgcatacggagaactataatatttaaactcccaagggcttcgttttatgtgccactataatgtttcataaatactttgttatttgaaagccgttttgataccatggtgtttcgcaagttggcttttcttaggttcgctctctgcttcacttgatactgaaccttggctgtggaagacaataacatggttacgaatgtacatctggacgacacataagcaatgtgcagcatacatgtatagtcaacataatttatatacacatgttctgccggcgcgacttatacagtgaaagtcttaggaacatgattgatgaaatcctgagctgacacaaacatgcctctacatccagaatatgggagtatctaataacaaacgataggggtatcctaagcagcaaaatgcaaggacaacgaaatgaaatgcccagcactagtctaaaaaagaggatcttatacctccccatcagtctttctcttttttcttgctgatccatccagtagcgtagactcggtcaatgaatgcacgccgagttgctccagctcgatttcgtcttccgcttcaaccttttcccagtcatcgtcattatcatctgcattcgaatccagggagttctgcctgtcattgtgctcattcgcccggggctgctgcgcggcgttttctctgtggtcccgtcgaagttgtagcttcactaaccgcgcgccggaaggcttcaggcggcgatagtagttctcaatgatttcttcttcaatttggaagccacgtgagatgtaccaccttaagccatcctcgtttgcttcgtgcacgtgtgcagtgacggaacgagtattgtaatgtttcacaagatcagatagctcataatccgcatgggaactgactttagtactaggagaagacgcgaacagtaacgagttgagtatcgcacctgcgattccgcacccacgatatggggagagcagattcagtgtctgcatgtagaggttggtcggttgctgcccatgatccttnnnnngnatggtcaatagccactcttgatggcttcattaggctggccacgtttcaaatatcaagaatatatgactgttacagtgtacatgtagcatattatcaccgctcgctgggcggcacaagctgg

SEQ ID NO: 10484 - DNA, 118 bp, Emericella nidulans
cgagtgccaccgaccgccgggctagaagtatggcaccaaaaggtctggatgcgaatctgaatccagacatcaggaacataacagcttctcacatgacgtcagggatgcaaatactgac

SEQ ID NO: 10485 - DNA, 1487 bp, Emericella nidulans
cacaaagatggcataagtagacctggacaaggaaaccagatgaatatgcggcgtattttcgatgtttgctgcaatccgagcgtaagtgatatctgttctgaagttctatctcaaagtttactttcctgaggtggcaattatcagatacgtcctgaatatactttttttatccaggcagacgcgcaggtgtatggaaaaatgccttcagtatccatcttgtgctaaaatccctaagcccataatgcatccataagacagggttggctcacacagcacatgttacaaggagcgaatttcttagattagcgcctttttctaatatagactgccactttctgagacgccattccgcggaaaaatctctaaaagtccaaatggatattccatcgactacagccgccctaatcccagtcagcacccaaagcctcttctgctctgtcaccggtcccaccccgcacgacccctccgaccctctagtcgtaatttttccgggcgcaggcgatgtagcgtcatcatacgtcgcggtagaacgtctcctgcggccgttcgtaaggacactcctctacgaccgttctggacgcggcacagtgagcaatgtccaccacaattaccaccaactcccagtgcaaagcccaccgcccagagccaaggacaggccgtcgcggtggcaacagaactaggcgtggttctagagaattcaggaatcagttcggatacacctttgttgctagttgcgcactcttacggcgctatcgtggcgcgcgagctcctgcacctgtattccgagcgcgttgctggtatggtcctcgtcgatgcgtccaccgagcgcgcgagcgagtattttaacgtccctgatgagaatattattgctgttatgggggatctgagctatgcacgcgctaccggcttacggagcgagacagtgctaagtgatgaagaatggagggtgcgcgcgaaggagatcattgtcagctctagagctacggctgctgaaatagcgagtttctatgaggtttgcgagacgctaaagaggatggagcagttcagaaggcaggcgttgggaaaaaggccgttgagtgtggttcgggctaatacggccagcgattatagagctgtccacgagaagggcgttcctgctggaaacggcagggaagagcagagggcggctttccggacattgctggatcagtgggaatatattgataaacagctacaggaggagcagttgcgattgtcatcaaatacgcatttcttcagactagaggggtgcgggcataatgtgcatcttgcacggccggatgttatcgcccagtaggtgagatgggtgagggacagaatcaggcctgttagcaattgcctataactatgctttagccttctgcaccagacttattgctagcctttcggctaaaaacttccctcgcgtgccgatacgtagcttatgcgccgtgctttcagggggcatgctagcaagccgtactaacgtg

SEQ ID NO: 10486 - DNA, 2251 bp, Emericella nidulans
caagtaccttcctctgcgctctcacagcggcagaaggctgctgaaaggtacgagactgaatcggttgagcaagaccagccggaagagctagaaggttacctggactttagcccagagagagattcggaagaccaaacattccagattgatccaacaactagacacgaaaccgaaatgcaacgccagtcagattttgctgacaataccagcaattctgaccctgcagaagaaatctctgttcacgaagaatccctgacaccgaggaatccaaagcccgcccagaacgtgcaaacatcatcctgggttcaaaggtttgcaagcctcacgccgggctggctaaaagccccagttcagaagtctaatacggagaataaacaattaagcccgccaactagccgcgaaggctcacaagactcagacccggaggaacaacccgagcaaggctccgaggaggaagtcgacctattcggtcagattcggcaagaggacgcggggaagcgcgtagagcctccggacgctgatccagtgtcggattttgagcagcagccagctcccaatccgcagtccagaaacgtacgtgccttagcgtcaccagagaaagaggaaaaggcaaaggcactcggcggaccgccgcgtcttgcaacatccggctacttctcaaatgcgcattacacgctactccgccgtctctaccgactagccaaacaatccccccagagcttcccttactacccaagctctgcacatgctgacataattggggactacatctggacttccgacaatacttatggagtcccaataaccgagctgcagtttgccatcgtgtaccggttcagacaggaactggccgctcaggatttaaggcttggagggtcgggctgggtcggctggacggatgcggacctacatcgccgtctggtcagcattatcatcggcgagcaaattagagaggatagaaagaacgccttcgatctgaggcctacgcggtcgaggccgaggagcattcttcagaagggctgatgctgcttgcctgctttgattgaattctctatattggaaagcatttgtggacacaatgggcgggtgttgattgcatatgaagtgacgttccggctaccttcttcatgcatattgattatgtacatttgattgggtctttccaggcgggactacttggacttggacttggatgaagtggcgtttctatttgggcctctcttggatttgtcagagatatcttccgttgatatgtatagcgattggaacatggtaatttactattttccctttgaagcctaccttgcaccttcccggataacaggtagtcaaggttgaagcgctttgtttcttttcaggaagactgcactatgattggtgtcggcgttggatcaacatagtcagctgcgctgcccgaccttctgagttttcttttctttttctcttccatgattattatacgaagactggaattcctgcagtgagaggatccattgccactagctcttttcttcgtttcaggtactaatatcaatttgactttgtgcgtataccaatgtatccttacccgataggactggattacagcacagtctaacgaagagggacgtttaatgaccgaataaatatggttccgatgcagcccagctaatgtgcttttttactgtcagagtatgcaaaccgaacgtcaacttgccgaacaagtacatattgcctcaccctatcctgcaggagcatgaaaaccaagagaaactctctggctgccacgttgacgattgacgacaaacattgcggatcacatcacgacccggccccaaacttcttagtctttgtctccgcagattcgaatctttgaagggctcgtacccgtccttggcgccttgaccgttcttgacttcttgatgatcgtctcgtgcggaaaaacggggactggcggactgaaagtacgaagtacttttgtgtatggcgtgcaattgttatcctgccgtcttcatctatacagtcttctccatggggccaggagatgtgtcgtcatcaagtctgcaccgtgaggcaaagcggtcatacatctcattgttcatcacttattactaccgcgtactctgtagacaactggaccgcttcctgagacctgattacaagcgcatagtggagtgcattgcgcactgactagaacagcggtctagaacggccccagaaccctagtgcactatcagtctgcctcctaagaccaaggaagactaggaaggca

SEQ ID NO: 10487 - DNA, 448 bp, Emericella nidulans
cgcgaccttttaaaatggttctggttaaaaaccatcacttctcattttttacccatccagtgtacactatttacttacttcatcaatataatatcatttatctctatatcccttattcttcccttccctcataaatctactgctgaaaattttaatccaccaactcctattctcttctttcaatctcctatctgtcgttaagacaatttttcactccttgtttgagccttaacaccctcttttatcacacttcttaatatcacctctatgccaaaactacttttatcccccacccctcaatgattaaatgtataagctcatatattttcataatgaattttctttttttcaaaataccacaaatttttctttcccctttttatcggaacccttttcgttcttatctacctcacaatcaacatcttctaaaacatattcctttattaca

SEQ ID NO: 10488 - DNA, 1334 bp, Emericella nidulans
atgggcgaatatcttccgatatagcgtatggaaaagatgaatggacactctgccaggatggatgctgaaagtccggagagcgagggcaaagaggccgttttcagacgtgcggtatgtggaacagagcccttattggggcgtcgcctgtgatgcaagggactagttctgacagctgagtgtgtagtgtgaccagtgccgtcaaagaaaggtatgcatctgtctaaatagacagtatggcgctgctcatgttcacgacagattcgctgtgacaaacggttaccatgctcgaactgccgcacatccaagattatatgtagctctacaggcgcgggccagaagcctcgggagccgcggaaacgcgtgctaatctctaatgaatagtgagtctccctcttatgcaaggcaaattccgaatgggcaaatgccgagtgccgaactaatgcctcctagcgagaagaaaatcgacagtatcaatgaacgactgggtggaattgaacaggttctccatgagctcaagtctagccaaggctcaggtggccctcagatacgtgccaattcggcgcctgtctccaggcctctgagcccctccgttcagtgctatactgccaacccacaagaggcaatggaccaggcagagtcgcggactggattcgagggcaactcgttgatggctacccagtcagcatatgctagtgacttcctgcagactgctgtctcacgcagcccgctgccaatctcggattccaaaatcaacgcagcgctgtcgactttgaaacagctcgtcaatatgcaggataaccaggcctcctctgctcgcgagtttgctccgcccaagcgaaatcgcctcaccgattgcaatcctcgggagatgagcatgccgccaatgaacgttgtaattccgctgctgcgcaaagctaaaggtatgtacagtcagaaccggcaattggcattactgctaaccaataatagatggtagcgacacgtccttgcaggctctctgtccgttcgtacaatttgaacgcctttctgaaaagtgtcgagaggtttattttgctacagaggactattctgatgcaacgttcattgtggcaaatggagggctgtaccaagtcttcgttgcagcgagctttatggcccaggaccgcgcattgcgagaggagtatcagggctatgctgatatctgcaaacataatctgaacacgacgttggcgaacttgcaccttttgatgcccgcgaacatagattcaatcgaggctcttgccatgggagtacgtagagaccatatgacctatatgagctcgcgctgaccgggcataggcggcacatgctattga

SEQ ID NO: 10489 - DNA, 844 bp, Emericella nidulans
atcttcatcgatcgtacacagatatagatctcctcttccatttcttattcctcctttcacgattgtttattagaacgaatatatgcaggaattttcttgacttttcaatgtgtcaactacgcatttggttcgagaaaagaagtatcatagtcactcgagcagcccgaataggagcattttcgagcattttccaatctgtagtgattgggtaatcgtaagcgcaaaaaaaaataaaaaaagaaaaaagaaaaagaaaaaaagaaaaaaaattgaaaaagaaagagagaaggtaagcagaaatgctaaccagcaggatatggaaagatagcatatctttccttgatggcttgcaatatgagcaatcatatcactgatgccagagacaaagccaagccacatatccgccttatcgataaggctggaatggataactagtcaatgaggtagcttccaaggaggctgcaaccattgttctcaagtgtttccaaatcacggcacctacctatcgaggacgattcctttatcatggatgattttctagcgcccattcaagatgcctttgagggccaaattgtgagccttggccatctggcttttacgccgtcctacctcgttttagtaacacgccaacgctaacctggccacttctatctgagcaggatttctctgggcaacgaactacggaacttctatctacggcgcttttgactatatccggcgtgagtttatgacactatttcatggtgctacgtgctttactgacggttgacgcatctagctgagcgctttcctcgtcgggtacatcttacaagatatctatctaacgttctggacgggattagcg

SEQ ID NO: 10490 - DNA, 102 bp, Emericella nidulans
tcagcattcaagccccagaataaatcactgcgctctggatggaggtcaaaggactaatgcgtcggcaagtacaaggtagggcttacataggattccagtttg

SEQ ID NO: 10491 - DNA, 786 bp, Emericella nidulans
agcaagatatacgtggtgcgggagttttcggactgatatactgctgggatgagggggagggtggaggggtcggactggctccgactgaggatccaatatactggattgcatcggtactcgggagaaatacagccgcacggaggataaatctccctataatacaatatagccctatttgaagccgactctgtgggtattccaactatcatatctaggactatccgtcatcaacacaaagtacctaaggatgattattttttcttcttcgtcttatccaccacctcgatccactgcgtctttaggccccgcctagtgagcgcggtatctataactttgcgttggtcaccctggaccaggacttccattactcccttgggagcgccggtggcttgcgaaacacttgtgctgctggcgcactttttctgcagttcttcagcgagaagagttggtatgatgccaaagacctctaggttcgagactttcgtaactgtctttgagcccgtgcggcgttcgacagtcacaagggcttttggcgctgccccggctttgggcttaacgtcagagagtgtttggcctggtttaaggatggcatagtgcggcgccagaagggtggagtcttcggtcaggcgcttgaggaggaagtcgcgggttgtcttgccccgggagacggtattcttgtcgtctgctgaagaggaagtaaatatagtgtttgctagaaatggggtgagggtgaggatgcgtttgttctgcgaatcgatgatcggagggtcttgagcctggatgtat

SEQ ID NO: 10492 - DNA, 1040 bp, Emericella nidulans
gattctggacctaaagctgggaggcagctattaaacttagttcactaaatgattctctggaagagtaaggctgcattgctcacgaggctggtgtatctggacgcagattggtgattttccttctccacagccttgttagtgcagagcagcaagagagaaggctgtcctattgcctggtcacatcgacgtatacagacgagccatgtcattttcccagcaggcactgatttgtccagtagaatcatcaataataagcgtttttaaaacgaggctgaacacagacatactgtaggcattgcagaaagcataggcatcacccatatctgcagaaaacggtgtgcttttcgattctatcagacgtctccgaaacttgtataaatctaagacatcacgagataacaatctacaggcatacttcttgttccgaagacaaataacgagctatgtcatatctacgctttgctctctagtcaataccgtccactgacgcagtacataatcactagggaaaagtccaaacagctactcttcgtaacaatcaacgaaccacttcgccgttcatatagatatatatgtagatatacgcgacatagcacgtccatcactaccatacaagactctccaaagacaatgttcatctactcatcatcgcggatatcgacaaccgtctgcttccatttgcgagccgggacacgacgcctgaacaagatgtcaatctcacggtaggacctgtccttcatctctggaacccagacccaagccattgcggtgcagatgaaagcggtaccagcccagacgtagccgctcttgccgccgaggtcccacttatcagtgttaagcatgtagctggaaaggaaaatgcaaggaatattgaccacataataggcgcctcgtccaataccggtagtcaatggcctgagacgaacggaagatgtctcgccgatgatgacccatgaagcaggggcgggacccaagcagaacagaacggagacgatcaagccaagtgatgcttgcgcattgctagccgctgtagtcttacc

SEQ ID NO: 10493 - DNA, 135 bp, Emericella nidulans
tgggatccaatcgtcattgtgtcataaccttgcaatcaggcagggatgacatcgaatgtattgatccctgatataatcaagtcctttgtgaattaacccaatatgtctgtatagaggaggtaagatacgtatatg

SEQ ID NO: 10494 - DNA, 269 bp, Emericella nidulans
agataaagaaataaatttcgttaattagacctttctacacgagaaagagacaagactcctacctcccacccagcggacaggagtgtagaagtccagagtgcaggactcgttattttcatgccgacaagaccattgtattgagatgcaaaagctgacccgcacttgacatacaagcagatgaaacccaatgtaacgcaaatggtatccatctgaatctcgcgtagttttatattgttctcctgtacgcccaaatcctccatgcaacaccc

SEQ ID NO: 10495 - DNA, 1623 bp, Emericella nidulans
aatgagtcgacaccatctgtcgtgctcaaggctcgagtcggacaggagtttgctccggcgcctcctctagatcatcccgcatctgtcactcgtgaagccgtatcggagtaccagtcgtccgtccaagatactccgagtcgtatacttaaccaagatctcctcagcgacagatatctacacatggcgcctcagcctgcagctaggtcaggtttcgctcagcctgcggtaagtcatagcttaaagatataagctatccgcagactaacagactggactgatagcccagctacagtgagatccaaacccccaacccggtcggtacagctctgatctatactgaactcactaattcctgcctaggccaatctgagagttgcactcccgctcctccggtgccactcggcactaacgaagaagactacacggagcttatggctcagttcgcaagacccgcgagccgagatcataccgcggatatgccgaagctcgaccctcagtcacacccactgctcagttttgagatacagagtatgacggtcagtgtggagagcagtgcggggactacccggacttcgagtgagacgcctgatgatagtgccctggccttgatcgccagggaaggagagcccgtgagcatcaatatcaacctcgtttgccgatttgcccgtcgcactcgcgaataggcttcaggtcttgagtaggttattccttattcaagaaagcactgaatattaacttacgatggattttgcgagtctgatagccaggtcgtgtcatgaaaggggcggttgaatgtgccaggcctgcgaatgaatttgccagtgtggtgataaatagataactctgctgttttgtatctaggagatcacgttattctgggtatgctgggtgagctgcctttttgttttccatcttgtccagcctctcgagattccttgcttgtggaaagaggagattggtgcaatgaatatcatgacatctagcttatactgaagctagttgttattcgtaatatcctgtagatagggacaatggtcgttctttccatttgcgatcctccatatttaagtcctctcactttgtccgtcccctctttctctctcccaaagtgccgtgcgcgctgtatcctttcgcttatcgatttgacaccactcttttgctactgctttatttttacgcgaaagagctccacacgatgcggcccttctggcccgtagctgctgctttattcgttcttccggtagcttggggggccgcttctatttgccctgcgccctgcaccactgacccaagcaagtggacgccgtactcgtccctggagaacctgacagagtgccgccatccggttttgctcgatttctcgtcccatgggtctctaaatgcctcggaagtgtcattcagagttctcgcctgcacaatagaggagaatcgggacccatcttccgtctctccgcttgctactcgtgagctggaagaacaaagtccatcaggctctacggacgatgatgtgtctcagtcccaagaaatccatctatttttagaccgtttgcagacagtcgtaaaccagacgtcgaaccacgacacgttcagcgtgttcgggagctgaacactacattggtgggt

SEQ ID NO: 10496 - DNA, 2212 bp, Emericella nidulans
taagtaactgaggccccctacctaagattgggtggcgaaagggcaacaaaaattatagtttgtatgctcttctattgcatgagatatagacgccgttacagccccaagaatgaaatgggaaagcagttgtcctaagcttgccaccaaagcaaccttggagaaaatataaaaccgctgtttcgccaatcatatgagaaatgaaatctaactgaagagtccgaggaccttatatgtgcattaaatgaaattgagagtggcggaccggttcggctcggcaaaagccggagagcacaaagtagataatgtaaacaagccaacacaggcagcaaaaaaacaaaaaataggtcatacacatcgtgacatagaaaaaaaaaaaagccagcgcgcaggtaaatatgtacggataatatatgcagagtagaagtagcccaagtatcggaacaagaaacaaagctaagaagggaaaagcgcgcgaaaaccgacattgaaagctccgatacctagcttgtcagtcgttcccatcgttgccaccccaaagatcctcaatctcaaacacgcccagaacatcctcagagtcctggccccttactaccgccacaacactgacaggccttggatcattaggcggaaaccactcctttgcttcctcaatagtgcaatcgtcagagatgaacgtccagcgtctcgcggtgctagatagggagcattaagtgacgatacgtccatgtcgacgtagcccttggaggagagataacggagttttcgtggagggatgagaatgtcaggggcaacgaagacccatgaatttgcgtcggggtgctggattgccgtaaggagaatgtcgaggagtcggatattactatgaaccgctcctgaaattgatgctggcgatgagactgttggaattcgagaaagtgggacagaaatcatgttggcgattgtgtttggtggtggagatgcagggacggacttctctgactctgcatcagaatcggactgcattctgtcctgatattccacgcctggatcagaaaatggagttatcttttcatgtcgatgtcggagctgaggctggcgaactggtccttggagaaattcggacgggtgcgaagtcaatgaggcgctggaggagctcatgctcagtggcgtggagacggtagatgcagctccgattgcgccgcccgggtggaagcttttaaaaacctctgctgggccacgtccgggagtagtatgaagtttgcgggctgtagctatagctagagcgtcacctagggataaggcaacggttgtagaggatgtcggtgcgcagacgcctatggacgtctcttcgtcttcatggatgggcgcaggtagaaggattccttttccataggctggaaagacatgagaggacatgttgacgggtggaggtgggatgtgagggcgactatggtaacagttggggggatatgggggagtagaaggaggagttcaggtgtccgtccagagaaggagattaagagcagagtatcgttctgtatacgctcagttagcccttgtcaactcaaacatcttaagatggtgtcttaccggccggatcatccccaagtctccatgcaacgcctctgtcggatgcagaaaggtactgtatatccccaaactattcattgtcgcctcaagtttctgtgcgatcttcccactcttgcccactccgcaacagaccagttttcctccatttcgaatagtccctgcgatctggtctaccgcgcgagaaagatgttcctgagcgagctggtccgtctggtaaagacgctcgagatgcgcgagggccgcgcgctccgtcgaaatcacatggacagctgtagtgacggacgcagcatccttggagacagtgttcggaggtaccaagacgctatctacaggctctggaggggtcatgggaagtctcgagaaagcattcggagtggatgcgcctaaagtggacatggcggaggcaagcgggatgcggcactgctgcttaaggtgcccattgtcaggatggcattgtcggacaagctgtgaagaagaggaaacgattctggactggtctccaaaagaaggagactagaaaaggcctgaataatcgcgcgtcggaggcagaagtggaggaggggcaaatgctaaagagccgggacgagactcggtggagacgatcggatggcagccagataaaggaaatttacgctgattgata

SEQ ID NO: 10497 - DNA, 235 bp, Emericella nidulans
acttcctccataggtactttcaagttcgagcccttaccaccttcttcaaacaccgttagtattaaccatctccattactagtctggctccggaagccccactacgatctacctctcctcttccactacgggttagttcttcaccagcattcccgctctgccctctaaaatcgtagtcgtatccatcttgtctctcaacctgagttcgccatccatcttttgaccgggtttctcca

SEQ ID NO: 10498 - DNA, 1333 bp, Emericella nidulans
ccggcggcctagtttcaggcaatcaggcaatactcctccagctccttcagctgctggagccagctttccctcttcagcaccccgccagccctacccctcgccccagcttcgtccctcagcctccaggttgtctccattacctcaatcgcagtgcgcacgtacccccacggcatgaggctccaaaactccgataaacgatcgacggcccatcgccgatagattgggttatctgtttccgcgcccgcaatgaacgtcggccatgtcgtcgccacaaagatcggatccgtgctacctacaaagctcagatgggtaatgatattcgtcacgagcgtttcggtgttctcaccgagcgcgaccggcgaagcgatcacgtcaacgctgcggcagatatacgttgacagagcgttctggtgagccagagccgtatggatccggctcagcgtccgcgaagagtcgaaggaccgttcgagtgagaaggcccaggcgtgcgcgtcaaaggacttggtcatctggagaagagtgtgcgcctgcgagaggatgccgctatagtctatgtttgggtcgttgagcatcgtgctcactgagacgaggtttgatagctcgcaggctctgaagagaatgtgcaacagtgtagtcggaagggagatatagctggttgtttcagctcgcgtaagggatgcgaaaatgtcgcctgaaagcaaaaaagggtcggaaagtgtcgtggtcttcgtgagggtcgagccgaggatgtaccatctacatacagaggactgtcagttcacggcagacgcagatgatgggttaccgccgagctcgagctggggcggccgagacttacgttaaacagtccgaggtgacggtgtcacgtatcagggctgctggcgaggcgcgacggggcgtcagggtctggaggtagctgatgagtcgcagtgccccctggacatgggcgcgccactcatcgccaccgggactcaggagttcgaagatgatgaagaggtgcacgaccgcgatagagagatcgacgtcgatagtggaaacgtcttcgagggcttgtcgaaggagagcaagggctcgttgctttgctgacagcgcgtcgatcaatgcgcgggacgacgggtcggtgggatctaaggcgaaggtatgccggcgctggactgatcggtctgcatcgcatgggtctccggtccggcgatggagacatgagatatgcagcgcgcccgctgcgttgatggcatgtcgtaggatgggatagtcccgacagagcggcacaagacggcggaaggggttcgcgttggtggcatcagctatagccagaacgcagcaaacgctctga

SEQ ID NO: 10499 - DNA, 196 bp, Emericella nidulans
aatatcagcgctgataagactggtaccttgacccacggcacaatgatagttaagaaggcctggataccttcgcggaggacatactccgttggtaattctaacgagcccatcaaaccaacctgcggagagtcacttacacgccgctttcaccagtggacttcgtcgacgaataatagggaccagtaactgagaatgt

SEQ ID NO: 10500 - DNA, 131 bp, Emericella nidulans
cctgctcgactagtgtcttcaattgagggagatactcatcagtaacaaagtcgtcgtggtagtggtcgggaggtattagattggaatatgtacgtacgagaaagagcctagttggcatgagaatagaaatt

SEQ ID NO: 10501 - DNA, 178 bp, Emericella nidulans
  unsure (1)..(178): unsure at all n locations
ggacgatgtgacgatctcaattgatgatcgcaatttgggttgctgactcgggagacgntctgcctgtcgcattattataggcgtgttcatggttcacngacccacttactcgtgccactggaacgggaggagtcgcggcctggtcgccttctcggctggttatgtggaaggtctgttc

SEQ ID NO: 10502 - DNA, 124 bp, Emericella nidulans
taataaagcatttctaattctttactagcgatagatttgattcatatgctaaagttcacagatactctatgatgccaggttgccgctgtttcatcatatgatccatcgagttgagaactgtgac

SEQ ID NO: 10503 - DNA, 1427 bp, Emericella nidulans
aagcccaaaaagaacaccgacagtatatcctcaacacaatccacgaacactgtccccagtattgagttggacggcgatatgacctctctagcctttaattagggtccggacaggtgatgcgacaccccgataccagcgggctggatacgcctaggaagttaccaaatcgtgattcgtgaaacggcgccgtctccagtccccaccgaggacgccccacgtatcctttactcggattaaagggtaaatcgtgagtgggagagcttccaaagattacggggctggatgtgctctatctattctacgccgatgcatgcagtgcattggcctcgcggctccgtccttgcgtcgtgaacgatatatcaaaggacgaacctgcaaccttgacgatacagggaagacactcagattttctgagctggatacgacggaccgtaaagctcgcaccgtggcaggcaggccaaggcttgatattattgtacttgacggagccgaagtgattggcgggattcgagactcgagtggctttgcaggggcataacaggaggtggtccgctcggagtcccggataatataagtgaacgcgatatctcagaggccctagtattggtgtgagttgctctgcccatggtcgattgcattctggagcccgaccccctgaaccattgtttgactgttccatgtcgacaacagcagtgagtcttccaagcggcagcaatatgcgcttgatagtcacgttctcccgatccgaagcagacaagcatgcaagaataggccatagggcgcgcgtccagtcccacatccgcagcggcacagtccagactccatcgtcgacgcctgatcgagctcgacctaattatgtgtcggtatagagtagtggtaagtactatttattgcaagttaccagagagacgggtttctggctctgcggacgggatcctactggcctggtaggtcattctttgctgtgcactagcacgcaagaggtaagaccagcccaactctggaagagtctgtagtagtgcgacggcaaagagaaatatggagacgcctcctccatagctcactgaggactcgaagaacgtgatcgtactgtacgatgtgggcgtctgtcaaccttggatgcgccgccgatcgcccatattttggccatggaaccagagcttcggtggactctgaatgacgaagtactatgcagcttggattgtacctgtttcatgccaaagagcagaatatcctcctgatcagacaggtcatattcctaaaaagaagcccaagcaaggctgccatagaaaggtgcagcgaaatgcagtggctttgccaccgatggcgatagcgtcttggcccagaaacgggaaaataagacctaaattggcataaaaccaagaataattataggattagtaaaacgatagaagaggggtttcggc

SEQ ID NO: 10504 - DNA, 1010 bp, Emericella nidulans
gggttactggaggccggaatatgtaggttagactatttactggggctgagcttgcagtaggatgagtcaggttgagttaggcaatacagtggattacggagtttgaagtccaatgtatatcaacgatgttggaaaaggctgcttataggccatgatcaaaacatttataataagtgccctagacgaatgagttaacgtggatggttctatattttcattgtattgagttgtctatatacatgattctgatacatgggtattatatataaccagagagccgaccctgttgtaaggaaagtggccagcagggaagagtgacgacaggatgttaaatcctcatttaaacgtctccagaactgccggggatggaaacttcatgttaacgagacaagagtcgaagggaagtcgttagagcatcgtatttatatcgcgctgtacgcagcagctatccaccagcagaacaaagccagactatctatcaacaataagaagtcggccttcgtatcaaatccccgggtatatccgttccaatatgacgtgtccacagccgtccaactcccaacagtttagaaaagaatccgacaacaaatccaatagacaagcttatctccggggtatttttctcacaaaaccaaactccgagctccgtaacaattaagcccaagtgaaataaaactgcaatgccagataacctcccaacagataatatgtgcagcatattataagaagtccaggcttgtgtccgtggattgatccaggattggctaagggatcatcgttaggcaatccagggcaatccgtgggcaaatcccatggcatggccaaaggcaaatccgtgggtgatccagtgggttcaaagaaatccggtgaaactattaatcgtatgtccagagaaagaaaaccgatggtccggaaatagtacaaggggaatcggaagaagaaaaaaggtaccaaacgcgtgctaaggtgtaggcgtaaatcatgtcgcgatgcatatcaacaaacaggga

SEQ ID NO: 10505 - DNA, 405 bp, Emericella nidulans
ttctggatcaagaaccactatgccaatgggtacatgcatggtgcagcttaagacagtgcactattgccgcattaacatgacacctgccttactatgacgaaggggcagtactgcccacaagatgtaacgcatcagccgggcttgcttcttataggatatgctatcgggctgcagggtgtcctgcctcatagggagctcagacacatatagggggcctggccgtgactctcccatccacgctgtaaatagatacgaacacgttaggaacgaaaacaaaatgtgattgcctgtggagcacgtcgaggctctctctcgaggcgctgtgacagattagggatcttcacagtccggaagtgagatactcaagaactgtccacccgggattgaaccctgagtgacgagctg

SEQ ID NO: 10506 - DNA, 237 bp, Emericella nidulans
tttagattgagagatgagagggaactagttgagttagtgtacatatctggtgatgaagtatgggagatggtagagatgtgggacattgaaggttgctaagcggtgatagcatgtgttgctagagatggagtgatgcgttgaaataggggatgctgaggtgattgatggatctgaagttggagaaagaggcttggcactggtagtccacgcaacggtagcaggcacctttatgtcgaa

SEQ ID NO: 10507 - DNA, 138 bp, Emericella nidulans
gtgcggaataggcgactccatgagcaacaattgacatactcgaagtacatagtcgcgtctcgagacgcaccgatttgtctgtcaaactagatgctctaaatttcgcaactcagcgatcaaatcgagagatgcgcaaaa

SEQ ID NO: 10508 - DNA, 1868 bp, Emericella nidulans
tggagtctgccgtggttggtttgatatcacacggaccagatggaggttgagaaaggcgatgcaaacgaatgattaattaagatagttagtctgtatattggagacatttaggaggcgggttctccgctgtaatagaataaacgcatatctccatcctggaattcaaatcaatcacaagtcaacaaaaaccgacaacttaatcagaatctgaagcggcaggaaatcaatacgaatccagtagactagtccatgagagttcatgaagaagtctatggattgattaatagtaacgtcgacgggcaagatggatgcaattttcagatacggcacccagcaactatgtgtagtctctgcttgatttgtgtacgaacgtcgagtatggcgtaagggtcttgatacctactccgttcattctgttggtctggtctactcttgttaagcgcctatagctagaaccatccccttccccaatcgggaaagtcgcctaagccggggacgaggtccttcgccaatggtgcgtgttgtgacaatattaggtcttcctcgtcattggatcattgaagacgttgcaatctggaacggagtacacgcaaactattgtcgtgaatgagccccgattgcgtcaatgcctcccgttggcgttcacgttattgctgttaactgaagcgacgataacgttctgtcatcgatcaagcccagtaattgagagaaacgtgatcgagccttatttgcgattcctcctcgaaccttcaatggccataaggctcgtgctggggcagattctcgcgataaggatgttaacgtagatctctacagaggaagcagtatacgctggataatccacgtagcctcggaatttccaaccaggatgacggggagagacaataaagagggaggcgtgtgttgaaagggttaccgtcacctgctttgcttgcgccgtagaaatcagtaaatagcgccgcgtatgttgaccgtgcagatgagtactgcggatcagctgtcaagggcctgcatggcatggactattccaaccgggcagcgtatgcttgcccgtcgacgggtctatgccggcatattatgcctgcaccttttgcttgatcgttgctttgttacctctactattaaccggtgcgtatactcattgctataatcatatatgaagaccagccactgccggtcactagtattacaccatcaacacaactcaaccctcgcagctcctcccatctgaacctatactgcaggaccttcctcactggggcaatgactttgatgagttcgagatggcttgctcctttcagagccccctcgcgtagagtatctctattccattccagtactttatgacagggtcggtttcactatcttcactctatcagacgcagtctcggttccggtcattagacagcctccgtttctttcttcacggtgtgttgctgcgctgtatcccattatccagccggggatgtatctgtaccgacctctttctcgttgttcacctcccttgctgcctccgcctgtgtgccaataaatgacgaagagacaccctctccctcggcaagggttacccttggcccagtaaaaaccttgcgggcgtaaaccgcataatacaacatgctagcaatccagacgaacccattaatcacgacggtgtaattcatttctgcggctgtatccagcccaagatccattagcatcatcgcccgcagcccagccaccgaaaaaggagaaatgaaatgaacggcacttacgtccaggattcttgaccgttggaaacatgcttaacaacaagccaaagcccagccatgccaccgcgatgccggcaataatgctgctgactttcgggccggtatagaacgccccgggac

SEQ ID NO: 10509 - DNA, 128 bp, Emericella nidulans
acacgccgcgcatcaggttcactgacgacggtgacaaagaccagagctatctagcagacttcacatttcacgcaccagacctcaaagtaggcctctgcacgacccgcgggtccgtaatatgcgcatct

SEQ ID NO: 10510 - DNA, 521 bp, Emericella nidulans
tcctaatttttgaacagatgctggccgccgcccccctccttgcggtcctcagcgtcgatcagcgagtcatactaatccctgcgacccgtggcacccagtggggctagatcggccgccaccgcggtgcagcctcaatgaactctatggtgagttgacttactcgcgctcgatgcgaccagttacaagcggcgtgcgccaaaaaccctgcagttacccatctcaaacaacttacatcacatgagcctgttcccaggtggcgtaacagcgaaggagtttccggtagcccgaacgtgcgaacggtcgacgcagccttgacaagtgtaatggaccatggtcgcgctgttaatagtttaggaacatacgcgttcaaaagccgttcggggcatgctttttttaactaatatgtcgtaacctacgcagtccttcctctctcactagaatcgaccgtgctaggggtgcgcggggtcccacgttgcttcttgaggccacgtataaaaggatcgttggaactcgcaaccaac

SEQ ID NO: 10511 - DNA, 2136 bp, Emericella nidulans
ttcgcttgccgtcggtaagggatcgtctagttctcgttcttactctctggacataagaggggcgcggcgaatcaagcattgttgcacggatgcctttgtcctgtcacattgactgtcaacgctaccggagcgcctgttactgatgaaattcgttgccatctggcgcgcagaagtcttggaatggcataaataaggcgatttccgctggcggcctttgaaagtatatcgaagtatatcgttgtcatgtcagcggcatgctcttcgcatagtctttgggtgagattgttcggcggattggggtttgtcgtccagccagagccgacttcagctctgttcctatctcgtgcgttgggctctgcgacagcacatcgccgtataaaactcctcgccacctcattgcaggcaagctaggagacttgttcctgctggcgtccgtagactccaaggggcgcagcgacgccgcggtggcgatgaagtcgcgtttgcctgaaggggcggctggagagtggcatttctgaagttgacggttcttgagatgaagcccatgagattaggttttccagaaaccatcataaatcgtgtcctggccggaaccgggtgtaaatatcttaattgtagcttgagtatcgcgctctggggtagctctctttgaatatagactggctacggaagctacgaatatacaaatatgcgagatattacgcaggggtcgcaatcgaatgtagatgagtttaacaggatagtcttatgttggaaagagcgataaattgagcactatcgccgaaaaacaaacgcccaagtcgactagagctctatcagatctatctctccaggttgctgcactttcggcttaacctgattcatgggttctgccttcagttgtggcgcaactgaactgattgcgctgtgcccatttgtatcaggtacgtgagcttctaggggttgaaaggcccgtttcagctcctctttctgccgttgcaactctgccaattgctcgagaattgcgtcatgctcctggaacttcttgattttatcttgctgcttgcagtcccgtatgttgtccatcaacgggacccttggattctccgctgcgctgaattactgttgttcatgagcaaggattttggcacgtacactttccccacaatcacaatagcaggtatgagtgcttgcacaaggtgtttcgcagatatgcttgcagaacatcttccggttgcatatttggtcgcatctgaccctgaatgggagaggctgtcctcaaccagtcagctttgatttcacaatactgagagcaagctacaagattactacctatcgcaggttaagaggcacgggtggccgcaattgagcttttcgccgcatgcttgcgcgcaaccaccgttcgtattcttccagtcggttgggactacgcttggatgttagtatggagcatgttaaggttgataacttgagggtcaaactgacctttgacgaatcgtctgagcttgtgcttaacgcaagtcaatggtagttgattgcctatacgaagttcttgtttttgattttctagtacatagagcacttggcccatagcttatcgctggtaagggggttacggttgccaaacatgtaaaggcctcttcatgcccgagagagcgcaacgcagatccggtcgccaatcgagaggaacccagttccctgtcggccatttctgacaagagatagaatcacaacttcattttcttctccctggtacgaattaacagtgaccactttgacgtagtgtccttggaggtgggtatggttcctcatcaacttgagaatcttcttttcttggccattgtagaacgtgagtaccgtgatatgatctacaggaacattgttcagaacaaggtagatgaagaattcgacgaccatctctgcttttttctcgttgtattttgacgacatgtcgtcaaagctctctgaccaatcacgagaaaaaaaaataggaccggatacttcccatccccggcgcttcttcgcgttcgtagacactttcgtgatcttgtagtgtcccatatatgggtgtcaacaactggcgaatctccggcaccattctgcgctggcgttgaaggggaacatattttaatccattcttcacgaggcgttcgaaca

SEQ ID NO: 10512 - DNA, 1084 bp, Emericella nidulans
attcgcgccacacaggcaatatgtctagcttggagtcagcactgccggttcccacggggcaggcacttctcatgggttatgcgcaaataagcgcgtcgttcacagtagacggctcgctcatcaatcaatctgctttcgacgaggttaagcggcaaggtatggttggcggtgcaaggaatggcggcgcagcgaattcgaggcctgcttcgtccagcggtaaaaatcgaaaaggcgggggtttctggggcgctttgaattggaattcgatagaagaatcaatcagtggcttgctttccaacaatgacctcgacggccttcgagatatgcgaggtgtgtcctcatcaagatctattcctttgttgtcgacccctcaatcacttctctttgtggaccttcgactggccccaggcgaggagcagtctttctccttcgcgtttactttacctagcggtcttccggcaagccacaaggggaaggccatcaagatatcctacaatctggttattggaacacagcgacctagtgggagtcacgagcctcaaaaggtgaaccgtatcagcataccgttccgtgtctttagtggtgtcaatggtaagcaacaatgcctttatgtcaatccgactctactaatcttcgacagctcaaggagaaatcattggacacgacctgatgcgtccttatgtaattttgcgtgatgaggccagggtgcagaaaattggctctgcccccccaatgactgcgaaggctgagagtataagtcgcccggcatggacttcagctcccgagttcttatcatatgtggatgaaattctcgaacaacggtctcgctccagttctctcaaactgccaagcacgctcgctgaaaggcgggcgagttacgatttgacagggggaccgttgtcttgcaaagacgccattgaccttgccatcctccgaagtaatcaaacgatcaactcgtcacagagtccgaatcggttcgagattgcgcgtggaggacgtcgaattgctgttgtagtgcttaaccgaccagcccataggctcggcgaaaccctcattgcaacagtgaatctagctgacgcagcac

SEQ ID NO: 10513 - DNA, 104 bp, Emericella nidulans
gtctgagctgtcgaagacatgatgatgactacaatggataattgtcctttttgttattgatagtaagcatttgtaggatatgcagtgtaggtgtacagtgatac

SEQ ID NO: 10514 - DNA, 203 bp, Emericella nidulans
tccgttagttggttgaataggctgtaatgaattgcagaccgagttcctcactgcattgatctgccgaactggctcatgagattctgcacctgatgcggagccatggaacgctgtcccggtaggttatgtcctccgaagcctttagccatgagcgacaatatcatcggatcggatattgttgaggcaccgtagacatgcagcgg

SEQ ID NO: 10515 - DNA, 1676 bp, Emericella nidulans
  unsure (1)..(1676): unsure at all n locations
acaaacgaccagttatttgccataaaatgagactcttggcattcatgatgttgggcattctgtccagcattcatgtgctgatttaccagcacccagcccgtctatacaacgattagggctgcaagcattgaccaacaccataaaacatacgatcagccagcttgccaaggctacgagaccccataagccttttcaggtagcaccaaaggaagtctgagctttttgtttactttgactcagaccacgcggtgcctgcctcagatgtaacccaaccggcatactgagtcataaattaggtaaagtgtttatacctgggtcgcaactatggtctgtgcttctattgatgtctccttctcaatctgggcttctcaatcggggccaggacgaacaattgtgtgtaaatagattatcctacatagactggtgcctgctggtatcatttgaggttgcctgcctggtttgcccgtccggctcagggcactctgacccagggcgcagatgtctggttgggaccatggatcatgttctctgcgaagacgattgtttaggcttatatacttcaagtaaccagcctcactttcatgcgtaataggttgcgtagtacagcgatgtcactcccgcggtttaaagacaaaagttccgcatcctgcaagtcatactagcactagcattagcagggcctaatctgtaaatagatgcgaagctgagatcggccgcgatcgggcgcaacgccacagccttttagtccagggcgaatcaaccttgcagcctgtttagtcttagccagttggtcagaagcgaggtaaagtattggtgaagtatggcatcctcactgaagatcatgatctagacgctgaagtacaagatgctcggtggcatatcaactgctgccctcggccaacgaggaaattaaatcgaccgacagagcaggtgctgcctatagactttccttccgcgtctagtcaggagcttatgttttagatggtcgtgagtgacgggtgtgatgaaggtggaaagggggcagcgcaagtgaccagtcgggtcatgctgcgtcttcacctgcgcctgcacacgccccggcccgcttcagcaaaacaactgtggcaataagcgaatcctgcagaaagagccgcagggtacaatagtgattcgcccaacaatagtaatttccacagcctggccctggcttgtcgatccgcggggagctgcatttgccctgtccccagctttgttataaataatgcctatgtctgcgagctgcctacctgcttgcctacttcatctcctccctcaactttccaccatattcaaccccatcgtcagcttgttattcatgatttttctaagccattcaaggctctgcctagcgtctccgcactaagaaggccctactttcgcgatcaggatggatatcgcatcgcgcattcgtcagtatggcctgaacgtcgtccacgaggcgccggacgctcttggtgatatcgnctttgtccatggcttaaacggtcacccccaacgcacctggacttcggctaaacgggcgtcttttgcctgtcgatctgattctgacgtgcttacgttggcgaggcgcttctagctatgtacaaccgaatgtaccttattacgacgggcgtaaaggacgatactaatatttcagacatggcgggagttggctgaaa

SEQ ID NO: 10516 - DNA, 2477 bp, Emericella nidulans
gcagaacccagggattggaactgacgtgaagtctaacggcccttggttctgcacaatattggtcgacggatacccatagaattcctgtcattgcgagagggacattactaggagttgatagataagacgtatagttacaagaataatagaacttgaatttcaaagagatgttactttgtcttgctcgggactcattcgctgaagtagcgcatttgactcactatccgatatttaactgaaaccagcatcagaagtcaagcaaaggtacattaaagatgtactcagcaacatctagaaattttatcaataaatcaatacatgactatttcgattacccagaataacatattacttttaagcgaggctcgtgtcatgttgctcaatgtcctcaggaaacgaggatacagcctcaatgtcacccatcctacctttttaacaaaccacccgccggttgggttttcattaaacttggatactcaaaggcataaactcttcagcccgactgtctgataagcacgaaacagtattagtccaccatttcaccccatttccatagataacactttatcgaagggtcgaaccatatcatatcgatgaacgtttgcaatatgactctggtcggcaggcggttttgactgtgaaaggaattacaattgctcatcaaacgatagggcaattgttgcagataccaaagagccagtacatgaaggaagccgtcaacccgatcctaataattaatcatgctgcagcgttggtctttgtgcacatgcatcatcggattaagggactgagctggttccaagaagatgttgtattttgcaaccgcatgtaaacatatcccgcggcagaatgcttgaatgggtaggacaagactgggcagcaagggggtatacgttctgtagtttgctaatttatcagacaattcgccgatgagacatttctccccccttggtttggaagttgagtgaggccgaactttcaacggtataaccaaaggagaagatttgcccagatcaaatgataaaaggcgagtatccgtattggagaagtgcagtaacaaatgcacagccgccttccaagggtaagatgacttggatttcttcggtatacgcttgttcccgtcattgccggctgcttcgtgcagggatagcttgagggagccgatagtccccctaagaagccaattcgatctcttaagaacctaggcgacgtgtcagcaatgacgatcatgacagcgagtggtgaacatagcatgcgtgattgaggacagacccaacaaggacctcagttgttgagatgaaggtcaaacgtggtgaggttaaaagtgctggaagatatgagccagcaggttgatcacgttgcgcaatgattggtagattgtgtccgaaggggtcaagtgggtgtggggatgaaagaaaggagtttcctctcggaatgtcctcctgcggcagtcggccatcaaataacctccaagcaagatgatgataactggcttttccagataagccggactggtatttgcactgcaccatccactttggtctttaacgaatgtgatcgggttccatcccctctctgtggctgtggtaacacaggagcgctttgattagggccagatcctgtagagatcacattatgaataatggacataggccctggagtcatgtgtcgacaatgaaccgagcttgttgccgttctccgcgtttcgtctagaaatctcaaaatgcggtagcacaacgtgccagctccggggcccaacttgggttctgcgtgcaatcctgaggatgatggttggccagtaggatgtgaaccggaaggattaaaggatgatgatagtagagctgtgtaatattataatcgagcgccagaagtgtcgacgtgcgtatcagagctcggaaggtgtgcgagtttggccaggagttagcttccacttcatggctccagcacacactcttcatcgaagcatccgtaataggtgcaaacttgattggtggtcgtcgttactgtcgtctgttctgacttctgatccctgagcttcagcctcgactccaaattttgttccaatgcattccggggagagacgcggcctgaacgacgaatattagtgctgttaatccctcacgggatcgccctaagattggaatttcggcgagtagtccgaagcagctatcctcgctcggttcgctgaagaagcttctgatcttctgatcttctgatcttcggtagatactatgtcgaagtgagatttgcttttgctggccttcaccgtagcagcgcagtgttctctgtatggtcagtggctaccccatccctgagtgaaataaaggaaagcggtgacgaggatccgcatcactttgccttcttagtcgttccccgggctggccaaccgctccttttgaactaacagcacgctaaactcccctacttatctctcgcccttccatcatcatactttaatcgaattcacaggtcaatct

SEQ ID NO: 10517 - DNA, 1951 bp, Emericella nidulans
agaagagcacgagaaagggttttttgatttctttttcatattccccttggacacgctattttcgtgtacatgattctctcgcggttgtgatttgctggaaggtgagcttttttcttttcgtctgtgccattcaacccagtttccatagatcccagttggagaacgagactctcgatcagtgatgttactttttgcctccaatcctcttcggtagccgaacaaacgagcatctcaacaactcgtgttcagtatatgccgcaggctccattcagcggattcaacattcgtatgcgtcggaatactcggagcgttgcaattccacacctgtgagacaacacatccaatcctgtatcaggcatcgtgcattgtcaacatatcagttgatgggcgatggagccgtgagcgaggaagagacaatggctgtggttccttgggagtacacaaatcgacaagtattccagaaatgccgtccctgtacgaatcgtgctgcgggacggatcgtggtgatttaaaggaatacagaattcttctcctgattcatggcgacaggggttatggtcttgggaatgtgcctcctgggtgcttatcttgaacgggacgatccaacgcggcacatcacataccagaaaatctcgctcctgctggtctatatgagcacatgaacaaaggggaaaaagcagaaggcttggagttgctgctaactgttggttttggcacttcttaggaacagttcccattcgaattcacagcgatcggactcgaccttaccggatccctttgatgtggatttcgacataccgcagctttctatcctacgaatcactttaatcttgtacgaggacgcttagcagcgcgctgagtttcaaactgtacgttgtgaacattgctgcattctgatctcccccctgacaaatatccctacccctacatagggctcgtgcctgtactcctgttccacattccggagtactcaaggcccatacactagttcctaaggtgaagacgttcaatcgttctttgccttttgaactggtatcctccagaatcaagctcgacggatcattcctgcgtcttgcctagatgccagacacgccgtcacggtaagggttgcattgtgccctctgcccgaaggcctcttctctgggttagtactctagaaccctaggggttcgttcccttatatctgagtgcatcgtcttattctgaactcccatccctcgttgctgtccacttctttcactcggggtgttccattattttaatctaatttttaattcactcgctaatccagtctctcttttagctctaactgccgtgtcaaggcttcgtcccgttggctcgcaaccttttcagtattcagattatcatctttctactggtcgttctctaatacttacccaactaattccactccttaatcaatacctaatttgacgactgtcgctctcttatttccgtcgttccctgcaagagaccgtgttattcaggtccactccctgaatcttcaaatcgatatccgttccagttcgacaacatggcttaccacaagcgccccacttcgagctaccagccttgcgactcatattttgtggaatcatacgatgacttcactgtcccgcggatggatccaaaggagcatgcaaagctggtcgcccgagagcgtcaatatgccatggccgatgaactgtcccgggtcactagcgaggaataccgtgatgatattctatctcacatgctggatatggatgtgggtagtccctttgctcttacgttttggtaaatggctaatcgtgtcacaggcttccacccttcccgatgttgaatccattgacatccagaccgaaattcaatggttcatgcgtccgtacttgcttgatttcctgattgaagctcacactgcctttcaactgctgccttcgaccctgttcttgacagtcaatcttcttgatag

SEQ ID NO: 10518 - DNA, 1202 bp, Emericella nidulans
atgatgcacaggctcaaaagttgggctaggacctgctaccgatcatgccgactaagctgaataacttgggttaaggcgagcttgatttgagtagtcgttgctttcaaccaggactcgtcaagcactagtgtctcgtcagcaccctgcggctgagcagacttttccggcaattgcgaattgacccggtcattgagaactgctttcaatattccagagagcacacgtaggcaaatcgcaagtagcttatatgatcgcttggtctgtgtcgtaggcttcaacacctttgtcaatgctgacacggtccggggcatgatactcgcgagtacgacgcggttgctgacacgtcggtaaagtgcctcaagagctttggcggcagagatacaaagctcatcagatcggttaccaacaattgcctcgagcaagagatatacggtctgatcgacaaccgtggcggtcccaatttcatggtagattgtctcttccgccgtgggtccggagagtacatcgaaaatcgcaaacagacagttgaaccctgctatctccagttcaacagaggatgtctgtataatccggtcattctttgcgctatccggagctcctcccacaacaagagtcaagaggatgattagctgcttccccatttgaggggatagccgtgctttccatccttccgcgacaagtagccgtaagcagttaatggccagctccaagacattgacggttgaccttttggattcattgaaaatgtgcgccaaggggaagaatgcatattccgcaagcttctcatccaagacatgctcttcggcgagctcatttaagacatggtacacggaacggagtgctttcagaacatcgccagggctagcttgatgtccacggaacttcaatccaacagagcttagctccacacatggttctcggagctgatgtactcgttagcctatcaatcctagtgtgttttctataggcaattctggatgagtgatacctttttgaaagctttctggcgggagctatccatctggcctattagcatacaatgcggcgacgctggactagttggttttatccatctggtccagtgcgagcgagatacagacagactccgcactgccggaaaaataataagactccaccagtgatcaacaaaatgagtttatggatggaaacgagaactcgtactggttgaataccatcttcat

SEQ ID NO: 10519 - DNA, 183 bp, Emericella nidulans
gaggctgtcgccagcagcaagtcagatcccgggcctgatactcaagacggccctatcacacacgacctggaccacccacactcggatccagtgatcgagaatcagacagatgcccttcgtgaacgcaacgcaccagggtgtggacaccacacgacgtaagtcttgagccgctgtgcataggga

SEQ ID NO: 10520 - DNA, 194 bp, Emericella nidulans
ctagcggaagtgcgtactatgggatttccttagacgtcacaagggagcacaaaccggagatccgaagccgagaaccgcatcgtatttcagcatagccgattcccacagcgctcagtcgtctgttgaacgtggggcagtggacttgagcagacatcgtacaattccgttgctatcaaattcctctgctcgatagc

SEQ ID NO: 10521 - DNA, 1311 bp, Emericella nidulans
gagcgttaggaaaggtttgcggttggcaggcaaactcgggtgggatatcggcgtagatggagtgcgcattatgagtggactggctggctgctttgtggtacagtgggcagcgcctgtcctgctgctcgcagtcgccctaggccaggaaattgtccctgcctgtgagaaagattggctgagtcaactccagctcatccttgcgctcgtgcatatcggctccatctggatctacggctggctacaaatggccagcaccggattccgggtcacattgttcccgcatctggagaatagctggcttgctggacgtaagtctcccccctcttgcagtctgactggcctctgcccacagtatttcgtttgaaattcgtctctgacacggcattagagcatctgtacgcgattatcaagttctactgcgtgactagcaacccaaaggaaggctccttcgtaacgggcagtacggcgaattcatggaatcagacttgcacgcagaacccaagtgtcaaccgcgcggccgttgccgatacggctactgccactgatctcatgcgctctgtttcaacccgtagaaggccatcacgatgggagattcttgcgactggagcagtacctggtacccttctctggctggtcatcacagccggtgcgattattttctcgatctggagagcattctatacggacaacaccaacgcaccggcaaagcgaacactcacaggacttctctacccgccccttctgcatcttctttaccttacagtcaagaactcgtggggggcagtcacttgtcttctcgatccgccaatgtctcctgagcgaagggaggtgatggaagcaactccttctgggatgcggttccccaagaccgaagtcagagatgaagtagtcggtcgatcggaaggaagcttcgagtctgcaatggtcccgggaatcgctgcggttatttttggcgggattctattgaaggcgactctgtagatggatgatgattgatagttattgcatgtgcatatcaccattaccatactgtaactaccatactgtcactaccgtactgccaccccgcttgtattgcggtaagtttgttccatgcaaacacctagcgcgagcatcgaatagctggaatcacagactagctgctatttaagagctgttctaaaagtgagagcctagatgccaaatctgttgactctcctatagataatccaagcctagaggcacaagaaatgagaaattatttgcagctacgggggtatacatgtactgtacaaaatgccgccggcagttgcacccttggctccaccaagc

SEQ ID NO: 10522 - DNA, 1700 bp, Emericella nidulans
  unsure (1)..(1700): unsure at all n locations
caatcttgactcttgaatgatattaatatagcctgtcatacgttaaagtaacgctgtgattcgcccggccgcctctgacgaaatgatgtacatacggccagtctgcgtttctctggaagagactgcgcgaggatgagttggcaagcgtgcagattgacatctagactgcaggcatgagacccagacctgcagttgtgaagagtgtgaggccgaagatttgttcctcctgtcctgcgccccactcacattataaccatggctgctgctcattggctgggccgtccccgaggggacggtaccctagtaaaagccaccgtgcttccgcggccaatcagggcggggccatctgttggtttccaacccctcctgactgccattcgactcgttattctcacttttcagctgttttactatttccgttctctcaccctgagacctttagaatcaaggtaatacagagtatgacttggtactgacagcactgctttcaggactgtccgggccgccgcttcccgcagtcgcagtcgagccagagcgagaaattctcgtccccgatagcttcttagatcctagcagccgcccgccaggccgttgagtgaggtgactgtcttttctcaactaggagattgcgcacccctgtacataccttgtagcttgtcgatgcctagaggaggaacgtacatattgacagcagtctagacttcaaataaattgggtatgcacgcgtatttgtcctgctcgccgtttaatgtcgtcaatcaccttcttcaaccgaatttctttatttgactgaggctcctctggactgtgctggagggggaaaaatacaggtatccatcaatttacccgatctaacggtatctgtgccgaggaggaggcaaatcattttaatatgatttaattaattggatttattatcaattgggatttattatttttttatttttgcatttttggaatctgatttcggttctgagctctgtcattctatcattggtactctgggagagaaactctagtacgaggtacagtgcatttatgtgtgcctctgccttatttctcgttctcatcatctcactcaccccgttttcgacttcaacgcacctacgctcatcaaccaaaagcacgctttcctatcctgtctgttgccgcagacgctccgcagcacagcgcatctggcttggacgatattcgctaaacgcgaacaggggcggttctcagcgcagtttgtgacaggccaggcagttccagggatttggtacggtgcatggatactgtgactcctaaactcgtcaaaacccccaaccggatcgactctgcctgttggtgttttctgatgcgagcctcttaagcgcgcctcctcccgttttccccgtccgttctgcttcccatcactggatttgacacctcccatcagcacgcaacattgattgattgattgatttccgagcaatatgactgaactctctcctcgtccaagccgcagcatggctattgactccctgctcaacccacanggggaggcagaaaaagcaggctcgatttcactttcgagcatgcactatggcgctggctctgggcctttacaccacactcacaatatccaccctactatccacggagcctnacgcactatttgcacggctctgaaatcaacaccattatcgaattattatcaccatacaacccttaccacatag

SEQ ID NO: 10523 - DNA, 1460 bp, Emericella nidulans
ttgcgttagaagtctaggattagttgtatgacaattgccaaacccacagctctagactcagggcgtacgcggctacgcgtcctctcggaaggttgcgtcgttcggagcatttgcttgcccagactttccaatcagctgctgtcatgaatgataatattgaatattgacgaacgaggctgggcataatattagcagaggctgcgttgggccgagacggcgtatcacgtgtgccagacgttggtgtttgaaggaggctcagtgccgcattgattcactcccggtgaccttcttcgacaagtcacctcatcccaaagcaacttgataaagctaatcagactgcgagctactgctatctaacagctcgttactagggaccgatctcactgcctcctttcctttcgcgctcccgcccgttgctgctcgccgccgctgggcgtctatcggtcggtgtccaacgcggtaaacatttcctccgccaataacaccacggctgcagtagacgaggggtttccttgaatacagctactgagtcttgcgagaacagtattctagatacaaagcagatggccacaaccgatggccctgctggggcgcacggtatgcccctctagatccagtcctgaacaccacttacattgcctcgtgcagaccgtaatggccgccgccgcccctttgcgagctggatgaagcgactggcgagcctcaaaggctccaacgactccagcacgatccgatggtcgaacaaacgccacggagcttctaagactaagaaccgcggcatcaagaacaatccctatcctctgtccggccacccccaagttctccagcagtctaccagcgaccgcgcctcctcccatatcagcgaagatcctgcacgacctcgatcccgctcccaaagcgaaccgtccctcacatactcgggctatgaaacgaacattccagcgaccagcgcaaagtcggcggccccgacaatttccaccaacggcgagacggcaatttccgaggctgcatattccaaggctgggacaacggtgacggttggcggaggagtgagcacaaatggaggcggagaggggagtacattctcgtcaccggcgccgtcagtccggtcgttgaccacgacgttgacgaccgtgcagtcggcggctccttcaaatatatacaatacgcagaaccatacgcattaccaccaccacggccattcgacgagcggcacgcagcaggtacaattctcccaccagttccctccctctcccgccaccgcggtacccccgcatctcgccccgcacgggcactcggttacgtacagcgtcgcgaccgcaaacaacattctcaccgacaacgcgtcgatcctcaccctcgcctcttcctcaaaacgccgccgccgaaactccttagatacccaatgctcagtccgcgccctcgccccgtcctccgtcttcggcggcagtcgtgaaagc

SEQ ID NO: 10524 - DNA, 280 bp, Emericella nidulans
cctcacatacacgcacatatcccaaattcacaatgctgccacagaaacacatggcccatcagctcctgatcctgtatggttctagaggatgccacaccagcggagagagcaaccctagggacacaggtgggctgtacctagaaaccatagtagggcaagtttcataaagtctcacacctacaatgtctagacaggcctaaggaatcctgcagaccttgaatgcttaggaatttagcagtttattccctggggctctgattgacatttcttcaagctggct

SEQ ID NO: 10525 - DNA, 1626 bp, Emericella nidulans
actttgcgttgctgcaacaacatcccttcaacgcatcactttttgaacgccgttttcctctcctctcttctcctcttgaatcctcacatccctccctctctcccttctcctcctcttccttttaagcccgcacccgtccgcggcaccagtcttgcccctcgtcctcgcctgaaccgttccgcttctcggtgtgtattccccattgcattagcgtaccattgtacagactgtggcccttcccctggcgatattgcattgttcgggcgttttattaatgactccatgcttcgcatagctcgtcccccgcttcctacctcgtctccgtcctctcaccttacctgatcctgccagtcatgccgctgtagcttggttccgtcaccaggaagtctccggtacatgctggtccacagcgagtgcggacgcgttttgaagggttttctaaggccggaattcaacctgctgcaattgagaaacattggacgtctagtttaccgtgactgcatccattcatactcgccgtcgtagcgtatgctctgctagatagcgtcgccgtttcgtgcactcggatcagagggttagagggcttgagggaaacagtcatttgctgccatggaacattcctcgcctttggctgccatgcagcctccgtctgtaatgctggggcattgtttccgttcagatgcaccgacgtcttatcatggatttagtcctctaccagggctaggccccggcgggtttaacttcaaggacttgtccatgaagaggtctaacggagactacttcggtacgaaggtcgtccggggctcatctccaacagcgagccttgctgcagatctgtctcagaattttcacattgatcagaggttcgtcatgattttcctgcaactttcacttgtccattattggtgctgccaaagaaagactactgacacaaagatttcagcccccaggttgctacgccacgacggtctttgttctctgcttgcctactgggaaatggaaacagacgtggtaagaccttggtttggacgaaaacggccaaagtttaacatgtatatatgtctaggggtcgatgataccatgaccactccgcccctttcatgctcatcacctgcacccgcgatggatatcatggacatgtccccactgcctcacaaaccttcatttatcaagacgcctgaaatggagctggactccccactctggagagctccccaaggacaccactttgatgctactgatggccttgttcccgattcaccaacggtttatccgaggatgggaaacagataaaaagggccttgagggtttgtcacggcttgaaggttaatatattgcccttagagaaaccgtcgatttttgcgcctaattggaggagcaaaagcttcttccagtgggaagcaacccccccgaagcaggcctccttaagttaccctgataacggatttatgcgtgggtttggggcgtgggtattccaacgaggccttatctatttacatgttactcttaaccctagaggggcatccccaagtcccctgttctttgaaagccctttgccccgatcaaattttttcacccggtgggcgggtttcatccccctttgtgaacagttccttttcggaaaat

SEQ ID NO: 10526 - DNA, 135 bp, Emericella nidulans
gggcaacgaagacgacgccgcctcaggcctgtaagttctgacggagctgcaccgctgaagacgactacgtgggcagactcagactgtccagcctctggagaatgagcgccagaggctggaggcccggtcgagccg

SEQ ID NO: 10527 - DNA, 100 bp, Emericella nidulans
tgtaagtgagtgatcgagtggaatccgaacgtctttcacaggatcgacataaagccagctactgcgataagcagactctgacatcgactcgcgcagtatc

SEQ ID NO: 10528 - DNA, 126 bp, Emericella nidulans
  unsure (1)..(126): unsure at all n locations
aacaaaaacgccaccgcgcccccccccgaggtcgacggaaaccgattaagccttgatanactanattatctagcatgcccgaggtggatacccacttacgcggggtgagagtttggttgcgcacac

SEQ ID NO: 10529 - DNA, 2135 bp, Emericella nidulans
agcccctaccgcaatgacactgggtatgttgacatacggatatcgaaaacataaaaggcttggctggccgcgtctcccatccttcctcaaacaaattgggcttgtggagcacgtcaaaaacagcgggaccttcatcgtcgggtttgacacgatcaataccaattattctaacactgagactaggaattagcggaagcgatctgtcacactggtgttcatgggctatacttgtccggcatcaacacgactcctgagccccataactgcgtcaggctcccccacaactatcgtcacgcatcatagtggtttaggccattttctctggcgaaaggttgcagcttcaacgcctactttgacaatagaccaccgcgccgtcacgaactatcgagagatctctagaccggtgtgtagactcgtaggaatcggactcgttcagcaccgtcaaaaccatgtataatctaggcagacgaacttccctctagtcgaaatttagataagtgcatgtgagatgacgatgagaaagaagtgaaagaggagaaaggggaaacaaggggatgcgtagtttcagataacaggttatatggggccttaccggatccttgccatagcaaatatcacctgctcagctctcttgagcagctctaataggtttagtggtcaacctatttcttcgatcttttccaattatatcccaacccttctgagcttttatacaacagaatgtaacagacatccctaatcagccaacgtccaactaccccggattgctgagttttattaccaagctcgtctatgtatgaccctataatcgcagcagggatggccggtggctgcttttgctgggagcgtctacaaatccttgatctttactgattatatatttgtagaccctgcccacgaataccgagcacacggcaatcttgggcccaaaaatatacatcaagggtcaaaaacatgctacatttagcgcaatcacaacatagtaagagctgcataactacttgaaaccaccaacgcactattaggataagatctttcggtaccaaaataaacagaaagatagtaaaaggtaaaaaagagcccacgaggaagtttatacttgccttatatcttttagagctttcaaacaagatactaacttctggacttgctgctcagttaatgtaaaggctttaatatttattgttagatacggccatagggaccttctgaaggatttttgaaagctttgagagtatctatagcccgtatatgggagtctaggatttgaagatatagtttaacatgtaagttgccctgatattgcttgacactctgtctggcacagaatatcatttctcaacgttaatttctcacttggctgttatgtcaaagttgtaccgcatcagattcgttggctgacagtttccgccgtaatgggcacagtggtctatttgtgaactgtagttttttttgtaccttccttagcaaggtatggccaaccaagcatatcattacactagctccttgttttattccaatgttatctagctattcgttaactgtggtcatctcgtgacttcttggcgaattgcttgtgagcgtgtcatagaacgctttatagagtctaggccatagatttagccttcatactcgcgagacagacagctgctagcctctattgttgcccgcatgcctgaagaatacgtgcttctaggagtacctaatgggtgctgtgctaactcaagagccaaaaccctgttctcatgaaccaatgagttgcttatttccttcttacatgtggccaaataactactatagcggcgctaaatcccactgtcttagtaggttgtaccggcacattaaccaatctacatgcgaagaaaccttctgcggcgctaagaacacgaggcctgatactagattcaaggcaaattatcattaaagattcaagcgttgcagacaggcggcagagaagcagtttgattgcaggcattcccgatgcaccgctaaccggcgcatggtatattatcttattaattcttatattggggggctcatgtagtctaatatatataaagtagacaagaacagcaactagattattcagatatatctaggatgtctcttttacggtcattacagttatagattgt

SEQ ID NO: 10530 - DNA, 467 bp, Emericella nidulans
ggctgacagctgcacattgccggaggtttaatcattgcaggctggagaaatcactacatggagagcgatcgccaccgatgcgtagctgccagtctccctatagcgggcattattacaggcactcactgcactgaactgtacaggaaatcatctggctgaacagagggggatcccaacttaaagacactgtgcgatatgcatcttatagccggtggcgaaatagctaaaagggcactagctgacgctctacccaccaaatatgcagcctgaacggaaaacggaaaatgcacgcgataacattggtgatagaatgaccactagagattgggtgcacaaggtcagtgtctaaccaacaggccaaaagcggcaggatcgctgatcaatcataagattagaccgggattgggctgcgtagtcgtttcagattggcacgagaggccactattgatgaacggggactacaacgt

SEQ ID NO: 10531 - DNA, 841 bp, Emericella nidulans
tcaacgtagaagagttttatatgatttatattaataacctagtaattactttagggcttaaattctagatattataatattatatattatacctgctcataattataataaatatattattactatgcatttctttatatttttaaatttcaaaaaaaattacttatctataagattttgtaaaaattataataaaaatgacaataacccttctcctagtagtgaaataaataaaatattatattatctacttagctatgaaaaaaactatattattaatatattacctgactttattgatataaatatatcttattattgatattataatcttaaataattataaatttaggtaatagggctctacatggctagataagaacaattaattttattggtataatattaaaatacttatataattaaaattataaacttattaaattttatatcagggattaggtttatatttattattgttattatttatgtattactaggtagacctactaagagcttagtaagttttataatagttatactagcttatataaaaaaattaaataaattaatatctagcctatagcctaaaattcaagatttattacatacctactttggtggctaactagttaaagtataatagttttaaatattatgtaactgagtttttaacaccgtattataacattttgatttaggtttcaaagtattagcttactgattttaacgcttataaccattttgatttaatcctaaggttgcctaaactattaaaaaatggtctagggtaaaaaaaatattattcaaggtttgggggggttttaggtttaaataaaat

SEQ ID NO: 10532 - DNA, 878 bp, Emericella nidulans
ctgggcgagagctttgctgagcttgttacttactgagcccacataaatgaatccactgtttgtagagcgctcagcaccgatggggagcttcaatcactcgtatatggcgtagtgttcctcccgctcactgtccgttgttgcaccactaccggactgaatgaaccttgaacacacctaacttaattgctttgaatgagaccaggctctcaccagttggtgtattaccaaacaggctcgtacggaatgaccttcttaacccactggtactctgaaaggtccatagccaccgcgagcggctatattgtgactacattcgcggtctatttttgcctaacgctcctagtactcaacgcaaatgccgaagataggtcaacatcttataaagcccaagcaaagaccgtgatcgggatgagcggtagcacaagaatgagacaagagtccagctttttaagaacgtggactatcacttggaaggcccctaacaggtatctggcgtttgccgcttggagtaccattttactactcagcttttttagccggaggttttagaggtaatccgaccctttgttgggcttactaggctaccgggcaaggtggaccttcagttagctggaactgttaagcgttcctcccgggaggccattggttttcaaattttggcaaacccacttttattgcatcccggcctggatggtttccgggaaagcccacccccctttttgtagaattaatttttttatgaaatcccttaccttttttaaagaaaaaggggacatttggtttaaattaagacttcttaagaatatctgttttatctttttcctatctgtttctttttttttttagtatatatttctatttttccttattttcttttg

SEQ ID NO: 10533 - DNA, 2831 bp, Emericella nidulans
gggggtggggagggaaggaggaaaagtagtatattaacataaaaaaaagtaggaaaataatagaaggaagtggatagagagatggaaaggatgggaggaaagaggacaaaagagaagagaaaggatagataaaagataaggaaaggagaagggaaaaatataagaaggttgtgagagagggataagtagatgaataggagaaaggtaggagagagaaagttgaagttaggaaaaagatgttaatcagaaagaggaaaggaaggaggaaaaggaaagaggcagataaacattaaagggatatggatagatagtgagaaggtagagagtcgaaaagaaaggagaaggagtgcgcgagaaggaaggaggaagatagaggaagataattaggagaaagagtatccacgagccaccggaccaccccgaaggtctggatcgtgctgccggacaagaaaaaatcaagaggggtgaacgagatcacggcgacccagctaattggagggagcatacttacggggaggcgcacgaaacgggcggactaaaaactgaagcttaggctggggatgtctttctggtaccagcgggcgtggcccataaaagttttaatgcggacagtgggcagcccgatgcggtggtgctaacgggggagacggcgcatgcgattgattcagttgatcccagggagaaggtgattgatgtggaaagacaggggaagctgactgggtttgtaatgatgggggcttatcctcgaggtgtcgagtggacttgggctgtcggcggggaccatatagggaggtttgaagaggtttggaatgtgccgacgccggaatgggatccggtggttggaaagaaagagggaggaatccatcgtttttggaaacagtcctaatttcagctgtctgatgttcaatatcttagctagtctcaagtctctcagcgctaccataccgtggcggcaagcatctgcttcgttaggtcaaatactatgccctacactccattcctttgtcctatttgtaaaggaatgcacactttctttgcagagtaagtacaggtaccgtatactttgctaatgtgatttatttcttggtccatgttttttaacctggaattttgtgcttcaagattgctagttcagcccttttatgaaaggattccagttctgctgtcctagtccacgcaagaagcgaacatgaagaccaagagcctaccttggggcttattttgaccgagttcggccttcttgcgcttgagcggctggacgattcgtgggacgaatatgcgtagccgtctgctcctcactgaacggaactctgccagcggccaagtagcttccgcaggcccaatggagattggttcaggtaaaacagttaactattcaagacaaaacatatactattcttccagaaaggtctgtgatgctgacaagcaggacgggcggcgcaacgacagtggggattcgaacatcaccccggtgatcatgaagcagcacctcggattgcgggaactgtccaaggtatcataattataagaggcgaactcagtatgggattaggagcaggtagggctatatgctattggtgataccgaggtataggcgttcataatgctgtacattgtagcaggcgaaaagttaccgaaagtaagaggtcgtaaacggaacctgttgctgctacatattctctggttaaatgaaacgcattcatgatttcatttcttagattggttgctgaaaacttgtcattccgattgtccgctttatcgttgcagactaaataagacaccaaaaaaaaagaacaatagtgcatcagacaagccagcgtctggtccaaaaccaccttgtcttatatccgttgaagcaagataaatcaaacacatctatgcttcagccgccaacgcctcacgtctcgacttggatgcagggtcaaagtacgggatttcgcccagtgagacgacccggttgccttgtcgctttccatcgtagtcgctgcagttcgttagtggcgcatacagagccagcctatccatcctgtttgggaactgcttactttgtcgccgtatggaagacagaccggctagatgaggtatcattagcatatcgtcctctcagcgcatgctttgccatgacatagacatgcttacttatcccaaatagcaagatcattcgtgccccatttgaatcggacctggagatcatggttctcggcgatgagttggcggactggcatagtgattagattgcatgaccaatcacacttcacaggcgaactgggggcatacaatatttcttcaaaatctcactctcgcgcttcgtcacgccctcgatccaaccattgtcgacctgcccggcagcaccaaagagactcttccaaccagtgaccgggtttgtgcggatgaggggactatataatgtccatgacagttccagcagtcagtcagaaatataacaaagaggatgtgtatcagaggggaacgtactggctagccctgaaatcgtacccggtgttctcgggcgcaccccggtctccttgaatgagttcgatgccgtgttctttggcgatgttgttgaaggacggctaacgcagtgagcatccaaagtggattatgttcataggggtggagctgggctatacctggtggtgaacagccgtcagggtatctgtcagggcttgaatgggcggcgagagtctgtcgtacacttcataccccgatgcccaaagcgtatcaccgccggtctggtcttctggggagtgggtaattttgagaatggcgtagtcagaggggactcgctcgaaggttatgctactgtagttagacattttcttagcatttag

SEQ ID NO: 10534 - DNA, 1321 bp, Emericella nidulans
atctctttaatcttaagggcacctattacccacattagcgcctctcaccagaaatgagccatggtttgatcactaaccttcaagtgcagtagggaattggccacccctgcccagcaaaagcaagctcttctgatttttgaaaaagcgctcgcacatctgcttgatgggctcgttgagtttcagaatttctctaaattgatcggatattttagagagcccctccatgatttcctcacgtctcttctgctttgaagctcggtcttcgctgagcgagagagcgaacattaccatagcaacgaactgagaagtgtatgccttggtcgaagcaacaccaatttcaggcccagcgttgatatggacaccacaatgtgtgagaagggaaatggaagatcccacaacgttgacaataccaacggttaaagctccacgttcaagacagtaacggagagccataagcgagtccgcagtctctccagattgagagacgaacacgcatgtgtcgtcgcggaagaccggcgcctgtctgtccaaaaagtccgaggccagttcgaccgcaatcggaatctcagtgagctcttcgaacactccacgaactgccatgcacgaatggtaactagtaccgcaagcaatgaatataatcctccggcagcgacgaatggttgagatgtattgtcgaagccctcccaaagtaacttgcttgttagcaacatcaagacggcctctcattgtgttcactacggattcaggctgttcaaaaatttccttttgcatgaaatggtcgaatttgcccttcatgatttcttgcaattcgagctcaatagtctggatagcacggacgtttgaagtgccatcatccttagtcaagcgatgaatgttgagttgaccctcatggatatgagcgatgtcatcatcttcaaggtacagaacctttttagtgtgctcgataatagcggaaggatcagatgacaagaagaattcagctggctggggaattccgtcgtcagacaggaaagcacgagactgggaccgatgaaggagagatttgtcaggaggggcgagaagaccggtagcagagttcttgatcgccgcgttttgggaagcctgttcagcagggagagccacgtcttctgagtattccacatccacgaaatccaccttcattttcctggaagttctcacgccgatcacaagaggggaacccttacgagcggcaataacttcgtgagggtagtgcacagacttgatcaggaggccgaaagcacccgcaagctctttaacgacagcctttgccaagacagtgaagtcaatatccggttgctgg

SEQ ID NO: 10535 - DNA, 560 bp, Emericella nidulans
gcgtcgccaaaagatgatgagcccgtcctcaacaaggtctcccgccatatcacacagccggtgtcccagggtgcttcccaggcgatgctgtacgctacgggtcttactgaggccgacatgaacaaggcccaggttggtatttcctcggtctggtacaacggcaacccttgcaacatgcacctcctcgacctgaacaaccgtgtccgcgagggtgtgcaaaaggctggccttatcgggtaccagttcaacaccattggtgtcagtgatggaatcagtatgggtaccagtggtatgcgttactcgcttcagagccgtgacctcatcgccgactctatcgagaccgtcatgggtggtcagtggtacgacgccaacatcagcagtccccggttgcgacaagaacatgcccggtgttttgatggctatgggacgagtcaaccgccccagtttgatggtttacggtggaaccatcaagcccggctgcgcatccatgcagggcaacgctgacatcgatatcgtctctgccttccaagcctacggccagttcatcagcggtgaaataa

SEQ ID NO: 10536 - DNA, 161 bp, Emericella nidulans
tcgctggaccggatcgaccacggcaagactagacgacacacacgagactgcagcattgaaaatcgctagacaccgagaggaatcgcaagtcagatcgacgaccaccagaggacagaaatcgggcatcacacgataaaagcacaccacaccagaatcaacgc

SEQ ID NO: 10537 - DNA, 1683 bp, Emericella nidulans
gtctaccgagaaaccaccgagtcaagatccttaagagatgcagtgatggccttgcgttcccgaccaatctccacacagactgcctccagctcctccatggaaatgtcgccgttcatatccttgtcgaacatgctaaaggcggcttccgcctcctcattatcatcaaaggcctcttttaaatcaccagggaacaccgtgtcaaaaccttcacgaacaaaggtacggtaaagccgtcgtgctagggtctgacagccagctgttgtcctcaacagagcaataacgacttgagaaggatggctgctgctattagcctttcggccagtgaagtctgccgcaacggcaccggcaacgtccccaactttgttcaaggcgccgagagcaagacccctggccttgcccgcgtagcgcaagggagttttggcgccacttcctgatttgtcctgtttctcttcaaaagcttcgtccgtctcagcgatcttgttccgggagaaggcgtacaatttggtaagactcccaatctggaacttattgatctcgattcggtccgaatacgtacgccggtggaagctcatggcaatgagctgaagcaagaacttctcaatgaggtttaggattgtccacacgaagactgagatgatgatcttattgagagtgttctcccagtctcgagtgcgactattaccgtcgacatggtgatttttcatggtcggcaagaaggaaatctccacacccagccaccaaaggaatagcgtaacaggaagctccaactgcttcgcaacatcgcgccatttctttgagttgttcgtgaagatactggcaaaaatgttgaccggggtaggtagaagtttagctacaatctaccgggcattagcacgcgaatttagcagggctcgtgagagatagtgcaacatactcgtccagcccagagtgtcaaccaaacgatttccaaccagaccgagaaccacagcagctcgacaccacccacgcttgcatctgggtaagccagcgcaccaaccagcagaggaatgagtagtatcaaaacaagaggcacgatgtaagtaaaataacgcacgataaagctggattcgtggaccctcttgataaatttggaaacgcccgtggagggattttcgggtgggttatagacagcagccttctcgtgcaatggattcgtagcctcgtcaaattcatcaacgtcttctgctctccgcgaacgggagcgggttaaagagtgcacatcaccgcttcgagcatccttctcggttccatgagtggaacgcgaagcaacccgttcagcttcaagtactgctaaatcatcttcaagtcgcatggcttgttcccgcgctgcggatggagaacgacttgttttgtcaaagtcttggaaagtggtatcaacttggaggtgagaaccatattgagctcctgcgtaagctccatcatgaggctgagattcatcatggacgtaggcgtttccatcgacggtcggggacgaatcactatctgatcttcgccttctttcggccgccggatatgagggttcaagtacctcgttcaccggtgttgtcatggcggcgccaggccagtgaaaagccccggagagccgtcactgaggaaaaagaagccactgacccaccgtggtgggaatgccaagggacaggctgggaggaacccattatgggttag

SEQ ID NO: 10538 - DNA, 1967 bp, Emericella nidulans
gaggagatgagtgagaggatacaaggtaaggcatgtataaaaggagtgatggagtggtctccaatgaagtgagaagggataagacagtgaaaagatagggaaaggtaggggttaaaagactccaacttatatcagaagaatgagagacaggagcgtgtaaaggagggaaacataggacaaatcgcgagggaaaggagaaaggagaagggaagtagcggaatagaggagagcccaggggggaccaggcggttggaagacaaagcaagggagttgctaaaaaggtcggctggatattttggacagcagtggggtaaaaaaaggaggggtagcaaagagtcggttgtggtatattgaaaaggaatagttctaggctcgttccaccggtggtgcggggggatatgtggcagttgtctggagcaccccggagaggaatggcatagagagacccgtttgttaaaattaggagaggggagatagggatcccaagttcaaaaattgggcgcagatattacggaggtagaggaaaaatatgtgatggtgaggcagctattaaggggatgattacgagggaggggagcagggacacgggcgtagatagtgaaacgaccaacccgcatctcttgcattccgcattcgagaactgggctcgcaagaacccgcattttatcgcattagatttcattcattccctttcatccaaaacgcacagatcagagcatagcatcatcacttatgcggccctcgatagcgctgctaccaatctagccttccatattagatcacttctacgcgactctcgaaaacatggacagattatccctgttcacatgcccacttcaccggagctctacatctcatacctcgccgtcctgaaagctggccacgctttctgtcctatacctcaagacgttcctgcccgacgaatacaggagattcttagcgatattgatgctcctattgtcctcgggacctcatcaaaaccgcccatcagtgctgaaactcccggtcgacgtctacatgggttaatgtcaccgaagtttccaaatggcggcagatgtgtggcgagcaaccagctgattattctcgaccctctttagaccacataaccattgagcagaaccagactgcttatctcctcttcaccagcggttcaaccggtaagccgaaaggtgtgcaaatcagccatctcgcagcatcatgctccatatcctcccacgccactgcaattcctctccccggcgaatcaccaggcaacttccgctggttccagtttcgttcgccatccttcgacccttcactcatggagatttttgtcaccctaagcactggtggcacgctctgctctgctgatcgcagacttaccctcgccaatctcgaagccaccatcaatgagagcagagcgacagtcatgatggctacgccgagtcttgccacgcttctcagacctgaccggctggagacccttgaggcgctgtggtccatgggagaaaagctcaaccggacagttattgacaacttcgcgctggataatgttatgaatggagacgccgagaccagaagaccgaggaccttggtcaatgcatacggtccaacggaaggagcaatcaactgtacctacgtcgctcccttcaagcgtcacatgcgtggttctatcattggacggccgctaccaacctgtgcgatgtttattctatcccccgactcccaagtccctgtcttagtccctaccggtacagttggagaactggcaattggcggcccccaagtcagcaaaggctatctcaatctccccgaagtaacagctagagtcttcattcgcagcaaggaatttggacccctctaccgcactggcgacaaggcccgcatcgtctgggacgaaagcgggcaccaggtcattgagtacctaggccgaatcgcacggatcaggtcaagataaatggacgcagagttgagctgggtgaaattga

SEQ ID NO: 10539 - DNA, 811 bp, Emericella nidulans
ctatgactataacggatgatacaatacagttcgtaccgcacctaactgaaatgaggatcaccatgttgtatcgcacactgctgatggtcatcaaggctcagggcctggtcctgcaatgccaaccaatgaccaccgtgtacagatggatcgcactagatctatagaagatgaaggggaccttcggatcgaccaagttgacagactcttgcacgaatatgaagatgcatgggctctatgtacgagactcgaccgctcgcagacaggcattgaccgacttgactgactatcaaatgatacagacaagccccgagctaagccaacatctggagctggctatggaactggagcccgcggagcctattgaccattaagacacccaggagacccaagcttgcatatgatgggataacccgatcatttgacacaaattaccaggattcactccaagaaggtgccaagaccaattagtctttctaaggactaagttgtaaagactctcaatagcccagaccaagtggcttaggtccttcaactaagtattgcttatcattacccctatttttttccacaattcagtattcaaagatcaactcttctgtactaatcatctccacctaatatttcttttaattactttccctatccttaccttattccctccttatctcacattataaactttctttttaattatactttttacttatgacatatatttattcctctttataataatttttatacaactcatcatcaatttcccaattatctttttcaccccataattattactattctattataatattac

SEQ ID NO: 10540 - DNA, 495 bp, Emericella nidulans
gcttagtcacatggataagcgcaaaagcgacttaagaacggatgagttttccgcccttgctagagtaaatctgttcaacagcagtactggcgctgggaaaaaattccgttcagatcctcggccgaagcgacactccccaacatctcgatgcggggagacgaaaaagatagacaggcacaacgtgacgtagtaaggaatcacatgctaggcggtggtcgcaggtagtgtcacatgacccacgacagagggccggccgttgtcgtctcggcagtcactgtatgctgtatcacctccacaggacacagactcaagttgatgtacgactgttgtgatcctaagatgacacgtgcaaggtcgttgtggagaggaatgccgcaggattcctgcctgccggtagtgcaaccatatgtcactggcagaggtcctaagcaacattgtttctagtttgtatgtgataggaatgttggcactgcagcaagacctacaggaaaaggg

SEQ ID NO: 10541 - DNA, 174 bp, Emericella nidulans
aataagaacagctgcttggcatgcgctcgatgaccatgcgaattgtagcatccgatacgcaagaaggggtacctgccagtactcaagggtcttgttctggaacactactgaacccaagcggctgaagctgcaaacccgggcgactggggagattcttgacaggactcgggataa

SEQ ID NO: 10542 - DNA, 669 bp, Emericella nidulans
aacttcattcgtcgaccccgcaggtccatagtctaactccagctccagctcactattcgacggcctcagcgtcaacaacttcagtcctaactccccagtcaccgccgtttcgacccccctcgccaacagacacttccaatctacccctagccaccctaacgcagcacatgaagactcaattaggtcaagcgagacaccttctcgccactctatcccaccatctccctccagcagaaaacatctggatccacgatacagtatctgatgcagagggtacagtccgcgagatcctgatgctgaccgagccattgcgggtagaccgagaagtcaacaatggcaaactaggtctcaagacgcaactcaaatgggcggttcggggctcatggaaggccaaagacatgagggcgagactgaatctttgctattcaagtctggtggcaattttgatgagattacaggattatgaggcggagtacgctgagtctgtcgctgagcatgctgccgcgaaaaccgagacgatgacgtcagatgataggaaccaatgacaagcactaatgtgcatgttgagggacctaccacgagcgagttagagagtctgcacaaatattcagcaatgcagatggagggtctatcgttggagtcagtcgtcgacgagcatacggggataga

SEQ ID NO: 10543 - DNA, 1916 bp, Emericella nidulans
tccgttgttcaaaggttccagagtactttggccacaaagcacgtacttctacccggcgatccttgtgtagccccggtcatctgaatcatactatttgttctggtcacactttcgatctttgcttggtgcgaagctgtctcctctgaacgtggggcgcctgtccatcaatagatcaagcaaggatctgtcaacacttggggctaccttgcatacgaaaatcatccgcagggaagatttaagccgcgagtgttcatttgacgaggccgtctcttcagtgaggcaagaccaggattgcaatccagctgagcagagaacagcacagcacttgctgctgctagcctacgagcctctgattcaccctatgattactaattcgcctgtgttctgttcgcctccagtcgatctctaccctcgaagacgaaaggcaaaaaatttccgagtcctcgcccatcggatctgtccaagtgtcggtcagttagttgcatgcgaaacagcgcatgtaatcattgtaccaagatcgaggggttagaacgtcattttcttgagtgacgaaatcatggtatgatggtctgaaatcaagaaagtctcggccctgcacaggttattcctgtttccactacgcatggcgccaacacctgcgtatgctgtacacttgtcgaggcttgggttaactcccgttggcatcaaaactcctctggacacctatactctgacacatcattgagaaagcacatttgcatacggacagaccgatcggatagacatacggtgagagcggtttgtggcaccacgaggacgggattcaaattggctgaagtcgtgctgacgagcccggccgctgtgctaatctattgtcggtctgaacaaggtatgcctctgtgctcctaacgttcagattgatgttgtaattgtttcgcgcaactgttctaatcaataagtgtcaacgaatccctagactctgcatgtaatgaaccatctagcgtagagaacgaaactttgttcaatgcatttcattggattgagcaggctttctcaaatggctcattattagggggattagttactatcagtatcttgaacgttgaattcattgtctagatcgatattagtctgctctctgaaaatacttcatcccagacttccctgcccaaaagatcgttttatcaagcaagcggtataggcacaacatcgatacctggatggtgtctgtatattcacctatcgaggcgggccaggtcgtacgattttgcaatcatctcttgctgtgcaacacgattcctgacggaagttgacccaacgggcgacaacagtagatgagcaatgagcgccgagacaatgatggcggggacttgatgaatagggagatccgtacggagacgatgcttaatgaatcggcggaaaccaggtccgctcgataagttgcagaggcaacctgtattacgttcagcccaagcagccaatacctgactcgacaagtttcgtaggccttccttgacactggaggcagtccatatagtaattgtggcgttggccggaatcatatctacgcagagtatagtcctgtaaagctgctttggattgacgctcgtaaaacttgccaccctaatgacgcggcagaatacctcgtctccataatccaaagaccgatcttagtttgagaagtcaaatcatcgtcagctttgcctatctggaattctagattccagcttggaagctgagctggagcctcgctatgtcttccagataaagctgccgagaaagcaaaagtaccaccacaagtcctcgcttcagcagtacctttccgtccaatgagatacctcacccgcctccaacctgagtttcagtatatttagtatgttccaatttagcccatcctcggttgatgcaagaaacctctctgtatgacggtttttttg

SEQ ID NO: 10544 - DNA, 915 bp, Emericella nidulans
  unsure (1)..(915): unsure at all n locations
tgcgcgcggtcgaagagtaagataagcacaagctccgtctcctgaacgggtcgcactctgtaaacggatacgcaggccagctcgacgaatttaagtacgatcacaaatatcctatattattactcttacaatattgttattttaatcaattataatattaataataatacaaatatatatacaaataatatccattatatatctacattatttaatttataaatttttaattatatattattatcactctcaactattattactaatttattattaaaataatattttcatttattaaatataaataaataattatattttctattactattattttattttactatcttttttataaacaatcatttaatatcattctatatttcaatatattaacataatatcatttaatttatctcttatattatttaaattattatataacatctatattaatcatcattttacaaattaatatcttgttaatagataatttatcatctatttttaccttatttattttattaaatgaatattacacaccttatatccatgtaaattctattatttttaaataactaaccctttctnnnnnnnttagagaatgatgatttcannnntatgtctcctcatgatncacacttttaagagtaaataatgagtcatnctnnctaatttaattacatattatattgtatctaatattataaaattatctcattaatacaaatattacatcattaccttatattattataaaatttctctatcatacttgtattacttctatgaataatattacatcttaatcctattctactatttatacttatcttactttcacacatattatcattaccattattaatctatttataaatattaaatacaacatatcttctcaataagtattct

SEQ ID NO: 10545 - DNA, 519 bp, Emericella nidulans
ggtttgtgcatagaagtttgtcagacttggtctctgagaagaaaaacgggttggacattgtatattcgctggcgatgcggacgatcatgagtcgcgagtacgacataaagcacatcaatctacgttcatcagctgaagaatacaactggaactatgcagacaactatattgccggccaccgggactatttgttcaacccagcacagcagcttcatttctggcgcgtgcgttcgtcctgatcccggtccgtctgcatgtacatgctcgacgccacatgcaacctatcaatgaggacaacgaggaggaaatccatctgcttggtattaatcaactcacacttatctggcagcgacataagtacgtgcctcctgaggaaaagaggattgagaccagcagcaagagtagggaccagaacccgctgaatatcttatatcaaacgagaaatccgtcagaagtggttgcggcagagttaaatcttctcgcggatccggggctggagagctcccggcacagttattg

SEQ ID NO: 10546 - DNA, 1895 bp, Emericella nidulans
cgattttttggcggacgatacaaactcacgtgactatccaaagtgagggacctgatattgtccgcgaggttagattctctctttatctcgcacgctttcctaaggcgttgtcgatctgcattgacaccgtcaaattcgctattcttgtgcctattcttctcagcagtcttgattgctgcgggataatcaacaatcaacatctgtttctcgagagggacagacgagcatcgaacagtttaggggccggctccggagtttcccaacggaccacattcccatcacatcgttctctcaactttgattttgagtagattgtctaacggctacatatgccgtatatttaaggctggctcctcgccgtgatgatgttgctcctccgcccttctctccccgccgccgatcgtcccctgagcctgacttgataaatgcccgttcagcctctagcctagtttcacctacgtcctatttcccctctattgctattccacagttcgggctcagagacaaagaagtggcttcttccgactcagcgaccaccgcgccgccctccccggcttctacgtcccatacatccaccagcaatgacgccggccatacgatcccttcagccctacatccacgggttgcagtcatcctgggagtcgaccggaagtggtgggtgcctttgctcgtttgccgtgctatgagtaccgccccagcggcttggtgggggctccgatgtgccttcacttttctggcggaacttcttcgtattcgacctggcatgggacatgagggatgggcggcggcgattgtcggcagtgttagccaaaattgggacgttgagagaaggtttcgggtgacggaggtagcgctggctattatgtgggtatgtgacacagttcttcgcgtttagccccaggtctctttcgagggcaggggtaacgtccaatcgctgttggctaactgacacttatagtgctgtgcatctgcatatctttcatatttttttgctgattgtatgatgtctcgttggtacgtcattcgcatttacattggttccttgcttgaagagacttgttctcactgctcatcttatttcaggcttttgaattataccccaccggctgttgttatccgtcttcttacaacgaacggcttgattgcatatatgacttcttgggttctatatctctctggcgcttcctcagatcctcgtcttttgttaccagcatggatctcgattacaactgtgagaatcaaatcgtacaacattctagtacagaattgctgacttcttgtagactttgacatttctttatcatgctacgcaaaatcacgcgacgatcaaacgtgaaactgctgcctcgctcctcgtcgtatcagttgccagtttcgtcagcatgtcttcgcttcttttgcagctacacttgacccgcgagaacgaacccgaggtaccgctcttcgttctgacgcggaagatatgggatttcgctgtggctgtagtccagcgtatgcgtgtcgcaaatgaccatgtcggagagctgtagctatcatcgtatattccgacatttgcaccatactcagctcttggaacgataatcaatctgtatcgtgggacgaacgctccatatcagcctataaaacggtacatagaggctgaacataagtgtggatatctgcgtgctctagaagctacactctcgtgcttaagtcacggagacgctaaaattcccacttgaattctatccggacaaattcagggtatctgcttaaacttgctggaagcgacaaagaaacatgactccaactctgaagatacttttaaaggtcatccgaatacccgtaacgactttccctctatcaggccatgcgaggtctcctactcggatggatatcgcgtagtcatcatcggt

SEQ ID NO: 10547 - DNA, 2251 bp, Emericella nidulans
gaaaatcggcagcctacgaatccgctaatatgcggccctgccattcaagcaccgtgacaagccgtcagcacgtgcacagggtcggaagcagaatgcggggtgcgaattttcttcaggacgaggttggagggcagctccgagaggatataaggaacatacgtaacggtgatcgctgtccagtcaaacagcctatctaaacagtgttgggtgaggcgcgaacgtaccgactttatactggtagtcgctcagattgagatcggtatccaagccagcctagacagtcagccagcagtcagccagcaggtccttgaaatataggcgcgacgtaccactcgggcattgccgacattcgcgcggtccagccaggccagcaaatacagaatgagtgtcatgggcatcaggatcaggtcgagtcggttgagagtctcgcgatcgagctggcgctcctcctctgtgggaacatcttcgacaaacagctcttggggttttcccgaatcaattgcactcatattcaaattactttgagaataatggtcctggttgtcgtaagtacagcagaaggggcctgttagggcttttatacaatcccgcaagtgcctgacgactccataggactaccccatagagctgccaagcgtccaaagccgatatgagatccgtggcggggacagcttcttggctgtcaagatatgggcacttgttgcgagctgatgggtgggttgagtggactccaagtggatgggatacgccaggaggatggtgactatcacgttcgcatagggcaaagccatcaggatacccctcccccacacattattggcggaatgcggggacggcaggcgaaggagggtccagactctgatgcagactctcagtagtgcctcggcaaaggcatcgtctcggtagttgggcctacccgatcccagcgcttcacttggctgcagtatcggtgagaaactggtccaattgacgtataacggaatgagccgcgtctgtccgcgtctgtccgcgtctgttgtttgacaggtcgttgatctacaacgtcaaccgcggtctttccgctggcgcatcatcagtatgaagtattagtatgttgatatgtagtttaaagaactatttctcgattatgctcgccgatcaaaacccattctggttcttcagcactggtctggcttttcgctcgaatgagatcatctccagtgacacccgttctctcatacctaaggatactgctcctgctcaatgaaaactgcccttatacccattatatctgggaggcaagctgaggcacatcgatgctctggaacgctgttcgtcgtagacagtttcttcatacacacaactgtccaggcttacactgtggcgtgcgctatccaagcgtacactgtgatgtgcgacttgcatccaaacttagaagaaacagtcttgatgtcctctttagacttgcaattgaaccagttggttagtcatgcctaccccaattacaactagatgtgaggatctgtggaatgatgctgaaactgactgttcctgaggccaaaacagcttcatttctcccactcccaacagcaaccctctttttagatccttatacgcgcttgcactactcttttgcacctgccaatattcctaaatgttctagtctctaatcttataagtacttgccttcagcagctttagtccatctgaacttatagcctagtagcccaaaatggcctccttgatcgcgaatccagctacttagatcttatcggcctggttgaatactgtaaaacactttctttccatgcttttgttcctctttccacacttctacgctcgtggtttatcctgaagcagttacttaggcttagcgcacttctctacgctatttcgttataattgccttgaggacgaagcgaagttgtgctcataaactgcttgcatattgcttgcctccagtaagcccatcttaacgatgccgtaataatgactgcaacggcgctcgtaaattcacttcgacctcgcttcatcaactcgctagcttgtttccctcagtaattaattaaaaataaagccgactggccgaggatcagcaactatgtgtggacaaagtagactgtcatgatattgcttgaaaggtacgcttttcagcgaattttccgcactcaggtcttcattggccgattaccatgggccaccatttcgttgtagcaagaatcctcctacatatggttaggagttcacatagataattggtctcagatataag

SEQ ID NO: 10548 - DNA, 2235 bp, Emericella nidulans
  unsure (1)..(2235): unsure at all n locations
aggtgtgaaagggtatagagaatgcataatacatagagaaacaaatgatatgtttgatggagagaagtttagtaggccatagagaaaagataagagaaaaataaattaaaagaaatattttcacaaagggccccataagggtttttttaaaaacaacgcagcccaatgtttttgtgacagggcaacatttttttttaaaacaaagttggtctagccccacattgggcagtggggcccactttcaaacaattgaaaccgccactcttttccaattaaaggaaccccccgttaaagcacaaccggttgtgaaagctttcaagtggccttcatacctcttttctctggctcaataccaatataatccactcgcggatgctaacgtcaatattgaataaacccagctctatcattccaatccgcatctcgccgttgctgtctcctgtcctctcaggaatttttcttcccctatattcgtcaataaagaccattcgccgttcaaaagcgcaagatgctaggaacgaccggactgctggctcttctgtccctcgcctcggctacaactgtcatccctagacagaccagtagcgattccacagcttgcaataacgcagccagcctctgttcaaaatcctacggcgacattactcatctcggcgcgcacgatagtccttttctgcgagacgagtctactggcaattcgatatccggcaaccagtgagttggacaatctcttaaattaattccgaagccgcgaggagctctttatccgtactttgggcactaactttggccgcgtcttaggtattacaacaccactgttcaactcgatgccggtgtccgcttagtatctgcccaggtgcacgacagtgattcccaatggcgactgtgccattcgagctgcgaccttctggatgctgggaggcttcgtacgtggttatccgaaatcaagagctggttggattcaaatccgaatgaaggtacggcttgtcggcggttattgcgaattgggatatttatactgaattttgtcttagtggtaacggttttgctggtgaattcggacggcgcgacggcctccgaccttgctgcggagtttgaggccgcggacatcaccgactatgcctatactcctacatcacagtcagcgccatcttcgtggccaacattacaagagttgatcgatgccgggactcgtttgatgactttcgttgcatcattagacgacaactcaggcgctacatatctcatggacgagtttacctacatcttcgagaactcgtacgacgtgacgtcgccatcgaacttttcctgcactgcggataggccttccagcgttaagggtaatgccgcctccgccatctcggccaacatgctccctctgcagaaccacttcctctaccagacgatccttctggattatcaggcccctaatgagagctacgtcggcaccaccaacgccccctctggcggcgaaggaaatcttggtgatgcagcatctacctgccagactgcctggggccgccaaccagcctttatcctggtagatttctttgacaaaggtccggccatagaaaccgtggataaactcaatggagtcaccaatcctgttggccgcacaaatatcaccgctgttgctgaggacgaggagagttcagcctccacctattcgaacgtgttcaaagggttggttgacctcgtccgcagcgcacaggctggagctagtaccagtatgggtgactggatctgggctggcggtgactgggggagattttaggcggaggtatcgctcttcttagcatgggtgatcagcacgaccacttcttgtttcttcgatattaatttcctcgctcttatgcacctcacttgatacctggtggatagacaaagcattgcgtagatgcctgcatgggacgcgcttggtagccactgagtgtcccaggggggcttggttaagtgacatttgattgagtttgattgtttaagagtttaggcgtggttgccccaacaggaaggaacggcaaagctctgaagctctattgcggcggaagggattgtgaccatggatttttcccttccacagagtattccatgggtcctctttccatcctattactattctctcctctccctcaattactccctcaactattctcatctctttattcttcctccacttcttccccntccatctctgctgtgctctgtatctgtactcatcacccctcttcctctctt

SEQ ID NO: 10549 - DNA, 1759 bp, Emericella nidulans
ttgcccaaggagccctgtgcgtagtttgtttttggctgcttggatcgcacgcttaggcgtgttgaagattttcttaacgcttccctccccttctggtcccccacttcgtccaccgaagatttcctcccgtaggccgctgaatgtagggcatgcgagaaggatgtggcggaccgattgtgtcgctcttccgcattggcaatcgctgtttggtacatccggtactcctctctgatagagatagtggcggagtccaatcttgccggtgcgcatttggacaattatcgtgctcagcgctctgtgtaggtcctgatgcaccctgaggaccttccttgttggtgttggcgttaattcgtatagctcccggccatgatggcatgatttccaatcattttcccatcgggcattcacaacttcatgggcccttctcttcacggccgacctaatggtcttgagttagtgaggcttgggcgctgtctcatcagtcatgacctctaccattctgcctcggtggccccggatccgtcgccatcctgttgcctcctttgctctccggtctgcctgttcgtttccctcgacacctctgtgtgcgggaatccaacgaaagtgaacatttaatcccgccttccgccctttgtttagcgccattataatggcttccaggatatactgtcctgactgactgcccgggtttcgtagtgcttggagcgtagcctggttatctgtgaagatgactgcgtgttgcatttggcgctggagaataatcaccagggctagcaggatcccctgtagttccgcgacgtataccgttgactccgattgttgccccatatacgacgagcgcgatatcagatatttcgggcatattgcggctgctcccactctaccgttgattccactgccatcagtgtacagtgctatagggcgtggtgcgcggttcagtatgtttcggtgtgtctctatcgcggtctctgcgtccccgtcgattattatgtctggggagacccagtgcggcgcgacagagaatggcaaaatttgctcgaggttcctgaggctgtctttcccgatctccctttctgtgaagtcttggatcttctccaaagggctccagctccatggccgccacccgttgcctaggtgtccgtttccgatatcttctcctctcctcaccctttccaccatgtccatggctgtgccagtatgaaaccagaggatgtcgctatcatctttctctccaagagcgttgctctgggagtaagtgtgccgcgatgttaagccccgcagatgccgtggcccggaaagcgccggtgataactcttgctgctgtggtttggatttggcttaacatcttcagtcggctttggggatgtccgcctccagacctgagcgagtaccatgccgagtgtccatatagcattgctggactcactgctgcttggtatagtatgcgcaattgcatcaggcctgcgccccgtgttgtccctgccagcgttgccaaaggcgccagagcgggggttgcttgcttctggatgtgtctgaattggtgttcccatcgaagtgactgaatctactacaccaggtacattgccgtttctgtgggctggacagctcgcagatcaagggttccgcttctccgccagtcgcttgcgggatggagagggtgcttgggtctccccggacctaggcttcgggggcggcggggaggaacattatgagaaaacgatgtgtcgagaatcctttccagaggaggtgttgcggttta

SEQ ID NO: 10550 - DNA, 2081 bp, Emericella nidulans
ccgcatcgcccattgactctcgccgtcgaattggaagaccatatcttacatgaattgagaatggcaagctctcagcaactgggtgtgcccaacgttggacgttcttaggaaccagccctaaaacgacttgacattgacctcggctgcgactttagatggccacccagctgcggtgtaacaatgtgacgtctcgatggaatgtcaactcgaggttactttgatctttgtgcctgagtaaccgtcatactattgggtctagggaagcgaagatggccaagaaggcaaaaaaaagaaaagggagaccaccgcttttttgtcgacattatagtggaagatggtaggcagcaagccaaggagaaagacattctttgaaaagagattcgtacaggtttctagatctaaaaatgaacgccagcgatgcgatgcgatgcaattgtccctcccaatgttgcttgcgtgaggcgaagctccaaatgttgtccttcgccccctgcctcatttgctgcttttcgtggcgagctcctccaacatcttataccgccactcatactgggccagctgcttcttctcccctggagaaaggattttgcctttctctgtcatatccttctccacctgcttcagcatttcccagcgcttgatgatacgggcctgatgctcggagatggatataaggttggtatcgtttgaggcaagccgactttcgattgttgcgtggtacgaaagctttgcgcggaagagtgccatgtcggattcgtcgtatacgaggccttgaggctcagggagagcgttcttattggaaggcttagaaggcatcttgagtggtatagttgagatcgggttgcaagagtctaccaacggactggcttgtataactgcagataaacgacgactacctcttgtccagttgctggttttcgtcggctttgatagagggccaaggcttgtttggaggcaatttgatccacgaagctggaaaagatgagatattatggtgaggtttttgcagatttttcaaatgctcagatagtcaggtgcgatgatacctcgatttgggaccggatgagactcggtttatatctctttgcctgctccatagcaaccatcagggtgataccaaacaacgcgcccaatgctactgatagcgatggcacaacgaaccggatgcgatcgaacttcaccgtatgtgctgttctgttcatcccgctcgagggccgtttgtgccaatcgtcttgtggctcctctcttgagaccggccccctgggtagggacaggctcgtttgatcctgaactgtgacaccattatgacaacttcggcgcaaccttagagtcggtctggagatcagggtacccattgccgttgtttctgggatctgccagcagaggaacgagtcggtgagaatttattgtctatgaatacaagacacggagcctgggcagaccccatgaaggaccgctggacccgttctatgcggtgttttgtgcatcttgagcagtacaaacgcacatgagatttgccgaaacttctgacagtcaaatgcagacatgcccgaagcatatggccatgcgacgatttgtccgttacacacgcaaaattgagtccgagaaaggccgagagggaggcagcctgtccattccctaaatcaatatctacctggctagccgattagctcgttcttcggttcccgaaacgagtctaaaaaggaaacggcgactgttttccgccgactactcgtcacaaacgaacgtgctttaggtgtcagaactacccgcgtgggcagcagcttattcgagaatcaccgaggggcacattttcttgatcatcctttctaaattcccccattcgtggccgtttccgaacggcctgcatgtagccgctgagtacgttgttgtatcactcttgcggcagtgaggtaccaccgggctaggaggccccatctgaagatgagctatatctgagtatcttaggcattcagaaaagcgcacgagtcgatgtctggctcaaaggagtccctgagattccccagctggcttgtcattaccaacagatgcaatagatgcaactgcacctgcgcccgttc

SEQ ID NO: 10551 - DNA, 2083 bp, Emericella nidulans
cgcaatgattcctcgaaaccaaaagatcatggtgattgtatccacggccactagaacccaacgatgcgcaattgcgggtacaaagatgggcgctaggatgaagtatgggacgacaataaaaagagtccatacaccgttgaagagcataaagttgatggtatcccaccaatgaccatcagttacatttacagcttgggagtgtcagcgcatgtcaaggatgtctgttctgaatatacgaaccatgtcctgtgaggcccagcacaatgacagcaaagactgcctgaacagcccgtaaaatatagaacaaagggaaatcgaacttggccattttgttgggggctggcaatgttgtttgggatccgatactcgccgacaagagtgttcctaatgtacactgggggagaggcgatttatagtgacggcaggtgtaccttgaacagagtacactgtacttgagttgaaatgaagaagagggagaagtcaaccggtcgccaaaaaatagagaaaagtgaggtcaggtgcagatgcaggtgcaggactggagctttttaaagaaatggcaaccgaagccgagctgggaggtgtaaaaaatgagctcataagcagagctggagctcgtaaggactcgtatttgtagccacaagccatcctatcttagtcggagcgtgtgattgaaggaattcggctgccttgcaagactagttgtggctcggcgcgtcgaacacgagacctgaatatgctgcagatcgccggtcaagaagaatgatgatctcatccactaggcttcagctttagccagctttagcctcgctaataataactgctgctaaggctgaaggttggacgacgttaggctgctctaggatagtctcttggcctgtacgataacaatgcataactatcgcttatgcagtgtatattatgcagaagtatgttaaacaatatactcttaaatagataatatataaattttatcactagcctcgcccttggatcgaggatcttcaaaaaggtccactgttgtaactctagccccagaccctagaaataccctagccgagcattgattgcttttagattttatggtaggtttactaacatgattacaatgtcacttactagagtgctctgttattatccgtaaatactcggagtcgaagatctggtcccttcctaccgatgcgcctcgatccccctcttagccgcatgagattcctaccatttatgtcctatcgttcagggtcctatttggaccgctagaaatagactctgctcgatttgtttccattattcacgcaattacgatagtatttggctcttttcgtttggcccaggtcaattcgggtaagacgcgatcacgccattgtggccgccggcgttgtgctgctgctattccccgcatataaacaacccctccaccagttcgttgggctttgcgaatgctgtactctatttcaagttgtcaaaagagaggattcaaaaaattataccccagatatcaaagatatcaaagccatcatgtccgacccttcaccgaaacgtttcgagaccctccagctccatgcggggtactcatccctctctgtctcatatatcgattccagcacgtactgattaatccaaagccaggagcctgaccctgcaactaattcccgggctgtcccaatctatgcgacaacggtaggcctacgtagtggctcccatacttgaagacgacatgaagtcactgattgcttatagtcctacaccttcaatgactccgcacacggcgccaggctttttggcctcaaagagtttggcaatatttacagccgaattatgaatgtaagcaatgcttggtcctttgcatttcgactgctcgttgtgactgaatgatctactcccagcccacagtcgatgtcttcgaaaaacgtattgctgcactcgagggaggtgtcgctgcggtggctgcctcatctggccaggcagcccagttcatggccatctctgctctagcccatgctggtgacaatatcgtttccacaagtaatttgtatggtggtacatacaatcagtttaaggtccttttcccacgactgggaat

SEQ ID NO: 10552 - DNA, 1867 bp, Emericella nidulans
aacaaagcagaatgtcagcgtcccgacagttggtcgcgcaaacctagacagagccacttaccagcctgaaagaaagaatacttcttctgcgtatctgggggccagcaagcctgtggcccagcaaggctgtggtcccagatcgccgctgtcggctggcattgggcgaagatcgttatgacggcaccggtattgattatggtcatgacgataatgagcgcatacatccccagcttatggttcttgacctctgagataatccgtattaagaataatgccacagaaaccttgccccagttggtgctcatgacatggaacccggccgacagaacctggtattttattgactggctctgttggtattcagtgaggttagaggcgtgcggccggtgccatattgaacactgattgtgacgagtatggtgttgatcgctgcacagagaaacgcgaggatcatgaacgcgtcgtcccagccaagggagcggaccatgtgcgcgcgaacccagaggcggagggagatgatcaggaagcagatgccaaatagcggccaggaggcggcgtagaggacccagccgtggtcgacgacaagccccggctctgactcgagcatcgtccggactctacaccgtgaagcggtaggggggagcctcgttacatggcatcgattctgacggcacgaagaatgaggagctagtcaagggactgagggaaggcggacaatataggcctccagacttcactaagcatttggaaatacgaaaatcgtggttcgacaggtggcaatcacaagctcacaatgcatagggggtttctaggaaacaaactctatcttgaagtttctgttgtgataatcggctatcttgccatttatggtgaaaatatgcggggggactgccgcatggaggaaggctccccacagactagcaaacccagctcttcggtagttcctcggttttcgactgcagggcccagtttgctggccaatgaccacgggtgaaatgagctttggagtcatgatcccatggtttacaccaacttgctgactcgtgtctggaaactagaagagcctctgatggctatccatgaatcatgttctttttatcgtaccgaccatttagccgccacagaaatcgatattatggtgcagacgagacggcttcgccaattgtaccagtcctgattactttctaagatttcaattgtgaagcacttgggccgttgccgagcctgctgctccactagaccctggatgcacatcgctatccactgtccacattcaaaatttgggcaaattcctcactggctccgttcgtccaccgctcggccatagtcacagtgcctacattactcctttatagccatgtgcgcaccgagaaccacctcgagagcagtcatatatgcttcttttctgtgcagtgattgatatatattgcttcacacctttgctcagttaagccacggcgtagcttataatcctctgactatccttttctgtggtgaagagtagagtcgacaactgtccaagatgctgtgcatcagagatcatccctataggcttcatttcagtcgtgtcactattatcttcaaacaagtcatgtccgattttctgcatgacttcattcaagttgaatgtccttcagaaagctattacagtcggcttgttgacgcatcctgtcgctagcaatgatacgcagagaactacgccaagtagttcttgctccctcgaaacttgtccatagtaacccaagtttctagaccagcagccacttttctcaaatttttcggcttctcatcccatttatacagcctctgtctcacgcggtaggtatcttattctcgaacaacccacgagggttttcttaatctccgt

SEQ ID NO: 10553 - DNA, 1293 bp, Emericella nidulans
tcagcaagtcatgtttgactttggattcaaaatttaattcttgctgtctgcgtctaaccaagggagcggatcggtccccaaactgaactggccggagtctctggctttcaggatcgtccttgaatggccgatgcctcaccgcttctaggaagcagctcaattcctaccctcgggccggaccgctaaaggacagtgtggaacactttacgagctgtcgagttgaggtcgaagcgcacgaggctctgggtgacacaagtgccgacgaggcttgtacctcagggtctgatatccacatgctatctaccggcagttaccgaactatccagcaggcatgggcacagccgcgacggaagaactcatggcagtgattcctttcgcgccctaagattcaaggcccacgaacgccccaaaaccgatcggcatgggcccgcgtaaggatcaaaaagcggtttaggtcgacccaagttccaagctgggtgcgtgtttctaaccgagctagcacttttgatagtcgagaatcgagatccgaggttggaccagatgctatccgaaacgccaagttaacggttttttcacaggagcattgtttcggttcactgtccttggatcacagctgttattcacatacgggttggaaatctgacattattggcttagccatgagctgaaccggggcgcgggcgatcttggagtgatttggcacctgcgggtgccaaaggaacaaggtagattatacgagcaagccgctaacagttctagagatgtggtggggaagtctcagacgagccatggcaattccgaggcgggctttggagtttcgagttccgactgcccacccagtcagcagtcataatctagaacgatggtgtgatgactacttcgtgggtactgcactattcaaatctcgtctagcgctggcgagaagacacgagagaaccaattcgacagcgtcagccagcatgactgtcagacagttacgggtcagactgcgactactgtccaataaaggccagagttagatcatgcccttgattgaggtcaggcaccgccttaatctcgaattgctaatctgacccatgacgttgagagaacaggttggcccgaactcaagtcaccccagccttccaccgacttccaccgattttcctctacggggagttgcgatctcagtggccttctggaaaagacagaccccacgcaggtcctttgttagtgaaatgtgggccgaggaccagctggctttggatgcttggaaaccaatgccgctgctagatgaggtaggaagacccaggg

SEQ ID NO: 10554 - DNA, 913 bp, Emericella nidulans
  unsure (1)..(913): unsure at all n locations
tgcgggcttatcggcgctgaactcgatagtccaatccccaagaaggtagattggtgaatgagaacggacgaggcgacgagcgactagaagttcatgttagctattattatcttctttaatcataatattttcattttcattttttatattttccttctacatttaatatctataattattttcctttctttattttatttacttctaatttatcatttatatacaatttcttcctataaatattattatacattttattctctactaaacttattcacattttattacattcatatattaatatttaatatttttattccctcacttcatttattttattatagtcatatatactatacatcatacatctatttattaattttcaatacaataactatccttaaaaatactcttaaatctattttcatttatactctcatatatttcaattcattatccccttttcttacttatttttctttaattattacctttatatccacatcctcaatttttatatacatttccttattattactatacttttatctcaattattattaaatcttatatacttactctattcatattcccacctcctctcttcattcattattttttcattaccccttctcttccttacaattattcattttttattttataatatctaattacctcaatatatttacaattattattctatatctacctcctcttcctacatatattttaatctaactctcatatctatctatatcatctacattacatacactttttattatactaatcttttacccaactatatcaaacccttcttcctatattctccatcccntccatattaatttcttttctatttccctctcaatcacattatatcttctatactacacattcaatacattat

SEQ ID NO: 10555 - DNA, 914 bp, Emericella nidulans
gtgagaaccaccatcctaacgaagcgggagtgtccctagcaattcctccacttcgaagagtgctttccccagaaaatccgaatcatcgtacaagcctcttggtcttggggtcaacggcccacctatgagctaaataacgagaaacccttctattctcttgacagtttgttattatggtgcaagggaaaggcactgtcatccttattgttgcagtcgttttcttggccatttctctcacgactgtcttcttacgatgcgtcgtgcggctttggattgtgaaggcatttggctgggatgatggtttaatgctactggctatggtgcgtcgaagcccaaatcgcttgaacgctcaatggggttggattcagagctagaactgaacagcaggcgctgaatctcggattctccttgtgcgggattattggaacagcttatggagtagggcagaaaaacgattattttgagggcaatcttggtgcatttcggacagcaatgctggtacgacatacttctcccttctacttaatccaaaactttcgaaaaccgagctaagcaggttaatcaatttgcgcagtgctggtggtggggagaactcctttatgtaaccacagccgtgaccgtgaagttttcgattatcattactctacttcggatcgtgtttgagagaattcacaaatgggttctctatattgccgcggccgtgacgacgcttttcggattactactctttttatttttcatatttcagtgccatccaatttctgctttctaggaccatgggaggagggacatgtgtgctgatacacacgtcgtgatcggagttgtctatgccttcagtgctggtgaagccctgactgacctcactattggcatcacaccatggtttgttattcggagattgaatacagataggc

SEQ ID NO: 10556 - DNA, 1220 bp, Emericella nidulans
atcggcggagtcaaactccgtctgcttggactgggaggtgcggttgtaatgcataagctatttgataatggcgagggcaagacgactattgcaggaggccagggaaccatgtggacgactctactgcagatgggcgagctaatcgacaccgcaaatcgtgtttacgacccgtcggagactcgtatctttgttacccacgcctcaccggcccgtgaaggaatgttgaaccagctttccgtgaccctcaaagccgacttctcgatctccgccggacttcacttcaggtacggctcatcttacaatgagttctctgtcaatccctcgctcgaccactaccggggcaagctagccgcgtctaaggcctctttcaacgatgtgtgggaaaccgtgcggggtgaagtcgagtccgctatatcccagaacgacgctcagaagactctattggagaatgcccttggtgtcgttgagaagatgccatcagtggccagtggtggaaacccctttggaggaccgaccaaccctggtagcggcagtggccaggtagacgagagcgctttcaagaacatgtggaacttcaatttggccgatgctgctttcggattcttggtccttgaaatcgaggctggacgtattggaacggaaatgcgtgctcagggcttcaacttttctcacaggaccggcaaacctccagtctctggagctccccagcctgccgctcaaatggccagtgctcctgtcagcggtccctcccctgttaatgctgtacgtcccaacgttgccacccctcaatttggccaggctcaggctatccctactcgtgcggggcctcctactcagcagcccgcacaaggcaaagggcccgccgctcccgctcgtacgtctcctgctcccgtcatccctaagtctgtgacgccccagccctcgacgactccggctgtctctcaatccgttgactccgccgaatcttcagctactcttgacgccaacggctccacgcatggcgagaagcagagtgaatctccggcccctaagccggagcgcaagcagagcaacgccctcttcatatcaaatgtcgataacgagcaagccgcacgtgatcttttcagtgaggaggacaaagctaagctgcagaaggtggagaaatggggcaagtataaccatgtcgccacattttcgaccgtcgaggaagcaaaggcagctcttgatcgccttccaatgga

SEQ ID NO: 10557 - DNA, 684 bp, Emericella nidulans
gaaggaaaaaagcaaaaagaggcaaaagaaggttcggtcttgggctgggtctcttctaatcaagaaaggaaaatcacacgattcgaagaaagacgacatagagagcaattctaataaagtaactcctcctgcacttacccgaacaaactcggatttcggctcaggcttggatgtggaattcgacgatgacaatattgtcgtaattcggacacctaccaaccctgcgcatcccgactccaaccagaccaccggtgagactgaatcgtgggcatctctcgagaactcgtggaaaccacgaagcttctatgagcaggttacgacgcccgatactacgagtcctgtgattgatctggatgcggcccttggaccttttaatacgcccgatctacgctccggtcgtgttccagaaagcggtttctctgcagcaactaagcgaatgtatagtggcggacggcgcggcgagtttgttggcccagaaatgcggtatcaccggcgtgctgaaagcgcaccggaaatgcctccgttcgatcgagcgtttcttgggagccaccgctttccaactacctcttccttggagaatccagacgtcttctatgaagaggaggaggatgccttcttagcagccactagtgattccgaaaaagatagcgaagaacatttacaagatcaagctactctcacgga

SEQ ID NO: 10558 - DNA, 2454 bp, Emericella nidulans
gttaaggtcgatgcaccgccgccgcctgctcctggcgagggaaaccttgctcgagaaacgcgtgcgccttctaaaaccagttcatttcagaagttgcttttctcgtctaaggagacattggatcccaaaatatcggaagctattgaccttcattcggcacccgaattcccgttttcccagccgccaaacagttcagagcctttttgtcgcctgggtctaggcagctcatcagcgcgctcgtcgttttcttccgcgttgctgacccctgatttacatagctttgaccccatggctagaatcgacgcctcgaaatcagcatctactcaacctgaagcctccgtttccccagattccggcattgcaagtgaggttgaaacgacaccgcagccccaagagttagacagcacgtattctatagtcatcctttgcccgttgaagaacactcgcaaagcaattacacagcatatcgagcaagtggttccgcatgaaatacaacactcaatcatatcgtttattgatgtcgaggactggaaggactcagcagactttgattctggttctcgtattactcacttagtcctcaatctgcctaatgttgatgaggttctggaggtgattaattatgttgcggctcgcgaactacatatggcacctactcttgttatcatatccgacctctatcagaagcgggaagtcaacgcacatatcaagcagctttctgccagcggaaagcgcgtcttcaccgttccgaagcctgtcaaaccctctgcgttttcgccgatattcgatcctggcaacaggagagatctcagcaaggataggaaccaagatatggctcgtgcaattaacaataactttaagaccatgtctaagatggtgaaagaagtaatcgggaacaagggttaccgggtgttgctcgttgaagacgatgaaacgaaccgcatggtatgtcaattcggaccctcgtactggcaatatggctttactgtattcacagattttgctgacaaatcttaggttatgatgaagtatctcgacaagatcaaggtcatggcggaaaccgccggcgatgggcagcagtgcacagacatggtattctctaaagaaccaggatactactctctaattatcgtgagtgtacagcatattctaatcttgaagcacctaactaaaaattatatagtgcgatattcaaatgcccattaagaacggttacgaaacttgccgcgagattcgcaagtgggaaatgaagaatcattacccccagataccaatcatggccctttcggcaaatgcgatgacggaccaaattgaagacgccgcacgcgccggcttcaatgactatgttacaaaaccaatcaagcacaacgagctagggaagatgatgatgggccttctcgatcccggacgcccgctgcttctcctccgcgatcggcttaaggaaggaagtgaggaaagacatcgcactggttaagagagctacagccaatggctaaaaccagtaacgtcctatcaaactcgcgctgcggatgcgccaccgaaacgccctagctggaaacgtcctccgtggacatgacatgacgtttctgtgttcttttgttcatattgcctttgattttacggccacggaggcctgcgcgcaggaggcgcaccgggttgatttaaggctctacttccacttgatttgggcctgttctcgtccgcttgcctaaacagtcgcggacttttctcgtctctttctcgtcctttttctcctcttttaccctcgtgcatctgcatttggctttgcgtgttatggatacctatgagcatcaagggggcctgcaatttcaggagtattgttcttttggacttttcaacccattgtatggcgtcaatttccggctttgatcagggttgcttttgtttttcttgggcagtatctactacctgctatcttccatcatcttcctcttcctgctgtcgcatgaattaccctgaacgacaggttattctataccacattatcttcttaccttcggcactttgtattctcacaaacatgcattttttctgccctcttcaagtacctcatactctttttcgtgtgcttgcctttccttacgcattgctcccctttccgatcatggtttcatcttctctcttggcccgagtagagaaaatatcttttgctctatatgattgattgattgactgtttggtgatatacgttgtgctgggatggttgtttagatatgggggcagttatagttgatacttctgaaaggatacccgcctgagatagcaatttgacgcaattcttcaaccctataacctatttggtcattgcgaaaaactaatatagcgtgaaatgggagggctccccagagcgttaaggtataccaacgggtatttgatgaatttatgaattattgctatgttaaatagacgtatctaaccatcgcttgatgcttt

SEQ ID NO: 10559 - DNA, 1378 bp, Emericella nidulans
ccagggttttttttttaaaaataacccccccaaaccttttaaaggacccataaagggccccccccaaaacctttttaagattcccggaaaaaaattgggggggtttttgggttttttgggggcaaaacctttgcccctttttagggaagcaccgcgaaaatctttttttttccgggggggtgtccaaaagggtttggaattaaaaatagggggaagacgcatctccaaggaggccaaaatgtccagtcgactgtcttattagtcaatgcctgtgttgttaaaatctagtcatccaaccatccaatacaacccaagacaggaagatcctgtcgccacttctgggccatcacgagacccattgtggtaactcaaatcagagcgagctcgtgccttggatgcagacctgtgaataatgcaagttatcccttgacatctagctgtatccgttgtaattgatagatgctagagcgctgagataaagttctaactaccaaggtgcttgcatgattcgctgcaatcgtggcctctagaagaagcaatatgcgaactatgtcgatctatattgtatgcgcatgcactgaaacggaatccactccacccaccctatccaactgcgatttcaattgatggacttactgcgctcgggcccataaactcaatcgagaatcaatcagatcgccacgatggtcgagtgcacgcctatatcgttgatcgtcgctccgtcgatgggtgatgatgatgatgggccgtggcctagccctgtggcatgactcgaacgtatcatatgcacagttgatggtagtaatgaccgctgcaggggtttgctctcaaatcatgaaactgatttgttattctgcatttgatttatggatttgtaggaagttacctagattgctcgaggtcgagaagggaactggacaggctggaagaatacaccgtacgcatatctactcgaatgtccatgcagtcagtcctgtgacgattgacctacggtgatggttgctaagacccgaacaagcccgtaagaaacaaaaaaaaataatccgcgtactagtagtaacttcatagaaacgtcgcttaggcatccttgatccatgatccataacctataaccatgattcgatttcatcttccaggacggtcgtgcaagctttcagcaatcggtcccggatgccctggttatgtactagaccttgcagtcgtgcgtctgacctggctaggatcctggatgccagccgaacgccgttctgtgatctaccgtcgttggcgattgtcagcaacttctctttgacttcccttgtataccgaaaggtgataaagagtacaagatctgcgcattacgccaggggccagtgaagcgggcctttcttcatgtagg

SEQ ID NO: 10560 - DNA, 647 bp, Emericella nidulans
tttggcccagcaggacacgtgtcttcatgggaaggaggagtgggtggaggtgctcagtcttatcagactgcggcgtgcttacactaggggggctagagagactgcgctctgacagcgttttggatgctgtatactgcgatggtgatggggacgctgaatgtaacgatattactgtgacctttatggatttacacctttctgttcatagttattgtttttgtaattattcttttcttttattcttcagcttgttgctcgatcatttttgctccctttacgtgtactggcctacatttctatatatcctccttgtatgctatttcacttcatgctctaatccttcaactatatcctctatagctcattactttaaccctcttctatttctcattttattctattatcactaactccaatttatatatttcacttctacctatttatttatacatatccttcctttcgtacctctaattttttactttattaccttctattcattttattactataacactttcttatatcatttctctaaattccatctttatcttctattatcattcttttttctcttctttctatactttatattcttctgactttatccgtctcttccattttctctctctacctctctcctcttt

SEQ ID NO: 10561 - DNA, 2028 bp, Emericella nidulans
gctcatgtgctataacgtcagaatatgctcgcttccctcccggacaatcaaatttgagatctgggataccgccggtcaggagcgctttgcttcgctcgcccccatgtactaccgtaatgctcaggcggcattggtagtctacgatgtgaccaaaccctcttctctgaccaaggccaagcattgggtggcggaactccagcggcaagccagtcctggcattgtgattgctctcgtaggcaacaagttggatttgacgaacgacggcggggagacaccagctgagaccgaacgcgaggcgggtacagagggcgacgacgctgacgacaaccaagaagagcaggaggataatacacctggagatgctcgcaaagtacccacacgggaggcgagtacgtatgcagatgaggagggacttctattctttgagaccagcgccaagacgggcctgaatgtgacagacgtctttactgcaattgccaatgccattcccgagagcagtctgaagagtggacgaggcgctggcgcaggcaccggtcagactacgctagggggtggcggccgatctactgacgactcaagagtcaacctgggagatcgcggcgccgcgacagccaaggagggatgcgcctgttaatatgtgtattaattctcttttacagataccgtgtccgccgcctggttacagagtgatctttgcgttttcatgttgttttgtggcgttctgacttgctatgctgattttcctgagctgtctcagcgacatgctaatggtatcattgtattatttgagtacatacattcgttagatacaccaatattgtattccattcacaaaaataagtcgtatactttgtagagggcatctaagtcacatgacacgctaagccaaaacaggcagaccccagctaagcgaggccgagcctccgatcccacagcgcccaaactccgccctcacaagtcgcaatttgaattgctctccgtcgaccaacccgccagcaaccacatcaaagggacagcaccccccagcagcagcacagccagatctccctgtctgcactacactccctttcaaaatggctgccatcaacaagatcgcccacaactcgccgtcgaggcagaacccttccgagctggagaccgcgatcgcgggtgctctcttcgacttggagagcaacacacaggacctgaaggctactctccggcctctgcagttcgtgtctgctcgtgaggtaagcggttacggaatttttttttttggttggacatctttgcgggatagtggaattggaagtatacggccatggggaggacatgtcaaaaaaaaaaaaaaaaagattggatagtcgagatcggtcaattggcagcgaatggaggcattgttgttaggcagtggccgggggagggtgcatacgttagaattcggttctgtgatgggttctaacattttcgattataggtcgaggtcggccacggcaagaaggctgtcatcatcttcgtccccgtccctctcctccaggccttccacaagatccagcagcggtacgcttcatccacccatcctctctataccaacccgccatgaacacgattactcttcgagaagggaatataatcaaactgacaataccagccttacccgtgaactcgagaagaagttctcggaccgccacgtcctcttcgtcgctcagcgccgcatcctccccaagcccaagcgctccgtcaactcccgcaccaaccagaagcagaagcgcccccgttcccgtacccttactgccgttcacgacgccatcctcgacgacctcgtctaccccgttgagattgtcggcaagcgcatccgcaccaaggaggacggctccaagaccctcaaggtcatcctcgacgagaaggagcgtggtggtgttgaccacgcctcgacgcctacgcggaggatctacgtcgtctgacgggtcgtgctgtcgttttcgagttccccagggtggtgcttctgagttttaaattatgcctttgagactcggatgctgggatgat

SEQ ID NO: 10562 - DNA, 1843 bp, Emericella nidulans
ccaggagagcctagaaaattccgaagctcgtcccttagacggcgagcagctagctgctcttcgagatgaaatcctcaactcagttagcgaacgcatcaccactcaaaccgctcttacgaaagacgaaatcattgaaggaatcaagggctgtcttgagaattcccaacctcgtggattagatggtgagcagctaactgcgattcgagatgaagtgctccatgctgtcaccgaatctatgacatctcaaagcgctctcacgagagattcttttgactctggtcttgggcgtgatgagatcttaagtgctgtgtctgatggtattgaggcacatatgctcgccgcaaaggaactcaatcattcagtcatcacaaaggaagacgtcacaagcatagtcaatgatgtgttctcagcccaacaatctgctcttacaactacgagtgctcagcctgccatttcccgcgatgaaatcctccaggctattgctgaagggcttgaaagccagaattcaatccctcgcgagattgaactcaacaaagaggacttgatggaagctatcactgcaggtctcaacgaggtaaccgccaatgcgaatcagggcttaggtgaccagatatttgagcgtctacaacagcaattcgaaggtctcaaggaagaagtgaagccacagccagcagccactgatgcgaacctggaggagatactgaacactatcaaggacagcattgcggtcgtacgtcaagatgttgaggggtacgctacgactgcatcggaagcatctgggaaatatgaaatcctggacacggtcaaggaaggcttccgattgctacaggcggacctagagaagacgatcacggagaacgcacttgtgactcgtgctagcagctaccccaacaccccagagctcctggacgcgatggaaaaagaatttgaacatctgcgccaaactttaagttccttgctccgcagcaatccggtatctgacaaggaggaaatccttgacgcaatccgggacatctcagagaaccacaaacccgcgaatcaggaaaatgtttacgagcttattcggcgtgattttgaaattttacgtgagtctttgacaatgagcctggttcccgccgagccgaagagcgacaaggatgacattgttgctgctgttcgggctaccttggaagccttccacgaggagaaaggtcaggctagaaatatacctgataaagatgagattatcactgccgttcaagcaacgctggagactttccatgcagagaacagccaagctattgtgccagccgaaccgaagagtgataaagacgacattgttgctgctgttaagtccactctggaagcttttcatgaggaaaaaggccaggctagaaatttatctgataaggatgagatcatcgctgccgttcaggcaactctggagactttccacgcagagaatagccagactgctgtgccagctgaaacgaagagtgataaagacgacattgttgctgctgttaggtccgctctggaagcttttcatgaggaaaaaagtcaggctaaggaagttcttgataaagacgacattcttgctgccattcaggctaccttggaaactttccatgaggaacaggaccagaataagaacggtgttgacaaggatgaaattattgctgctgttcaagcaacccttgaggccttccacgaagaaaagcatcggaccaaggatgggtctgaaaaggaagaattcctcagcgccatcaaggagatttcagagagccacaaagtaagcagcgaggaaagtgtctccaagatcgtcaagcaagagtttgagagtctgcgcgactcgttgaccatg

SEQ ID NO: 10563 - DNA, 1300 bp, Emericella nidulans
ttctcccctgccttggcctgttctcgtttgctttccgatatagatacactggatctgtcattggctggagtacgaatctctgacaagttctcatcgtttgtttcggtcaaagcagaagcctccatcggcttagaaagatggctactgccgttctgctgtggagcgccgttaacagacggtgagcccgcagaatctggagggcagtgttagtatcaaggatttagacatcccagtcaagatctttgacataatcatgtatcttcatgtgggaaatgatatcgacggacctgacacaagagcggcaattgaaggagtagatgacatggtaataatgagtcgactaaaggcgttgtgggaaaagtggttaccagaagatgctagattggtctgcaactttgcgaacgtcgcgagacgctggaagcggtttgacgtgcgaattatagctgatgatgaagttgaagtgggcgggaagtggtgtggttgcgcggtgacgtttatcaggagcgtctgcggagtaatggtaatttcggctgtccccctgtccccctctcgacctctaggagagcacgtccgcaaacaaggtaaacaatgcgcgctaaaagctccgaaacacagcttcgggtaagcatggtcaccttccaatctcggcgctcgttccaacgtcagcttgccaagagagtccatccttctggcatttggtgcgactggcctgtgaagtgtgatgcagaggatctcgatatctaaacctctaagtttagtcacaggacatttttgtctcttggttcctcatcattgctccggggtctatagctgtggaaaccgaacgcaagtccagattcaaagacagcgagaacaaaagagccaagccgagcttgtccttgggatagcatcagttgtgaaaggtaggtaagcagccaaactacgttcaaatggcaaattccggctctgaaagagggcgtaacaacaactcagatgaaaaatcggccttttgtgtttcgcgtagttcttgtgcatgctgctctaggaagtttgccaaaaataagcagtctctggtctttccagaatcactgagaatacgcagggcatcaaagcccacccgcacaactttggtacggtgctgttgaggccatgcagcaatagctgatggtgataagcgacgcaaataacggacgaagggctctgcatcaggacgagtcgggtgataaatggatatcacagcactctgaagcttaccgagcgccaacgcagataccatgttcgcatatttatcgtatacatcggccggtatagagtcgctcgg

SEQ ID NO: 10564 - DNA, 131 bp, Emericella nidulans
catagttggtcagaagagagacttgttgcgcaagacatcggagatcaaccgagtggactatgacttgctattaggctgcatgaggacttgtgacatgcggagattaagcatgtcccaggctgagaagagcg

SEQ ID NO: 10565 - DNA, 3084 bp, Emericella nidulans
ccaacctatgcccccgatcagggccaacgcaatcaaccctaactatcttccctggtttctgatcaatgcggcgacattcaagaaacattgtgtggttggacgaaactcggcggtggagtcgtttctgatcatcctgcagcggccctggtgtgtccttgagatctgctgttgcatcgaagctcagactatcggcgcggagctagtgctcgctaagttggctgctcagattgaccccaactcgtacgaagccgcagtgcaactgttgtctcatgaattccgggtgaggatagagccgttgaggaattcagctaatatcctcacctctggcggcaccgaaaacatgctatatacatcgcaatgctcggagaaggcaatatgcgacatatatgcagccgcgactcttgtcagctcgtataattcgttctggctgccgttggtatgctgctgcgctattgacctacatctgtctttttctcatgtcgtgaggaggatccgtgatgatgctggagggttgaatggcggaatgaactggattgagttgcatggatgtcttgttaggagaattggggattggatctaactatatgccgctcgttctatgatggtcatgaagccacaatattcgccaatggaccatatccctatacaactgtagaaagaagtcactagaatagagaaactgtctttctgcctttctgcaccccttggcattctctttccgtcagctgccttacctctccctatatagtgttctctttctccatattggcaatccactgctctacggcattctccatctgactactcagcctgagagccagatcttctgtccccctcctcgcagccatcttcgtctccccctcctttccctcctcagctatcccaatcgcacttttctgatactccgcatagtaagccgccatctgctccctcaatttcatctcgtctatcccactccgcaacccaccgtccgtttcaaccttccgctgaaatgcatttattcgagccaaggcaggctgcaacgctctgaacgccggcatgtttggcaacagacccaatccaatccaatcaaacccttcaaggcgacaaataggttggatcgcaatcgtggcgtcaattatactctgtgtccgcttctctcggtccgttaacaaggcatgcggaacaccacccttggctttcgtttgcagccaccgcgagatcttcgtcgcgatgatctccgccacagtcgcatacaccagcacagccagaaacgcaagctgcaggtatccatgcatattgaccatacacgcgatggaggagaacgccgccagggcgccggttaccatgaaactccagtgcaatgttgactgaagtgtcgtgggctcgtatttccacgttgtgcgggcccatgcttccatgttcttcttgggtcccttgaagatcaccgtccctccttcaggacgctcgtaggcagcataccgtggggtcgtatcttggtcaatccgtggggtcgagacgtgcaccattggcagaaaggtgatcagcgctgaggcgatccaatggctaccgtataggaagaagagcgtaaaggcccagatgtccgcagccagaataccgattagcatcgcggcgagaatcatcgccccgttaaccaggatgagggtgtacaggcttaaacgagcggccatccaccaccccagcccaggatcttctgctaagcgattgcgtcgatctttcgctatagcatggtcgtgatcacgaccatgaacatctcccgccacttcttcatccccaatgtagataaccataaagtcgtttcctgggttcaactccccgccgcgaaacgagatcaacccacccagccatccattactgaaatccagcggtagctcacggaaaacaaagtctgagcggacagggatcatggtgatatattttgcgcacatcttgattggcgcttctagcgacttcgacgggagtcccgacgtcacgtactcaacgagcatctgaatagccggtaacgtgcctccgaccatcgacatatgcggccagtggaacacgtcattgtcgaactggacatagagctttgcggcactagcagcagctcgtggattgtgtagaacggctgcgacgccgagagggtcgaaggagacggtgctctcgttgcggagggtcgctttaggtccttcagaagagaatggatacttggcttctactagccccgcgaatagaggcacggccatggcccggagccatggttctatcgcaagacgcggcattgcatcgcgtaatgtgcaattgggttcaaaggagaaaagcgcggacgagacgaagcaaagggatttattacttgctggtgcttggccaagctgcagagctgcggctgagctgtcagcaccaaaccgttactggtaaagactgacaatattcaaaggtaaggaagatttacattttgtatacaactagagtgtaggaaagacgtttgacaatgaagtcatttgtaattacagcaaaatataacagcagattagggagaatgagtataatatagcctcaacatacatatagctttagagttttaggctacatctgattggttaaaatatacaaccagggcagctttccgaggttcgtctacgaccataccagaaaccttccaatttataattacaaaaatgaaatatagatcgttcatctcaatatgtgataagcggtacatggatatacagagcccgattcagagaaatacaatagatactggaccatcataaaaaaaagccaccaaacggtgctattcaataagacattatataaaaagtcatatagaaagcgacactgacagaccggattggttctagagacacagtaggtatacatgtacagcatcagcattaagaagagaagggcctatcgttttaggtagagtaaatttacaaaacagcaagcagggagagcgcgagacgcacaagggcaggaacaccttgaccacatcatagcgagatccgcaccagtgaatgtgggagaggcacaccctgggtacgctagtgacgagcccgagcccgaagaacggggacgtgagctgatgcgacggaatgatgtgga

SEQ ID NO: 10566 - DNA, 176 bp, Emericella nidulans
tcaacgatgagtatcagcaaactgtgatcatgggatagaccacagctttcacgatgtgagctaaatgttcatctacggaagagcatcatttcgagctcagctcgacccgagatcaggtcacctaatgcaagctctgagcacgtccttggtccaagccagagaaccgtgtgactgtc

SEQ ID NO: 10567 - DNA, 806 bp, Emericella nidulans
ctacctgaatctatatagaccagtcgttggttaaccggggcccatacggccatgattacgaccaccgtgctcgtggtgtgatcaacattatgcgcccgccatacacctctctatcagttctgctcaaggaggagaagacacagatccgtgaatggcaggaccgcgaagccagggagctgcgcaagcgcaaggcaaacctctgggtgcagttgcccgaccgcccgatcacttaacagaaccagtactacagctggtgatgttgccttttgtacggttctatttgtactagtattctttggcgttttgtattatttacatttttgggagcacttcgttttggtcccggattcagcaatcctctgttcttatgattttttctgtagggattgtacctttgcggtaatacagacgactttcttctgttaattcttatgactttatttttctatgccccattttttgttttataacaatttccattcattttacctgtctgttctagttatcgttttttctgttcatcttcttcttttaaaacttttattttttatatatttcttttattttatacacttttttttttttcttttccgaactggtattcactttctttttttctcttttcatccttcttcctcccatctatcttttcacttttattttttctcttttcattatttctttctgctttctactccttcttctttatattataataattttttctttattaattctttctttcttatcttatctcatttttttttatattttcaatatttctttttttctatatcttttctttc

SEQ ID NO: 10568 - DNA, 3029 bp, Emericella nidulans
cgtaaccattcccgataaatgcacaacacaatttcgtctctcatatcagcactactccccttttccacaaagcgcccaccgaaaccgcgacaagaatctcctgaattaaaccaattttcccttagccagagtgcgcagacagaccagtacctaactgctcttgctcctttgaaaataaccgcatctttaaacgccattacaaagtcagatctaggcatgtttgtcgaaaggcatcagatcacgctttccgcaccgcgaccctttccacctaatgtctacaagattgacgtttcctacgagaccaacccggaaacgcagtccgtagtatctcttgcagcatctgtggatgggacgacccttaattatctgcaacaatggattaacgggcggctacaggacccgctcagacgattagatatttccggactatgctggggcatcaaccgctactgggaagctctagtgtcgcgggctcaaatctgggctcaaatctgggatcagcatccggctctgattccgagtcgaaacaaatcaccttctgtaaaggtcaattcagatattgatatacggcgaatattgccacacctcgaacgtacatccattctgtttaagtcaaagcagagaacccttgaagccctcttgtcgtgcgaactcaccatcgacccttggactggggagccggactaacgcccaccatatgcgtttcgatatctggaaacggcagcagctcagataggaaggtggagcaagagtcaaagaagctttttgaagcggttttgaatgaaagcaagaagcaacagctaggaactgcgggcggttccgaggctgaggctgtcgtcaaagctacgaagtgtgtactagacgttttgtttgggcagagtggtggtcatcagctttaaggagactgactttatgagtgtactacatgcgtttgtttttctttttttgtatgactagaatcacccaattctcagattactgaaacaaacgcgaggaagttacctgctgcatttctacgagccccatggctgggttggtagcggcatataaacccgaaatggtgagggaaatggattcagactttcgaattcattgtggtagttcagaaacaccttttatctctggaaaaggacaaacgaggaagaggagataggtaaagaggtagtagagaaaattgggacatcagccaattccaagccacggtacgccatgccacggtacacttaggttgtagaataatccccaatataaaaatcgacgaccagattcatcattagctgagaatttttgagcacataatatgttaggtacacggagcttatttcttagcggcagactcctcctcagccttagccttggcacgcttctcccggatacccttgtagcgggcctcgctgcgggcttcccgcagccggcggtatgcagcctcctcacccttgggcaggtcgtcgcgcttgacctcagtgacggcctcctcggcggtggtgttcttgatgggcaggatggcgccaacgttggtggcgtagccctgggtctggccctcagcggcgaaggcagccttagcggcgttgacctcctcggcggtagagtcggtcttcttgaactgaccgctcttgcgggggaagatgatcaggcgagccttgtagtccttgaggcgggcgacattggcaacaagggactccttggagtagttggtgcggcggtggtcaacggcgataccaattgtgcgagcgagcttcttggggataccggcctcctgtacaaatcatgagcttccagtcgggcacatagcaaagtcatttgtttaccttcagctcggcaagggtgaaaccacgaccggcacggacacggcggttgtacttgacggtagggcaccgcacaatgggacgcagcttgtcgacggggcgaggggcaacagcggcggccttcgcgagacgggcctcacgacggctgtgcttgcgaccggcctatatcccaagaaaaccctgtcagtccaacacgctcaaaaaaatcgtccggaacaattcatctcgtcaaaacttcataattccatgttgtttatccgacacgaattcgttccgcgataggtttgaaaagcgtacctgctcgaagtgcacgcggacacgacgctgccagtccttgtggaagtctacaacaaaaccccatcagtgattccaattcctgaataaccaatcgcctgtcgaattcccagtcgcattcgttcgaaagaaaacgagcctcctaatcctgatcgtcgggtgccactcacggtgcttctgaatctggttgttgtgcttgatcgcctatacaccgacagaaacctcgttagcacgtttcctccgctggacatggagggaatttcatctcctgtctaaattcaagcagcgaaaataggctctaaagtacgcaccattgtgtcggacggggatcaaccggcttgtcgtggtcgtcgtgggatgctggtcgtatctcaaaactcctccgactcaatattagtggaacttttctggttgtggccaaccgcgcggagtcgctcaccgcctcgcttagcgagccctaccctccttggcctagcccgatccggaactcctagatcaacttctattcgacattgtatgcacatgtaagaaagggcagagatacatttgcagcaactcatgttgcctttgaatctatagtactggtgctcctgactgtagtatgtctatggtgtagttgcagctcaagattcagctgcttcctctccaggctattctcttgtcacatgactctgcatgtttagtgccattggaatactttttgaatagtttatcgaagtcatgagacatatattatatcttttattctaggatataccacgtaattcatttattcgttcgtttcttgatggctaaaataaaattacgctgcagaaaaagattgcatcagaagcctcaggagatcaaatgaccctgaaaacgatagtcaaaaaaatacccggataaacaccagtttgcccatacatcaacacatgtcatcattcgttatat

SEQ ID NO: 10569 - DNA, 136 bp, Emericella nidulans
  unsure (1)..(136): unsure at all n locations
ttatctggacgacgctgcggagatggccaatgatataggctagatcataaatggcgcctagtgtgagatagtctcgttatagttgtatgctagtcntgcgtcatgacatgccatcgaatctgatattgtggtcagt

SEQ ID NO: 10570 - DNA, 682 bp, Emericella nidulans
gcgtgtgcatacccttatgcgccatcggctgcggctccctcacaatccacaaatccctacgcgccatcgggtggtagttatgcccctgccgctgggtaccagcccaggcaacaatccttcggtgctcctcctccgtcggtaggcggcgtgccccctccaccccgtgcctcgagccaatctccggcaaccgtcaccacatacactaccgctaagaatctgcccgcatggaacgacttgcccgaaggctttgcaaagcagcccgtgtcgcgccgaggaactcccgcgtccagtgcacccatttcctctccgttccccaaccagtcgccagccgttagtcagggccctccccctgcaggtgctggtcctcagcggacaccgtcggttccacctccacctaagggcgttcctccgcctccacggatgacttcaccaccgtcagcaggccaagccccaccaaatccgctctccgccgtaccacccccacccgccaacccctatgctgctgtgccgcagtcgccatcggttggctcaatggcaccgccagcgtctatcccccgtggatcatctccttataacgcgccgccgactatccctcctccgtcaaaccggtacgcgccgagcccggcggcccaggcggccagcccacaactccaggcgcgagctcctgttcctccccctcccc

SEQ ID NO: 10571 - DNA, 205 bp, Emericella nidulans
catcaccgacaccaccggccaaggtggcggctgatatagcacagctcactttgtagggcaaccgtagtgtccagattaccggtcaggctcttatgatcaataacgatgctcccaaagggccgaccggtccagcggtcagccatctgcccggactagcagcccagacggagttggacgcagttgacaggcgagcagcaaggggtcc

SEQ ID NO: 10572 - DNA, 881 bp, Emericella nidulans
acgcaatctatctcttttgaggcggcgccccaatttcaacctgtaagctgcccttgccctggaacgtggctgatgttccttgattacttcgattgctcccaggctaacgcagtgacgccagttcctcttgggctttcctttttccgccttaactcgactgaaacaccaaccacaatccttttctttccacgcttttcatgcctgttcggatcccataatccctgtttcgaccaagtagacccgaccaatgtcctcctcatgtcaaggcctccatctgcatctgagactaccccctcgactcccccggtgacacctgctgcttctgcccaacatgattgctctggacgcccgagctctctacatagcaagcagcggcgccaccgcgatgttcgggaccagctcgttcatattgatcctcaacacgttccctctccatcccgcgctgaatcccccacggctcggcagtgggccaacccctcgtccaattctactctaaaaagagctaaaaccactgcttcggacaccctctctcgtccaggtctgtcctataccggttacaacagccctcagctgtctgaaagggacagcattttcgcaacacattatcttccttctgataacgaagctgccagttcaccgcaacttccgcccgttgaagctgcctatcatgatgttccctcaaagctgaactctgacaatgcctctccttcctcgtttactcccaaggccctctcctaccaacatcgcggcgacgacgcacacatggaagttgacgtccgcagaacacagccgttacgctccgcgccgctcctaccctccgacactcctttcacaatatcgcctgggattcagatgtggggctagatgaggaccttgatagt

SEQ ID NO: 10573 - DNA, 309 bp, Emericella nidulans
cgtgtttggcaggtaagcgatttctagcatttgatagctcgagttagtcgactagcgatttgcgagggagccaggatctggggacttgtgagactggactgggattccactcacgggaattgtactgcgtaattacacaacggtcgctgagcagttcgcaagggattcgggcaaatggactcgagaatcgctgtcgtgaataatatacccgggtctagcccatctacgcggcagataaagccgttaatgacgccactttctcttcgagcgcgacgacaaaggctcactcgagttggttgcgacgatgag

SEQ ID NO: 10574 - DNA, 474 bp, Emericella nidulans
tcttctgcctcggcctttgaaagtggaagctggtcagtacatcaacctctggatgccgtcagtcagtctatcatcatggatgcagacacacccttttatagtggcatcatggtctagtaatcagcaggatactgttgagctcctcctccagccacgccatggcttgaccgctgaccttgttcgctacgcgcccacgggaagtgaaagctcggtttccttcctagccttgttcaccagcccccatggaatgattgacgatgtcagtcattatgaaagcatcttagtggtcaccagtggatttgggatcgcagcggcgattccataccttaagatcatgatatatggttataatacctgcaccgtgcaggtcgtcgaagtcgatttggtatgggaagtacagtctgttggcgagatggccgcagccctggccctgctgaataacctcctgaatgacgacatgatggctaatggcta

SEQ ID NO: 10575 - DNA, 1845 bp, Emericella nidulans
tggcgaataaccctcacaaagggatctcgagattgttccgcgggtccaacccagagtgttgtcggtcggttctcgaccacggtggatacaggctctcgtccatttcatcattactttctttgaccttctggccgatcactacagcaattctcacggccagagccagcagccaattgtttccagtatgacctacaggagtctcacatgcgactcccaatgagaatcgggcttggcttcgctagagctactctagagtaggtccgtgttctccaagtcccaactagtaaccaaggctggggacaaacagagagccacgattttggtggcaaagcaactctagtgaaagcataaccttgatccatcatcatcatcatcatcgaggccgcatcttcctttcttgcgagtctcgttcaggctcgttttccgttctctcgattacggcgtaactgatcgaatcattggcctcaacctcaactcggtcgctgcattgattccagaggcgagatggactgttgatattggctcctgatgccgaactcctgcagcactctctgtgccactcgatgccactggatcggattccctggacgatccaagcaaccctcttgacctgcttgatgcatagcagcctgatcatcccacgaggagtggctgaattaaacgcagcgggagaatctccactcgtcatcttccaagttccaactctcggatgattcctgtacattctacggttaccaccctgagaggcccagaggcctcctagtaaccaattggtgcctcatctaatgcaagccatcccgatctcagcacggcacaacggggccaagaccgccggcgaaaatgttgacagttgaaaccaggagtgttttgagttttcgacacggcaacctgcccaacttgacttggaatcgaacctggaaggtgagtaagcgcctttctctctgtttccagcggcagctccaaccccaggattccgagcatcattaccctatcagattggctggtcaattatcgattgattcttcccaccggagttgacgtcatcgaagcccaaccagcactccaaattcggacagcgacagctttcgggttaattatcgatattggattttattaccagggcctacggcgtaacagctaggcgccagactcggatttccaccctcgacatcatatccacatgtggtgttccgtggcagctggtggtctgattgcttgaaagagcctcgtgtcgtttgggtttccccattgtgcctaactactgagttgggcaataggctaaactctcattttcctatcagcactatggcacaacatcgtggcggcggttattacctccaaccgcggagaaactcgtaaactaggtcgatattggctcagaaccctcaggacctgagagggggatgcgcatcctcctctttcctactttaccctaccttctcggcaggctattgactaggtatgccccgggtatgtctaggtccactacgtagacttcaaggatctggacaataagtacgcgttgccaggtataaccccgatgagtctaactgtagaggggcttcgccattcatgccgtacgactgtaatgatgctagtaaactttggtcttgatgctagtatctaagtatatggacggatcgcttgtggtaaatatttattttgatgcggcacaatggaatgtacgctacacgaaagaatggtgcgcccatgctatttctagacattaccacgaagtctttatagtccacaagatataatataaagccttgagccatattataatgttaaaatctagcatactattcacccgacatgtttaggcggttaacccaaaaacaaaat

SEQ ID NO: 10576 - DNA, 2132 bp, Emericella nidulans
gtacccattgttcgtcttcaaccggcgcggggtctaaaagacgaagatgagattgattgctgttactgtcgttgattgcagtgcagacactgctgtcctcatttgcattgtcattctcattgtcggtttcgtcatggtaggcgttgtgagaggagttgctgatggacgttgctgcggtggtgaaagaatctacatggtctctataaggagctggatcatgtttttgaataacgcccatcaaattatagagttttgaaggggatgaagaagtttaagtgggatcaatatagctgaaggtcaaaaagacaatgcgcggagaagttggagaaataaagacttgaaggagcgaggccggatatcggctcggtctctgcgctaagccgggttgggatctgcagtaggctggcgagcgctgccactgcctcacagtgggcctcaaagatgggactggaatatgaactacacccccaagactgtggagatactccggaatcgcagagaaaggaacataccaattggataaacatgatgcccaatggtgctactttgggacagactgacgccatcgcacgcttcccccaaaatgcgaaaaataccaaaccgaatgcagaagtgcgacctgaacaccccaatgaaacagataatccaagcaatagacaaacagcaactgctttctcgttaagctaacagcaacagccggggaaaccaaaacaatatctgtttaattatgccgacttcctccagtcatctcaacagtgctctcaattccttcccacggaagctcagaatcatcgtcatccacatcatagtctgtaccacccttgcgagaagacctctcagtggtgcccgtcacttcgccttgcttagggttggcctcaatgccaatcgattggagtgtcacctccatctcctgctcagtcatctcttgtccgcgctgtttctggccttcgagtacgtcgtagagagcgtatatttggtccgctttcatgtccatgtccttcagcaacttaccaatcttctcaccaagcgcttttctctgacgtttgctgatagatgcatcaagtttattatatgctccttggcaagagacaagttggattcttagatgcgagagctcgtcttccaacgccttcagaacggtagcgagcgcaacagcaggcgtctgtgcaggccgtaagtaggctcctcattatagctaaccggctctggcatgcgctccgagacagggacgggcttgggaatcttaacagcatcgctggtgtgttcacaaccttcgccaggtatggactgtttgcatacggtgcagttccctccgttgtgctgggtggcccgattaagcgcttgctgggtggcctcaggaagtttagtgagattttcggccaaatcggcgtgtcgcagcgtaatatccgggaggatgaaggcagaggtcatttcctccgcgatccgagggcgccttcgctgagctagtggtgtcacagaatgatccgaatgtctcctttggcgctcagcaggaacagtgagttgactctccccttccgtggcttctggtttcgaatgagaagtcaggtctccgagcgcagaagcaggtcgaggtacagggaccttggtctctttgagagacgactttcgtggagcaggcttcagcgcactctgacgagtgaggttgtcggtctcgccggcaccgtgctctaaaactgggttggattggcgccgcttgcgggccagtcgctcttcttctaacgtctttctcagctgagcaatctcacgttcgccaatgaaacttaacaaagtcagatcttgctctgctgccgaccatttggcggattgcccggctgaatttttggggacccaagacttttttggggcatcccggtagctttttggcgggccgggtaaccttggggtaattaaacccggcctgaaggcttgttttttgacctcatgttcttaccggcgttgccctatcggatctttttgtttcaccctgctggacgagccggctccttttgttttggggaggcggcccctcactttggggtgaggagaggtccttctgcctccccttaacttgggatctctcactgcttcctctttcggttttctggccttttctcacggttttaacggtattt

SEQ ID NO: 10577 - DNA, 1281 bp, Emericella nidulans
gggctctgcgacaacgatagatcctcggataagataaaattagactttaatcaagatatgaggggctattgatgcaatcgtggatgtcaattcagtgcgaaggcgtgattcgtgagtcccacgagttgtggcggagcatctcgacaaactgaaagctcgatagtccgattgttgattgagctaaccccgatgaagagcttccgagtcagatcatgatcatgagcgcgagttcgaaaagctagagcaaagatgacaaacgaaagtcatcgagcagtttcgtagatagcttagtagcaggtgtatctaatgggttgagactccatccaaccatcagaacgacccagacataagggacggcaaaagtctaagacccatcgcgtcaaggccggttttgaggggtatgacgcttttcagctgaggtgcttccccaggcctagctctgccgtcggtgacgccgaggctactctatcgaccccaactccggcaagcgattgtactcggggcggaagcatcaccaaaggaacagttatagagataatcggccaacaaatgaagggatggtaatgttatccctatgcagggactcgaggagacgataacgattcgcccaaggccagtatgcattaacctggacgagcgagtcgtgcgcagtgcaggattccaggcaggaagatcactcggcgcgccgaagcggaacagtcgaggctcaatgaaatcatcaaatgctactttgcaaggcagcttttcccgatcggaatgacataacatgttattcctgctggaagctggaaaaagtctggggatttagggaagggatcttccaccattattgttcgcgatataacccaagcttctaccaatgataaccggcatatcgacccatgtatgcaggaccatggagtccacggagtctggcgtgaaaaaccgagtttcatgcgcggctggacgctgttcggccgttcctgaaagctctttttccgagctggtggagctggtggagcatttatgagattcgatctccaatttagactggccgtgatgtataaaaacggaaaaataaagaaaaaaaaaacaaaattcaaagacacggcacggtcggccagaggattccagcaaaaggcgagggttccgaagtcgacgccctggggagaacggtcagtctctatgtacctagggagggaggagtgcatatgccaggagtctaggaattacctaaagttagaacccttgaagcaacgaagcttcattcaagcgagacaaagagaggagtttgtttctgga

SEQ ID NO: 10578 - DNA, 807 bp, Emericella nidulans
  unsure (1)..(807): unsure at all n locations
ccgggcccccccncgatctattggccggccacacagaaagtcgaaancagacccacgacancaacggggggggaggaatgaacacccacgcgcggngacgacaccncggcgcccgagggcaacnacgggacacgacccgagggcaccccaacgaaaccaagacngacaagacanaaggaagagcaganaccaggcagggacgaagagaagnacaaacgcacaacancgcncacccgccaaagcgcngaccacaananaccaacgacacaagaaacgacaccaaaggggacgaaaaccagngggcgggacggaaccgccacgcggagacaaccgggaaggcccaacgcaacgaacagcgcaccccggcgaccaccagaagnacggcgaccgagaacccaancggcaccccgaaagcgccgaccccaccgaacagggcngccggaccaagaaagcgaaaccgcgccaaaacggagcaccccgaacaaaaagcaagacgcccgaggcaccacaccacaccacgcaaaaaccggccgacacagggagaaaccgcanacccgaaggaccgaacccaacggagcnnccaccnngggcagcacacgaaggccgaaagcagccggcccagcgagcacggggccggaccccagaagcgaaggagcccccggccccccacggaaaagaaaaggagnngccccgccaaggaaacggaggaaacaccggccggccgggaaccccaacgggaccccaccccaccaggggaaacccccaccagagccgaggacgcaaaaacaaaaggggaccgggaggcac

SEQ ID NO: 10579 - DNA, 1387 bp, Emericella nidulans
gtacaccactgtggctcatgggatgcatccggccaaggcaagggagactgacgagaacagggatatttcgagacgtgacgctcattgcgttcccatcagtctctcgaatcgaggatttccgggtgacaacgacctggacagcgagtatcacgacgctgagctccacctcgccgtcgacatcgcctcgacagaggccagcacgctccacgtcgagcttttcgaccgcgccagcaacggaaccctcgcgacggaggataaagagattgtcggcacagggacatacaagctcagcctgtccgtacgcaatccgcgcaaatggaccgctgagacacccttcctctacgatcttgagatcgccctggcgacgaggtacgacccatccgccatcctacaaaaggtgcaccaccgcgttggattccggcaggtcgagatcaagaacggcaatatcactgtaaatggggtccctgtcctctttcgtggcgtcaaccgacatgatcaccatcctcttcacgggcgtgccgtgcccctggactttgtcaaggaggacctcctcctcatgaagaggcacaacatcaattcggtccggtgctgccactacccatccaccccacagctcttctccatgtgtgacgagctggggctgtgggtcatggacgaagcagaccttgagtgccatgggttctacgatgccgtggcccggccgctcgatataccggaaagcatggactacgaggaacggaagaaactcacattcgcgcaagcggccgagttcacgtccaataaccccgaatggaaagcagcgtatctggaccgtgcggagcagatggtagcaagggacaggaactatgcctccgttgtcatttggagtctggggaacgaggccttttacggggccaaccacgcggccatgtaccgcttcataaaggaagaagacccgacccgtcctgtgcattacgagggggatatggaggccaagacggcggatatgtactcgttcatgtatccttctgttgatcggatcactaggctcgcgacggaagaaggggatgcattcaccaagccgatcgttctctgcgagtacggacacgcgatggggaacgcacccggcggcctggccgagtacatgaatgcgttcaggacctatcgccggctgcagggaggctggatctgggagtgggcaaacacgggctctggctggaggagaaggggttctacgcgtacgggggtgacttcggcgaccagcggaacgacgggagttttgtgctggatggcttgctttacagcaaccatacccctacgccggggctagtcgagctgagaaaggcgtacgagccgatccatgcgtggtatgaagatggtagaacaggctgcagaaccggtttgattt

SEQ ID NO: 10580 - DNA, 2051 bp, Emericella nidulans
accagtcaaggaattcattttcctcctgctgcaggcagcatttctctgatctctatcgagaatggtacctgccaatttcagtattcgtctgaagatctataatatatatatatatacccagcagcctagccgatgacggcagctaagctacccgtagccattaacgccaaaatgtaaggctctataaagtatccggaaattggaaccactgcctatgttactgtttcaatataatttttgtttggcagctgtagcgccatatttgccaaggattacttgggtcatccgggaagtatgtgattatgctgactcccacaagtccaaaggtggcaagatatgcaacctaatggttgctgcatataccaaagagttaccgctatgtttaccttctcatgagataattgatacaataaaaatgttcaaggagctgaccgtaaaatcttagttcctgaaaacgaaaacactaagcattgcccgacctggattctgccgtctcctgctggcacttaaatcgttcccgtcgcatctaatcaagagaatggctctgagatcgctcctaagaccgcacctgaggccgtcccgacctctgtcgtggtagagtgatctaggatactttaaaactaaacaaacggacaactgttatacagcacaggctgaaacaaacacgccgtatcaggtcccaaagatgcagcgtccaagcgattccagaatttgtcataagccgccaaaatctaataagcacattgaagatatcttgttaatgtggtataaatgtctcattactgtttacctagcttgttcttgataatacccgccgcccgctctgcaatagcacacagagtgcttgccagatgacccctgacctgtgccgaaagtattgaagcatcaattacccttacattctccgtcccgtagacgataaggttgttatcgactacgccacccagctccctcagggagcattgccgccgtaccgagaaagtggtggtttgcgctgactatcagatatgagaatcggagcagaccgtgaaacagaacaagacaggatagacttacacgaccttgaaatccacgcatcccactcatcttccgtagtgtcgatgggtaagtcagtgccaggcggctgtacactctccccagcaaccgagctcacaggagcagtcttccagaatctggcaacggtctgcgcaatcttccgctgtagaataaggtcccactgtgccattaaataatttgggttgatagctggatatgcagtagggtcagcgaaagaaatatgaaccctacccttcgagaaagggagaagagtgaagaacgcgaagccgacgtttgttcctagcgctgtagttaagatctcgacgcagggcacgtcttgggcaaagataagatcgtgctggattcgagaggtgttcaagtgcggaggtggagagcgcgttgtcgcttgcctctgcaacttgatcagcccaagttttgagctgtgcagcgatttcggccgcgacagtccctgcttcagtacgcaggatgtctgaggctgtcatataggtcacgtaaggggccattccagagaaggtggagttgctagcgtaggctatgaaggtgttcggttgatcgataacgttttcgccaacagagggcaggaagattttaacggggattttaaaatcctcaagtatcctattaaaagttagtgcgaataatacgaaatatgaaggacatactctggattcccaaccccagagagctccaggatagccgaggaccgaacagatccagccgaaaaaatgatctcctcattagcatatagagtcttgacactcccatctggcgccgtatactccaccccttcggccaacgccttagtcctgttgctctccgcccacttgatcctatccacatatccttggagtataagaagattcgacctatcccgaacaggataataataagctctcgcggcttcctcccgaacattcgcttcgcgggtcaaagtctgcggctatacaaagaacccgcgcagactgcccccattgacatcctcgttcaacgggacc

SEQ ID NO: 10581 - DNA, 105 bp, Emericella nidulans
atatcccctgcactacgagcgaattcagagatccaagaccaagaaaacagtacgaaacctatgacaatcgtgccctatccattagaacgagcgctactggaagct

SEQ ID NO: 10582 - DNA, 1629 bp, Emericella nidulans
  unsure (1)..(1629): unsure at all n locations
catcctccactatgtagttctgaatacggatcgtaaatgcgggccatgagcggaatcgggacagaatcgtcccacggctgcaccgtattcttcccacgtaggtagaattgctcttctctgcctcctgttagaacaactgcctattgctttgcaatgtacataccgaacatcgcgcatcgtccctggccctaccggttcatttggaggcggggagttatcatcggacggtctccattgccgttcatacttggtacaatctgtcggccggatggtcagaatggatggcctaggggttattgaccagccaagtgttgttgctctaatactgtggagaacccagtagcagactgttattagtagcacgctggtgagccaaatatgccggcgtcgagccatgaagcggatccgcagcatagaaaagcagctgagaatgctttagtgatagaggcgaagagcctcaatagatcaagaggtcattgcttgcaggaggggggccggcacgttgtcaagctcgcaaggtgggagaggcggctgcttacggtgagacaagctatattgatcagacatggaggacacaatctgattcgatttggggttaatgctggtcagccgtctcttaggatggtctcaggatggcgtgtggtcgacgccagctgtctgcgggtggcttaatatagcacaaagtaaatcagaacgtggggtttgatagggcagaaaagcccccaaacttagcaccaaagcttcgggtgcaggtgtaaatctcccattcggtcgcagagtgggcatatgcaggatctcgtcatggtgccatggttgtacataattctttgaaccttcaattggtttgtggatcggttaatctgcaggcggcgcaacgctttcgcctaggtgtcgccatgggagtggatacagctatatggtctggactataacgtagactgtctctccacctccaacttgtagtgatcgctgtgggttttgcttgctccacaggcttgcagcctactgtagccgtaatctttttttttctcgctccacgaagctcaactggcaaagcaccggttatcgagttggtcgcctgctactatacatgtgaaacttcggttaacagtttgagccgctattttatgtcccctgggcagaacggaccgattcttcctattgctctctcagtctcattctctgtctaacctgacctatttgctatttcttgtgaaaaaaagcagtgccaatcagcctatacggccgctgctacgacaggctgtgtcgatatgtctctaatataataagcccgctataaggcagccatctttgaccaaacagatacaaattgcctgaagctaaaatggagcacttgcaaattacaggccgcaccaattcatcttcagccttatcagccaggcgctgcttaatgtaactgtatcccttcacccgccgcatttctcggctggagctgacaagctctaatcactgccaacatccctactagggctctntacttaaaagtggcgttcgcatctgtataatttccccctccttttcttattctcgccttaagaagtgtaccctngaatattggtacgaaatgctgataaatgctcgntatctgattcattatatcgcctgact

SEQ ID NO: 10583 - DNA, 453 bp, Emericella nidulans
  unsure (1)..(453): unsure at all n locations
tatttctttnaccaactnnagaataagggacaacgagaccgagnccggccgagggcgttattacggcncacggccgccgccacccggcggcncgccgaagagaaaaacacccaggcccggaaaacccgangcaaccagcgnannggncaacgangccaccaaaaccgcagcagcaagaaaccagggaacaaaancccccgccgcagacagagaccaccgcaccacaaccccccccaacccaagacaccgcacccccggcggaacccgnccgcaacaaagccncaaccgcgncagcagccgcaaggcaaaaacgcagnccaagcancaacccaagacgncccaagacgcccaagccaaccaagccccccaagcccccncaagcacnacaaaccccccggcgccgccgcccggcccaaccacagcggaaaacagaaagcacgaaacccgcagcca

SEQ ID NO: 10584 - DNA, 1466 bp, Emericella nidulans
gcgggtgagcggtgggtgagtggtgaatggcggtggcaaatattcagtatccgctttgaatccttcaaagtttgccacgattttcgggttcggtctgatcatacggtccgtcaccatgtggtaagaggagatttctcggcaatttgggtgtctcgatgatcctgaaactttttttctggtatcgggggggatgccggggaggtggctgcacgcgtgtcattggtacccagtagttgcacattttccaaaaatttcagagcggttgacgccatggagtcaattaaacaactctacaaaggtccttctctgatatactgcttttttttgtggtgtttcagacctccaccgctgttgtaaagtagtccaaggacccaaaatgccatatcttgaggctagcgtaattttaagtttgatgctctacggattatcctgtctgctctcacattctgtgccttagcatcttgctcatagtcttagggcgtccagtaggcgaaagcgaaggcaaacttaccggggacaaaccatggagcataaagtttggccagccaccttaatgccacgtgggttgacgcgactaacgatattgcttgtccgcttccatgacccacagagggccattataggccgctccatatgtttcaggggccggggaccaaccgcgggttggaagtagtgggcccatggagcgctgctgaagtcagcgagggctttacaagacctatcgacagaataccaactctcgcctatgttcagccgcctgtaagtaagagagtattaaggagcgtcctataagcacaaaagctcagaaagaaagtaacgaacgggcagagcttatcactggacttgagagctcggaccccgttactgggcccgcttatgcgcctggctgaattaggaaacttcctccccgggctggagcttggggtaaaagtgaactattggagtctattctcgaggcaaacaaaccacctggcagccacaaagtgtgaccaaaaccttgctgcattctacgaggctttgtgtaagttccaaacgtcacaaacatttcacagtcattaccatagacagagcgaaactccagagtggatagcagcgggaattgccgaatactttgttaaagccggaacatatcacttcgtcctagtctcccgtgagcttgtttcaagaatcgtagtcccatccgtattttcgtagttgaagtatgtgagctcggcattgcgacgagggttgcattcaaaccggagcaatatcttggcacacttgagattgggtggaccgggtcaaccccctggctggttctcaccatcgaaggagctgaccccaagccatttttttcttcctttttcgagtttatttgttgggggtttgaattccctcatttgaccaacccctgtctggtctaaaactctgcaagtcccttcatacttcaatctcgtctctctcttgccaggacttccttctatcac

SEQ ID NO: 10585 - DNA, 928 bp, Emericella nidulans
catatttatcataaggcgacgccaatgaaataagcaccaactagatagttagatctgacgaaacgcttgttgacaagaagaccaatcgcgagcaacagcggcgttacccagagggccagtgcagccaggttaaaaagcttctgcatggtaggtatatcaaactcaaaagacccaggcaatcgagctgagacttcgagaccagtcagaataaggaagaagcctacacccccaatgcatccgataaggatatgccgggggaagaacccaataagcgagcctatcttgcacgtccccatgaggaaaaataccaggcctgtaaggacggagctgaccgagaatgctaggatcgtggtggctatcaccgatttcggattatcttgcccaacgcggtttagtattgtaaacgccatctggtggaagaatgggacgacctcaatcatctcgcttcctattcccccgcgaaatatcgagcccccgcaggagaagacaagctgagcaatgatcgtactcacgtagaacatcgatataccatctgatcctagatgagagaagatcggctcgcccaacggaaagaggatcatcccgtatgagagagcatccaggatgttaaggagtagaccaagaaataccgagggcagcagactgaacggacggacaacgccttgcctccataccgttcggcgatcccacgatttcggatgagcaagtacctggaagcacgtcgatactgtcgtaagagcactcggaagagtcctttgagtctcctttggagcatacacttgactctcaacgtcacccgctcccccgtagttcctagatggtctcgaaggcgtcttggccagcaaagatgtccactccgtgctcgtgtcctcttcttcatcggcattgccggagcagacggcccaactgcatgggcacgctcaccctc

SEQ ID NO: 10586 - DNA, 1838 bp, Emericella nidulans
aagctgtatccgtgtccacccacgaatctgtctacatcaagatgaactcgaaacttcctggactttccatgcagaccgtggttactgagctggatctcacctaccgtcgtcgattctccgacctcaagattcctgaagcctacgaatctttgatcttggatgctctcaaaggagaccactccaactttgtccgtgacgacgagctcgatgctagctggaggatgttcactcctctgctccactacctcgatgacaacaaggagatcatccctatggaatacccctacggtaagccgaagcttgtagattgacctcttgggtttcgccgctaacgaatgctcctaggttcccgcgggccctccgttcttgacgacttcaccgcttcctatggctacaagttcagtgatgctgcgggataccagtggccgttgacgcacactacgcctaacaggctgtagaggttgtagttgtataggggaactgtttgcaaggacaagagcgtctgggtttacggcgtctatcgttttgaaaggaaaatgagagcttaatgttaacacgactggtatctatctaaagatgacatggagtcatgtgaagctacatgattgggctgagcggctgttgattatagttatgctatatacaaccaagcatttgaaatccgacacgtttcatgtttgcaagacccctgaccattaagtgacacgatactgcaagtaggataaacttcgcactcgtaatgaggctcaggcctatgcttttagtgggtgggtcacttaacgcccggacgggaaaattactgtacggtcgggagttgactagcccgcatgcagcctggccctggccctggcgctgcaccatcaacaacagcccgcccgttttctgaccgtatacacctttgtccttcattattgttcccccttcgcgttaccccccggtctatacactcgctttcagcggctataccaaaagatctcaactatctgccctagaattccgcgcccctggactcgcaatctcttcgaaacgcccgtgcgcaccttgatctcatttatccacattcttgatcgctatttttatcccctttatagctccctaatcgtgagacaaccgtccaggtccccatatccccggaaattcgtcaagcatcgccggcccagtgtgttgtccctgccttgaactgcaagcctagcgacagcggacctcgagaccctcctgcgcaacgcaatctccctttgatcctaggcacgcgaccaggtaactaccggcagctcatggaaggttgaggaggactgcgatagacatgccacaagctgcaagatgggtgggctcaccctcaatcaagggacggacggagtccatgcggatggcgctgttgaccttcagcttattggggttacagtatgtactatgatcttcatcaacactactcttaatcgaaatctgttgaatatcgatgtgtttgtccatcgtatgactgactctgtcttccaatagatttacctggggcattgagatgacctgtaaggatcaaattcctgacgaacatgcctttgaccattcctctaatcacctcctcttgcgatagactgcactccgtacctcctccaactgggcctcaccaagtcacgaacgtcactcgtctggatcgccggacctctttctgggctggttatacaacccctcataggtgtcattgcagacaggtcacggtctaaatggggaagacgaaggccatttatgattggaggatcattgattgttacggtgtgcttgttggtgctgggatggcaacggagatcgtcggtgtctttgtcaaggacgcggagaaagtattg

SEQ ID NO: 10587 - DNA, 105 bp, Emericella nidulans
ggactcctcgcatacggtttgatctacgtcgaagtgatccatccagtgactttgtcggcgatttgactggatagcgctacgtatatgcgtatcatagtatacttc

SEQ ID NO: 10588 - DNA, 925 bp, Emericella nidulans
taaagctttagattcgggacctaggcagtccatttgatttaagtttacgagttgtgcattataacgatagaggaccggtcagacaattttatgtcagataattatagggacggcgtcctctgtttagttttctcgccttgcatcagtctccgctctgcactgcactcacttgcccttgtccttttccacggccatgattcttgcctgtctatgtctctatccatgcacacaaattgacccacctaactcttattcagcagtagattacaatagttggagtatcatcttccaagccatatagagaacaatcaacatgtcgcccagcgcgggcctaaattcagcaggacattattccccccccctccccccccaaaacctctcaaataatgcggaagatttaatacggcgtttccagcgacagagccggataccctgtcgtcaccggtgctgctgagctctcacacacacagcccgaagccgttgaagtgaccggaggtgctgtgcagtaaggactcgccgtccacgcgactgtggttgtcggctgcggctcgtcgattctctcaccccgaactaacacggggatcacagcgccagtgctcagcttaaaggcctggtgctttatcacgcggaggatggagctaatctcacccgaatgtgcagttattgagaccaccaggtctgaggtcttgccgtttccatttccggggccctcttgcactggagagggtgacggcgcgttacagacaccacttgtttttgacgtcctcttcccctttgagtgcgtaagcaaggagtcatcgggaaagaaaacatcattcaacgcccttcgactcctcagatcctgcgcctcgctgctctccgcttccaccccactccacagctcatcttcctcggtgaatccttcctcaatcacccagttggggaa

SEQ ID NO: 10589 - DNA, 570 bp, Emericella nidulans
aaaccaaacaggaagagccgccaatgccacacagttgcaagtcaaagtcggcatcattgcaagtcaactgacgcgttcagcggatttaaataccaggagaactgcaactctgcttgtgccatgatatccatgccttcacgcctgaaatgcgccgcagcaacaaccgcaggccagcattcaggcccgctgaactttatcacctactactcggccgtgcccagtgggggcatgactgtttctgtattctatgcatcgaaccggaacttatagcacttgttttatcttttaactgtcacaagatgtccccgtcatgtttgtgattgccagaacagtttgatatttagctagtcattttgaacacctactttatttgactggtttatagttcgattcaagcattcattgcattgttgattcatgggactacccgtgaattgggagcctattccatattaacacagcggagtttcatataacaatagatatttctgaatggctcatacagaagatgaagaaatcaagtcttaacctgtggtgcttgggctatgcgctcaccagtacctagtactt

SEQ ID NO: 10590 - DNA, 1233 bp, Emericella nidulans
atatctactgagatggagaacgccttgcgcgctattcccccaaaaccctacacaggtacgaggtttgttgcggaccaaaggcccatctagtcttactctactagatatactcgtccatcattacctaaaccacaccaactaccagtactacgctctctacccccctgcttttatgcaagattatgcggattggtggtcggtcaaagcgggcggcttgccactcagccctgtatttacctgcttagttctccgtgtctgcgcatgtgctgtgccgtaccttgacgactctctacgtcaaaggctcgaatcagagctgggaacgggcgttgagcagctgtctatgcattatcacaatgcggcaaagcagttaagcaatactgtagggcctggtaaaggtggcttgatgcaagtacaacaattgtttctcacagcgcagtggttcaaaacagaagcaatgttcgtggaatcatggcatgccttgggtactgctattcatgaggcacaggagctaggtaccgcgtgcagttttcttattttcttaccatatgcaaacggcaggacttactgacacatatactgtatcaggtatgcatagaagctcttcaattctgggattttccgagttcgaccgagaaatgagaaggagactctggtgcatactgtatgcatgggattggtacgttctcctcacccccggttcaaccaccctaacctgccaaggcaaatgtctctattactatcccgtccatttataatcaatagcaactgctgcgtgtttgaatggccagacttgcggttggagaccgaagactcccgaccaggcacctcatcaccaatcacccatatggtccttcagtgtcagcttggcctatcgatatctaaactacctgaggccatgagcggtgtcctgtctccaactcaagcaatggctgtccaagaagaagcgaaaaaatggttcgaatctttcccggccgcttattctctctcgagtactgatactcgatgggacgaaactcaccatttcgtcagaccgcagcgctttcaactacatgtcatagggtttatggtaatgctcatgccactcaaacaaaccctaacaaagcatatcagcactgagagtcccaacatagaaaagagcctacaaataactgcggtcgagattgcattgaagctgctaaatcttgcgacgacctactaaagcatatactaacactgaatgcgaaatttcaattc

SEQ ID NO: 10591 - DNA, 173 bp, Emericella nidulans
gagtgcatgaacgtgagttattttgtagtaggtctttgggtcttgaacatgtatgacgtcatctaagcgagacagattctagcatcgtgtgactagggattcaattgtgtcggagtctgtagaattcaatctcgccaacattcgccaatgatttcgccagttcacctcgtctt

SEQ ID NO: 10592 - DNA, 1097 bp, Emericella nidulans
gtaaaatcaaaggggccaggcgcgttattggtcggcctgaaactcaggatcagtgagactttctagtcaaggagtgtgtgttttatgtggctaaccaactataagtcccctaactggcgcaagcaattgaaaacggccaaccccgggactatatcaatgtctattttgacaatgtcgacggcgaaatcctcgatgcttgtctggccggggttgctcccttctcgcgctttgttatgtgtggtgctatcagtcagtacaatacctcgaagccaaaggggccagctagctatatgaatgtgattgtgagtatcccttctgatgtatgctgcttgatactgatcatctttcagtcgcaacgtgtcactatgaaaggctttatagttttcgatttcgccgaaaagtatgcagccgctcgcgaggaactgtcgtcctggctagcccagggcaagcttgctcgcaaggatcacatcctcactggtggactggaatcggctcccaaagcgctcgtggatctatacgccggcgcgaataccgggaagatgatggttgaagtggctcccgtcaacgagacggaaccacgggcgaaactatagacacgatgctgctctgtagaaaattgttgcctatacagatacccatgatcgccttgttcagtacactccatctcttagatttaaccctagaactcgcggacggtcgcggcgtgcaggtccgtcttacgcctattcgcgaaagataccaacccctgcacgactgaccagtcagtcgtgggattggcatgatgccaatgcttggagagggggagacgagaaagcaggggtaaaaatgcaaccttgcttgtctcctccttctttgaactttccatttcaaagaactcaacgccagcgcgatggccattcctatgcaaagccctccggcagagatagtagcagccgccagagcaagcctcgaggaaaacggcttcgccgtggttcccaatatccttgaccggcctgccatcaagaacatcgtatgagcgactctgggcagcagctgatgaaaatcagcggcgtggggtcgacctcttcatgccagctatagaccccaacagctcaaac

SEQ ID NO: 10593 - DNA, 2257 bp, Emericella nidulans
ccagctatagaccccaacagctcaaacgtccgcgtgttttaccttctggaacttgacgcggccttccgcgagctgattcaacacccggcggctctagagatcgttaaaatggtcctcggcgatgacatcctcgtatcgaacttcaccgcgaacatcgcaaagccgggctcaggatccatggccctccattcggatcagtcccttgtcgtccctgagccttggggggcaccctgggccgtaaacatcatctggtgtttgtctgatgtctacttcgagaacggggcaacgctctatatccccggtagccataggtggaaacgaaagaacgaggtaccatcgaatgctgtggaaatgctcaaaccatttgtcgctaaagcaggctccatcatcgccatggacgcacgcgtttggcacacgtccggcgccaacatcacgaaggaccaggatcgcgcgcttctatttgcattttacagcgcgccatttctaagacagcaggtcaactggacagcggtattctcgaaggagacgagagactcgttcagtccgacttttcgcaacctgctgggccttgatatcatggcgaacgcgggcaagacgtcggatatgggttatgaaacgaagcccctgtttgtttagctgttgagaatgagaaacccacagggtctagccatctaggggcgccaagctgctggagtagaaactaatgccacgtaggtatagctaccgtccaattttatcttcatcattttctaaccagtcccttgtgggtccggggctgagcgtttgggggccagagtgagaagccaaaggccagagctgttcgtgacggtccagccaccccctagtgccctggatcagtgaagatcctggcgtccattggccagttcgtatctgaataatattgcactactcaggaggagcggacattagccgccctactagaccctggctcatagggccccaaacggaaccaaccgctttgtagccatgcggctgaggttaaataggcgccagactggccgccaatgtcttctcggaaatcaagcccgccaacatgtcttctctcctcaaaatctcgatcatcctcgccggaatggcggccgctcagaacactgagtgtggctgttattcgacggatggcgtcacggctgccacatacacgaaccgcatctaccatgatttccgctccctagatgagactggaaccctctacactggagagcctgctaacgtcaccaatgacgatgagtctgccgctgcacctgtgcagtctgggtatctgacgtccgatggctttgtcaatgacttcggtatccagacatggggctcaccagcgagtgaagatacgccgttgagaaaacagtatagcaatgcgaatgtctatattggtcagctcaaccgtcttatatctttggagccacgtatactgacatgaccccagagcatgacggctccagcagttcaacgcacctcactctgcgctcctaccgcaacgcggactttgtctccactgccgagatcgacagcaagctgcaaaacatcttccacgcctctatcacagtccgcgcgcgcgttcgcggggccgccggcgcctgcgccggaatcttcacttacctcgacgacaagactgagagcgatattgagatcctgacccgcgacccgacgaatcacatccgctacacgaatcagcctggtctggacagcgatgggaacgagatccctggcgcgtcgacggacgccgtcttgccgaacggtgccgtttggactgactgggttgatcaccggcttgattggacgcctgagctgagtgcgttttatgccaatggggaactcgtcgagaccaagacgtacgggatcccggacgctccgagctctttcattgtgaaccttgtgagttgtaattcagaacctgttgtgagatgccttgctaactcggttatcgcagtggggtgatgggggctcatggtctggtacgccagacattgaatctgcagcgtatctcgatatccagtggattgaggtccttttcaacacttccgatgcgtcggcctgagctaggttctggagagagttttacttggcaggaatagctaagagtcgatgatctaagagtcaatgatctaagattcagggcgctcatctgtctagcagatgatcgtggcttatccgtcagcgtgttcaagcagcttgtgcaccataaaggagtagaatgttatttcgaagaatgaacatactacataacatcgacattatgcca

SEQ ID NO: 10594 - DNA, 104 bp, Emericella nidulans
aatgccgagcccgacttaggttcatgtccgtctgtgactgtcctgtcaccgtttttgaactcgagggagtgagtttgctgtatgatgtagagctcctgagcgtt

SEQ ID NO: 10595 - DNA, 2058 bp, Emericella nidulans
  unsure (1)..(2058): unsure at all n locations
cagcgcaaaactaactaacatggcgctcgcaacaaaagacatgaaattgagaagcagacactaacaaatcaactaacagtggcaatttagcattagattagcgatcataattaggcaatgacctcttcaccgagccgaggggccccccccttccaatccaggcgttcgtagtaacggaacaccaggtcgtatccgtggagatcatgcacgatgcggtcaacccgcttatatccctccacattctcacccttagaaacacgacgagcagcttgtcgctcaatgtaccgagcttctttgtctgcgtaccactcaccgtccactccaggctttgcctcgaagaccgtgacagtgaaccgaccgggcttgaaaatgttgacaacctgctggatgataccagcagaagtctgaccattcctcgaatgcggcacgttcgtttcgaacgaagcgtacgagcagtgaggctcaggcgtcacgtggacggtgaaataatgggtgcctttgccaccatcaggagaaggaatcacgccgttcgcggaaaatccgcaaggggtgaacaggtaggcatcaatgcgcgagtcagggaacttgccctttgggtacacgtccgaaaggccgcaggactcggaaacgacggtgccaagagcgtggccttcagttgtgagttccgcaggcaggattccgctgccttgagaagaggagacatcgtcaacctctaggtcggagccgttgctgaacacatcgacgtgatcatccttttcaaagttgctgtagcgtttctcagcaacgctggtggcgtggtctaggtagaactgttcgcgctctcctcatccaagtccgtcatcagcacctcgagggtctcatctgacgcttcgtcctgcggacccataccgagatcagaccggtcgggaagctggatgaatttggtctgagtaacctcatcgtccgagtctgcagttggagtagcaggaggcgtgagtgaagtgtagggctcggtgagatagaggtaccagtgctcgccgttcatttagccaatcatgtatgcgctcccgttcaaaaagagcttgtccatagaccgaacttcatctctccagctgcggtgaggcccgcgctgacggtcagggaataggaagttcttacggctgtaaaacacgcggtatggagccgctgcaacggtaattccacgggacggaggagcagtggacttggggaagccaccatgcatggcagcgatttccaggatgcggggaagtccggacaacagggtggtagtgccacatgtcttgaggatcaatttgtgtggccagacgaacatgctagactccgacaggagataggcatctacatcatctgacgagacaatagacagcacctggcaattgacgatatccagcatttccttccaaacatcctctgaaaccgccttcagaccgagggggttcgaggtgcccaggtccttgggcgacgcagcaaaccagacttccaggagtttctcagggcctacatagttagtcagaatccggctgctcagaatagacgaacataccttcaaaggcattggtggagtctagatcctgggtcgcctcatgattgattgtcaaggatggcgtcgcagcgaaggaggacggcgagtgcgtatagtgctgggggatgaggttgaccatctcttattgtacaagcagaagctttgttcggttttggaacagttgacgaatgttatatgtgatgataggtgtagcgctcaaccgtagacaaggaagcctagaagcactatttgcgactcagacgaacaaggggggggagtntntncttgagaagagaaggccctgtataaattcagagcgattgtggtccttagcccagaaaatattgtttgagatacccctggggctgctttggtggttcaaaagagagccgtggaggagaacttcatgaaaatggatggggggcttgctttggccttcgctgaaaatctctaccgttatgttcggtcttgcaacctggttttcttactatttcaaacctcgaagggggaaatttcttggtaggtgtatttggtct

SEQ ID NO: 10596 - DNA, 1466 bp, Emericella nidulans
ctagggcgagattggctgtgcttacatttagacacactttgtttagaatttgcaggaagtaggctaggaacatggtcggggggatgcgaacgtcgatacggcggagtagagatgtgtctgaagtgggctcgtgctcttcgaaaatgtcattgagggttggattgtcatgattgaggttgttatcttgttccttgctgtccattgatcaatattgttagaagcgtggtctttgaggatgtggagtagccatcaacacaagcataggaaccgcgtctcttataaaccaacctgaggggtctgggcaatgaaggggttacactggcagagaaagcgctgtgatatttgttgcttcacatgtcatctgcatcccttgcagattcctggtagccattggacgccttagattactctagctggtttcttatcaaccccttgtcagcagccgttgattctttctgtttaagcgtaagtgcagagaaagcggtcttacgatccttgtcagaagtatatatatatatatattatatataaacatacatcgacggaaaaaagctactggtagtcagtttctggtctcctaaatggaatcgttcgcgtacgtatcattcgatagcagactgaacgcgcaatgatatatgtacagtttacctcttccgcgctctccagaactgcgcatcgtacgcattccgactgagccccctcttattctgtccatacgggacatacatactcctaaccttgccgcccaatccctctccctgcgtcagcgtcccgcagacaatcccggcttgatctgaaacatcaacctcaaactcaaaccctaacgcctcactcagctttacaatctcatcgagtgaaagctgcagccatgggcctgtcccgtagagcaatggacccagatttatccaccttccgccgggtttcagaagacggtagatcgtctcgagatagtttagcagattgcgtgcggtatcgatgaagaagagggtcacgattatgtcgtaggtgcttgagtccgcatcttcaaagatggtagtgaagtcgccttcaatcattactatacttgccttggaggacggccgcggaatggaatcggggaacgatacgccgcgctgcatgtcggacgtggtggcgtggtgagaccaccagtctatataggggtggtagaccaggctctccggagcgttgatttggactacatagcgatggatcaggttcatgtatgcggaccactcgttgatcgttacttcgaaacctagataagacgactgggtttagtacgttattcaatggaagctccaagctacatgggtcaaataggcatacctcctagagcatcgatctcgtagcctaatcgccctgcccctgcaccaggaaccaagacgctgaccggtctttcctacccccgcgctcaataccagagatagagtccagaatacatctgaacgcaccctccctctcgaaga

SEQ ID NO: 10597 - DNA, 420 bp, Emericella nidulans
  unsure (1)..(420): unsure at all n locations
ttaacaacgccggcaaacgggataagtaaacgccacgaccgaagcgaccgggggcccaagaaagggagacggcgaggaaacacgcccaaaagaggacacagggcaaaccacgcacagggcaaccaaccgaagaagacggaagaggagcaaaagggaaaacgacgccgaagagcaacaagccacgggagaggacacacgaggagaaggcacaacagagagcagagcacggccacacggaaagaccacagagaggcaacaaaaaaacgcacgacaagcccagacacaggcaanagagcgagccagacccccggacgcccacaagagagacacgccgcgggccggcagagacgcgaccaaccagcaacgaaaccgagcccgagcacacagggcgcacaccacaaggggggagcgcgcaagacg

SEQ ID NO: 10598 - DNA, 192 bp, Emericella nidulans
ctttcttctggtacctacttctcaaaaactctaaagacttttattcatcttctagtgatatcaacacaaatctgaatgatggccacattctgccttgtgtgaaacctaatccagcctggattctggtcaaagtgcccagtgttcgacagcaagccactatcgagagcagtggcatttacactgggaaccaag

SEQ ID NO: 10599 - DNA, 1460 bp, Emericella nidulans
gaaagatccgaggcaacctccaggacgacaaaagcaggccatcttcttgcacatgtgctccgtcgaaaaccggtggtttttgttctgttggcgataaccctaatcgctctgtacccagcaggctcgccatttctccttcccgcgagcacgccgctgagcccgtccactagtgagcttcttccacgaccaacactagcagcaagcctctcagcaagtgatctcctctcgcgccgtgtatcgagtgatagaacgtccattcccaaactcatccaccagacatggttccccgcgggaagcaacatgtcggcctcagcgcaggcttgggtgcagactatgagagagcagaattccgactgggagtatgtcctctgggatgatgtgaccaatgagttgctggtcgagcagtactttccgtggtttctggagacgtatcgctctctgccgaaggagattaaccgcgcagatatggcgaggaatttctatatgtatttgtttggagggtacgtattggcgtgaagcctttcgtccttttgccctttatttttttttctttctttactggcccaaatctctgataactgggcagaatgtacgccgacgttgacaccgaagcccttcgtcccgtgaacgcactgttcgccgcgcacgaagtccctctcagacgacatctggacatgctttctgctccagacgcagtgtctgatgtccagagagcatttatgggtcgtatggcacatacattcgaccctgatggtctcggcgcggttcccaatggctggatggcctctcccccaggccacccgttctggctcttgccggtgctgtacgtcctcgagaacccgaaaggcgacgggagcgtcgaagggatgacgggcccaggcatcctcgggccgctgataaagcagtactatagctctctcaccagcagcgacggcgggatctcgctgcggcggcagctctgcgcacgggtccagagtatccagcctggttgggatcgggtctgtccgagcgggtttagtttggacgagacaccagagagcatgcatagcttgagccatgcattgattctattgccccggcagcaggtttattcctttaggtgggtggatgacgggtaatccaagggttgtcctggggccaagggtaatccgcatttggtggcgattagtgtagaggggaggtggtggatccttctccttttccttttatctttgtaccatttcctgtgtatggtcttttccctgatttagttttcatcatttttttatttgcctttgcactttaacttatattctctctaattgcactatagtccgcgtcttattattagagtctagtctatattattgtggtttttttttgctatttatcttctcttccttttatgttttcggtttaaccaataatgttatatttgtatcctctttcttttatttttctatcctctctccaatcttatt

SEQ ID NO: 10600 - DNA, 341 bp, Emericella nidulans
  unsure (1)..(341): unsure at all n locations
cttaccttgccggcaaacaaccgtagatataaccacccccgcaccaacccacggcggggtaaatttaaacggcggggcccaacaaccaccagangacacacgacaaagaccgcacacgcgcccccaaacagcgaacacacacccggaccaccaagggcaaacaccacgcagagcaccaaccccacggaccccgcacccgaggcgacagacacaacagccagcacagccgcccccgccaccgaagccaacagacaccgccacacaaaacccccacaaccacaagaccggaacacgagcacaacacgcccacccgccaaagcaaccagcgaaaacacccccgc

SEQ ID NO: 10601 - DNA, 446 bp, Emericella nidulans
ggcagacgacctaaatgaagccgatattttttttctccagcccggagagaaccctctttcttgagcagttcggcacgcgcggggagctccaaccagaccctatagcgagtcgtattacacacccttacctatccgggacctacaacgctcagacttggaaaaccctgagactcacccgacttattaatcgtttacccaatgacccttcgaccaactgacatcttagcgaaaatgcctgaaccgatcttgcttatcaacagaatcgccaccagcatggctaatagcaaaagagagcgctaacatccaagccaatagccagatgtatagtcagtaaacgagctcatgaatcaaccaatatggcaaaatgggcacactgccgaatgcaccagaagaattgaccgagctactgttgagtggagctccagattggaacacgagtccgctac

SEQ ID NO: 10602 - DNA, 1999 bp, Emericella nidulans
tcacacaacagtctcttctgtgcaaacggtttctctcgaagcgagagccaccaataacactaaaagagtaccttacgcgattccatcattactgtcccttatccactggggtgtatattgcagccagcttgtacatcacccgaatagctgtcgttgactcagttatttcagtcaaccggaagaacatgcatcgcctggtgctagctgggctgcgtgtagcgatgaagacggttgaggatcttgtctatccacacagccgagttgctaaggttgggggcgtgacagaacgagaactcacgcgactggagatcagcttctgtttcctcgcggatttcgacctacgagttgacgaacagacactggataaccaggccggaattctgcattggtacatggaacacccgacgtgactctgggtatggtgacgtgcgcgagccattgcttgataagacaggatacaggaggttttattcaaagctcgctaccgtgacgagaccagctggcctggatttggcattaccgctcgtcgcatccagataaccttgattgtatatgactctcctggatacctctttggtatttatcagcactaagacatttttcacggcaggtgagagttgggattcggaatcaatacggctgcctaacgtgacccgagccgacggccatgcaagtgcagaggttacggatggatgccaactcgcgcgtagcccatttgcttgtgttttcaggttccgataacatggtagaaataaaccctgaggacggagattcatggctgtagaacttatgatcagtagttgtagacctgcagcgcacgccttttctgcacttcgtaattcctgaggcgcgaaagtgatcgtcccttcagccccggccagttttaggtagtgttgcagcctacccagttaacagccaacaagctttgagccaatttttttttcccttcatgatacaacattcccttcaatctcctcactttttagacttcagggtgagaaaggagcattgttttttttttttttgtttacaacctccgcattgcgctttgagccgtagcgcctccccgaatctctatcgtgtcacctccgcctcactcttttgatcctagtaatcaccaatagtgaccgcgttcgcgtcgacgagctccctacgaggctagaaaacggaggatgtcttccggggatcctccatctgggcttcaagccagcggtagcaacagttctgctgccctgggcctgagtcccccttccgcgccctctggcaagagcgccgcaactcctccgaaggttgctacagatgatgcttccgttgagctcagtagcatgaaatcggagcgcagtccggccaagtccattccgttgggtgaagatataatgcaggtagctcgaattggggaggtttcggttatgcagaagctgtttgacgagaaaaagttcactgcgaactactccgacgaagaagggattactccgttacatgtgcgtcaatcttcccgggacatttggtttaggaaatttcattctaattgtatacttctactagtgggctgcgattaacaaccaatatgcgatgtgcaagttccttatagactctggagctgatgtgaacgcgaaaggaggagagtcagttgcgacacccgcgatgtgggcagctcagcggtgccactattatatcgtgcatctgctactccaatacggcgccgaccctcttcttactgatgtccaaggctacaatattctccatctcgcgacgatcgacgggaacgcatttctgcttgtcttgctccttcaccaagagataccggtagacgtggttgatcaacagggacatacggggctgatgtgggcggcttataagggatatccggcgtgcgttgacctgtttctacgttggggcgcgaacccgaacgcagtggatgatggcggattagcgcccttcactgggctcttgtcaaaggatcattgccgtgtgtcctaaaaatcctcgagtatggtgc

SEQ ID NO: 10603 - DNA, 1132 bp, Emericella nidulans
tcgtcaattgcgtgtcaattttttagcgcctaacgggctcgctgctgctaggcgtctctggggtctcctttttttaactcaattaattcggttcaaaatggctggcttggcgtgttgtgtgcattgtcagagcgcatttatacggagtgctgaataattcagagctcaagtcgaggtttcaattgcttgaagctctatgaagctatacacacgtaaatcctccgtacactgaagaggcgacacgcttcgaatgtttacaagttgtaagaagaaaaagggaaagcagtggtggtttacttcctatccgacatgcgacaggaagaggatgtacaattcaatcatcaaaggtataacggagccactcccccaccgcccgcaagctctcccatcgcaccgactcatctttgtcggccatcagttccatcacccgtgtcttgaaacctagtttctccagctgcccccgcctttcgggtagttccttaaccaaatgtcccacatcgttgcaagcaatggcaaggacctgcttgtcgttttcccagctcttagagattatctccttgagcttcttaggaagcgctccgctgttctcatccaggattcggcgggcattctccttccagaatgtgggattcctatgaggcggggaccaccgtagatggccggattgaagctctgcggcgtactgatcaaaagtggtttgtgtctttgtgtattcatcgagcatttccgacaagtatttgaggtcctccaggaggtccgggtctgtcaggtgccgacccgagatggttgagagaagagcaggtaggcgcacgaatacagcgacaggcaagagggtagtgcggttgaaagaaaggagattccggagagttgcaagaaggagacgcgtggtcttttctttcggagacagccgtaggagatgtgagtacagttggagtatctcatggtccctaatcctgtcagtaataagtggcatgatgtcatgtctaggatcctcactcttgcagctcatctccaatgagctcgccctcaaaactcaattgcccaagccccaaaagcactcggtataggagatgaagaaacgacgccacatgcaatgccgacgtcaacgcctctagaaccccggcaatggtgg

SEQ ID NO: 10604 - DNA, 472 bp, Emericella nidulans
gagcttcaccctgggcgcggacaatgaatgcctgcttctcttgacgagccttgtcgacaaggaaggctgcccgctgggcttcttgttgggcgacttgcttcgcttcgacagcggcagagaattcgggggagaaagtcaggtgctaatgggacggaaattcgacgttagcaccagaaacctgagctgcaaaaatatgaggtgtcgtcacttaccgtgagtgatacatcatccaaagcgatgttgaagcgggcagcgcggcgggccaaattatccccgacaagtcttgcgacattctcacgcttggtaatcagctgactggcattggactgagcaacgacgctcttcaagacttcgcttacgatagatgggagcacccgctcatcgaatatttgaccaacgatcggcagatctgagggagagcatccacgccgtgtcttgacaacacacggcaggtgatgttcaccatctgtag

SEQ ID NO: 10605 - DNA, 147 bp, Emericella nidulans
tcatcctgctgtttgtgcagatgcacttcaaagcttggttaaacgaaatgttaatgtcgttttaacggcacagctgatcgataatacgcttcagctcatcgacagtaagactactgtcacgtagttcacgtacatactgacgcagct

SEQ ID NO: 10606 - DNA, 1530 bp, Emericella nidulans
cacgcctggtgggactgtgaacgcaaggctcccgaacggcctgtgcaccaaggcttcttgcgtgtgttgcgcacgaataccatcagccgttacttcatctccttggcccttgacccggctcatgcagacgcaggtgcagccggatggtcttcaggtgcaaacccccgccgtgtcggccattgtgcaggcgctcgaagaggggtttgggcatggcagcactcgaacaggtccagccgagttcgagtacgccgagcgaaacggtgtcttgcatattccccgctactataaggacgagaaatataacaatatggtcacttgcccgcttgcgccgagctggagtgaccacgacgagcgcagcattcccttagagcgcctcttccaggaccgacaactccggttgcaagtcggcattccaggacacctaggcacgcttgcctttgctgaaaatgaggcaaaccatgcggacctaccgccagaacttatggagatcacccctcgagctcacggggcttgctcccgcgatgttatggccgctatgggccagctcaaggatcaagccatgggcttcgaatgtgccggtattattgcgcgacttggttctgaagcttactctaagggctacagggtcggtgaccgtgtcatggccctttcggccggcgcatcttttgccagcaatgtctgcgtgccatggcatggggtcatccagatgccaaaggacatggactttgtcagcgctgcatcgcttcccctagcttttacagttgcttactttggtctcgttaggagtgcaagcctgacaaccgggcagtcagtcctcattcatgctgcagctggggccttcggacaggccgcaatcatgctggccaagcacctgggtgtcacagagatttatgctacagtcggctcccctgagaagcaagacattctcgagcgcgaatatggcatcccttctgagcgtatctttagcagccgcgacgcatcctttgccccggctattttggctgctaccaagggacgcggcgtggacctcgtgctcagctcactttctggtccgctacttcaagaaagtctcagcacagttgcacctctcggttatctggtgaatatcgggaaggcagacattgagagaaacagcctgatggcactcgagtctttctctcgcggcatctctttcgtatcaatggacgtcccaaccctcttgcagcgccgaggaccagatgtgcaccgtacgcttggtgagatcaccagcctggtcgaacagcaggtgctgaagccggtttaccctgttaccgtttaccccatgcaggatgtgcaggcggctttccgcttcgttcagacaggtgaccagatgggtaaagttgttctttcagctggatcggacgaacaggtttacgtggtccctcgaccaaagggcttaacaactgaatctcaactacgacccgatgcatcgtacctcatcgtgggaagtgttgggggtattgggcgtcagtcgcacactggctagtggctcacggtgcacagcacttgatc

SEQ ID NO: 10607 - DNA, 106 bp, Emericella nidulans
tgtcgcgtagagcattgcgtagaatcgagggccacttcgaggtctggcgaagcagatgcccaagaagggacagactggcgctacagatcggaagaaatcgatgatg

SEQ ID NO: 10608 - DNA, 128 bp, Emericella nidulans
gagactcggccaatgacgtatagcgtgagctctgacgagtggctctgcgacgcagctagcaagccaccggccgagagcgtcatggcgctgggtgatccgctgggacgtggggatgagcgacaggcgac

SEQ ID NO: 10609 - DNA, 1967 bp, Emericella nidulans
cgacacccttaggaacagggccgacgtggagaggcgtacttaattatagattggcttgatgtaacggggatgggcgagatcacagcagccagaaaggtctcataccggtactgccgctaccattcatttattctttggaattgagcgcatgcgtatacgcacaacaaggagttgttgcagattgaataaccgcagcagctgcataggggctagtgcttacggccatttcacatcctggccgggtggcgcctcctctacctatccctaagagtctaagcttcgcgtggcgtgagttgtacaaacacgtaatctgcatctctgccaatggcagatgataagcaaggcctagacgactgctcaaaggcaggcctgtctctacctactcgataggccacccagagtggccggctggccggccggccgtaccagtgggtaaatatcagggtcaaccggggaacgccgagcagcctatggacatggataattcgctatccgagtcccaaggatcatgatctggggtaccgattctacggcccaatcatacctgttttttgaaacaatcccctggaccgtcagagatccctgcttgattgggcatgtggcccgcgatctgcaatggcgatatccttagcgcttgcgctgcccctgacccttatcgctgcgccctatcactggattcacagccccagcagtgttgtatgatcttcattcaatcctcacgaagagccgagtgacgccttgtcactcgcccgctccgatgtaacccaccgggacccggcgggcaggtggattgaacacgcgcaccgacctagccttgtaaaaaaagctatataaggagtcaattctgctctgcagttccctatccagcacattcgcactcactctcacctcaaatccccttctaaactcgaccgcagagccgactcgcgccgtcaaaatgaagaccgccgtcaaaaccaccgcccttctctcccttctctcgaccgcgatggccgacaaggccatcgttggcggcgacgacgccgagatcaccgaatacccttaccagattgcgctcctctctggcggctccctcatctgcggcggctctatcatctcttccaagtacgtcgtgacggccggccactgcactgacggcgcgtccgctagctcgctctccatccgcgcgggctccacctaccatgataagggcggcaccgtcgtcgacgtggaggcgatcaccgtccaccctgaatacaacgccaacaccgtcgacaacgacatctccatcctcgagctggcagaagagctccagttcggcgacggcatcaaggcgatcagtaggaatgttccacgtagaagatataggcgttatatgcagcttggtatatatgtaccctgcggagtaatttgctagaatgtaaatgctgccatcgcaacaacggtgaacagcgccatcattgcattgtggctggttttttgcgcgcccgacgtcgggcttggagtttcttcttccgcttcgctagtggacgaggcaaactcgttgccgtcgccggtctccacaagtacatgcggcctgtaggtatagtcaggccagccggcgctgctagagcctgaaggggtaccgtgagaggagcttgaggcgccgacagactcggtggatgagtaggactgggatttggtgctcgtgctggttgttgtgctcatggttgacatggtcgacgagctgctcgaggaagtcgaggacgaggtgctggtgctggtgcttgtggacgtggaactaggggctgcagagctagaggtttcttcttcctcgtcgtcgtcctcgtcatcgctgccgctgccgcttgagctgtcaaagacaacaagcctggccttttcgcccttgggaacagtaaccacgcagaagttggcgcctcctgcgcagtccgacgaagagccggtcacctcattgacgtcgttctcggccggatcaatcttgcacggaa

SEQ ID NO: 10610 - DNA, 114 bp, Emericella nidulans
ccttgtgtagttgttatttcgataggtcgttagtattttgtgtattgcttttgccgtctgttaccaaatcgtttgtatgtagtgttttgttgatcgtcctggatcattgtgtct

SEQ ID NO: 10611 - DNA, 1102 bp, Emericella nidulans
atcaggcgtgctttgaagagaggccagaggaatcggtgtgtggcgaagtaatagatcccctaaatcgatcggtattagcgacgcaagaccatgagcttggtataaggagcatacgcgcaaaggataaagccaggcagctgtgtttaaatcccaagccatcacagacagtcacgctgagcttcgggctctatcaaatcaaattataatagcaggcaagagtgtttataggtctgggataagtgttgcctgctgattcgaggcggaatattggcaagtttgattggtgctttatcgataagcaggcaggcagggaaggcggtgagcaccaagctatataaccgcacagatttctcccatttctctttcttttcttcactcaactgatcacaccttcttattcactctgaagtcctcatctctcaatggatcatctggaggggaaatagaaggttagaagaaacttttccgccgacttaccccaaattcttctctccctcgtggagcgtttggaaaaattcttccgcggtacatctcaatcaccttgctacattctgtaaattttggcctgcttaattgaaccgatctgatggggcaatgctgtagacatagtacattgtggtcgtatttctgttcaaggttattccgtctgggccatcgggtggcaagtcatcctagtcgacaactactgctcgtgaggctgatacgaggtgcggggcggatagcttcgcctgagcgctgatcaagtgtcttgactgtcacgtcgattcccacgattgacacgttggagttaaatagctgggttgctgtcttctccgctgtagtagataccaacatctttgaacatggccacggatgctgaatctaactatgccgtctttcgcgagtgcgtctcgagcgtcatcattgcaagaagcaaccagcataagccgagcaggacaaagcgcaaagcctccaagataaaggcttgcaaacgaagagggaattccgattccacagatgaaccttactcccagacgctgcgcttgagatagaaccaaagaactgctgtttatgattcggattgcttcattacttttcaatttcgacgagtgctgagctacaa

SEQ ID NO: 10612 - DNA, 2825 bp, Emericella nidulans
aaactccgcctccggctcgggttcatggttcaggctcagcgccaaaattggttttttgccggtaaagctcggcatgctaacgccagctttgtctaggcctttctgggtctgctcaagttcatggtgctcaaattccagctggccaactaggttacccatccgaaagtcgacaagcccctttttgaaaagcaaccacgacagggcgtggatgcagtgtataactttgggaatattcttcttctcatacaggtcaataagctcaaaccggaagagctccggtagctcaacttcatcgaggaaccggaagaataaggctatattgtctgagtgtcggtattgcagcctcgggtgtctaaatattcgcaacggccggttagggtacattgattgtacgatctccgccagggtgacaccatcacgtaaggcttcttctagttgcacgatgggcggaatctgttgctggattacctcttcaatccactccttggcttctccgatatggcaaaggtactcatatgcctgtaagaattgccgttgcttatccatccaatttcctgccgcccaggccgaagccgttggtctttgaacggttcgagggccatggttgccggctactgacccagaccttttcaggcgccgccgcccctgcagaccaacaactgaaggagtgtaagtgtcgatcgagaattcctccgtctcaccggactttgcaaatctcgacaatgcgcgcagatgaccggtggaggatttttggaacgtctctagctctggtgctgaaatagcagccgttaaaggaggtggatgagtgctggagatactatgggagtgactcgtcctgacatggggcctcacttgcggcgagacattgggtttggaaggcgccaaaacattaggagattgtctttctttgaggggttcagcatcattttgactgaagcgggcctcgggagtccgcggacggttctccttccaatgttgagggttatcaagcgtttgacttcttgagtggcggaaggcaacatgcttgccagctggagaggagttgggagcttgggagagcgggcgcaacgagcggcgaatattctcgtatgttgcccctgcgttggaccattctgcagctcctccgcccatattttgctgtgctgtagtcgtgtttacttcactctttcctcgcttatgtccaaagccagctgccgacctaacagacgcgtttgatgaaacggtgctggtgcgactgggggcaaaagagttggaggaaagagagtagacagaggaatttgttgacgcggtcgagtcatggcgaaggggactcgatgcttgtgtaggaaggtcggtttgcgcacggcgaagcggagctgtatgcatggacattactggagccgtcccaaggacaggaatgcgacaagaaacagacgaaagggttgttgggtttcaatgggccgcatgcctgcttcacgaagagaagcagactacgggcagagtgggatcaaatagtcgtagcgtgttccttggtaggaatgctcagtagtgcgcattcaagggatcaaactgcatagctctctgttgggtaacgggcagttggttggtatagaaacgggctatctccgtcccgcagagaggtccaaattctagtttcgcaacaggggtggaagggaaactgaaaaaaagaaaaaaacaaaagaaagccgattattatggtcgatttgatggaatcgtgagcaagttcaagaaggaaagaagaatcaaagtaggtggagggggtttgaggagatcgatcggaaggcgagtttcccagcctcccacaaacaaatctcccgatcgggtaaggtgaccagttaatcagcttatcggcgcggactcgtgcccagccactgagccacaaacaaggaatctagatgaacaccacccattacggagtgcgtgtcataggtgtagactagctttattaaattaagttttgaacaaggatctgaattagtagaaacagcctcggccgtgacggagtgggagtcggtggttgaatgtcgaacagcaagaactacatcgttctcttgccttaagctcgcggaacttgctgcggcccgaacatgatgtctgaccaatggtcccgatcggtctgaagagaataatgtagatacgtcttagcgaccattgacttgatctttcagagatacggggtactcctgcctggagagattctcagttcccttctaagacatgatgttctcagtgatctcatgcctcaaggtcaaggcccaagcactctgcaaatagactatgatccagccttggcattcatcgcctcatcaacgaccgtctctcaagcgtgttcgacctgcccgtctctccagcgtcgcaattaaaattacaatccagcacccatacaactgctaaaatgcccagaagcgagccaactttcttatacaaacttgttccgtcaacttcccccgtgcgggagcccattccagatcgtctcccggtcagcgaactcgatgagatgtctggattcgtgcacttatccacagcacttcaagttccaaacactctgaaattctttttcaaggatgaacctctcgtctatgtgctaaggattccctacgaccgcgtagcaaaagatatccgtttcgaagatcctgagggccgtgtatgcgggccgcgaccagatgagggtttattccctgtaagcctggactaacatcgctcttatcctcgtataccaagaactaacgtagtacagcatctctacaatggactgaagcttgggaaggatgaagtcgagagcttgagcatatggactaacgagggcggttgggacaagccgcttg

SEQ ID NO: 10613 - DNA, 462 bp, Emericella nidulans
ggtcgccggtatgtataagctagctatcttatccctgcatcccgaggtatccactgggtatggggcgaacaacaccgcggtggggctccaattctgcctataccactgaccactacccacactcactgaccacctgcttacaacgcaactactagccaaacactggggtctccgaacttattctccatgtagaccatccgcctatcgccaggttgctttatatcgcacattaccgcacatatcacgcttcccaacaaaagcactacctgtacggaaaatggaaattaggcgctgtactattttgttacaattaacgtaaaatcaaagctctacacacttcatattgtcaccaataagcctgcttcgaggcattacctgatcaatcaatagaatagaccgtgacagggttaagcattcgtccagttacaaacatgattccactattccataacgtagactcca

SEQ ID NO: 10614 - DNA, 529 bp, Emericella nidulans
tgacaaagggcgatgcgagagaggcccagcatgctgaagcgacgatctacggcgggcagaaccctagaggtgggatggctgcacagatgcaggtaggaactgcggggcattccggagtagcggatggagtcacgaagccgctccaagtaccctatatcctggtacagacgaaagctaacttttgacaaagagcgcacgagataagctggaacatgccagacgctggatctaagtgggcttttgggtaggtacagagtacgaatactctgacccaagtatcagacataaaagctgacagctcggtcagaattgacccgcgcttacagcactccgctgtcatgacgatcctgcgatacggtgtgtgtgcatcttggccgggaaccgagaagctctgactctgactggacctcaaacctgatccacaactggcggatttgcttttgttctggctgcatacgctggaatatcgtttctgactttggcgtttcagaatcggctcttgacaagacggccaatggaaaaatatact

SEQ ID NO: 10615 - DNA, 581 bp, Emericella nidulans
ttcagggcggcgcggatgcgactttgagtgcataaaatctgttgtgattgatgggccaagcctggtttacaatatctacgcacgcctattatcatggtttttgacgaccagctctaatatggttgacgccttgccgacctgcgacgaagtaagccgcggggtcatgctttatttgatgcatctgaagatgcttggcgttgagatgtatatacaaacattgtatgccggagactcttcgaactaaccagcttcagtgagaacatctatttcgacggcgcattgcctgcacataagcgcgaaacccgagttgcccgacttgagaatcaaaggaataaacttgaattgttttgtgcagaaactagaaatggcttcgacatgtccaagcctcccgtctataacagaattatcaaacctgataatgtgctacgcagccgtcctacacccgctaagtacggcaatattcctgccaatccctttatggtttcggcagtgttcgaagacctaaagtgccgctggaatagagcaaatatcctcgattctatcagggatacattgccagtacacccgattgacattgaaga

SEQ ID NO: 10616 - DNA, 527 bp, Emericella nidulans
  unsure (1)..(527): unsure at all n locations
ggtgaagacactcagggtacctgaaacctgaaggtgcactttcaggttcaaggccagaatttctggttctgtttgcagcttgcatcactccatcttgattctttgaactaaatttaggcattgtagcaccttgatctcctgagccctttcgtgagatttctgtaggggtttccacaataacattggaaagaacacttaggccacaatacaatggctcggaagatatagtgacagatgttaagacaccttcatcgatttccattgacatgagatcattgctcttgctttttccggcagcctgagactggctctcaacagtattaatatctaccaaatctctacaagattctgaaactagactcgggaaaccgccattgacatatgcattgttcacgagattattatcatctttcagacacaaatatttctgcccattctcttcttctgatctactaaggtcggctttcacatttgcagacnctgattgattacaccatcctgattcatattaaaaggtgaggtaggag

SEQ ID NO: 10617 - DNA, 1726 bp, Emericella nidulans
aagaaaaagaaataggaaaaaggaagaggcaggaagaaaaaaaaagggagtaggaatagagaaggatagaagaaagggagaggcgagaaggagaaataagaagaaaaaagagttaagaaaggataatagggggggtgaaaaagtaaagaagagagaaaggaaaaaggaggtagaggagaagtatcaataagataaaaaagaaaaagtaaaaaagaaaggagaagataaagtgataaaagagaagagaaggaatagagagaaaagtaggcgagtgaaaaagagagaagaagaagtgtgagaaggggagggagaaaagttaatagagggtaagagaaaaaagggatgaggtgcaaggatgagaaagaggaaaacagggaggggagaagagggggaaaggatcagagggaggcacaggcaggaagacaaatgtagaggactaaagttggtgaggaaaccaggtgccaggtgaaaaatggagcttctgctaccacacggcataaaaatggtggtttcagcagaagagtaaccgaacgcagacgcagatcgtgccgagcgtgcgtgtccccagccggaatccccggcgacacaaccaacttctacaacggcgccctcaagacgaccgtcaaccgcttcctgtcagcctttaccatccgcgttgacgctaagaatcttgcggtgtcggcggacaatatcacgggcgtggactgggcgtcttcgcagatggcaccaatctccagtgtcgctggggtctcagttcccctgctgacgacggggaacacaagacattacgagtatctgagcgcggaaaagatctatcttgctgctacgaagacaacagataagatcattgcgtttgtggagggggcgcagcatacgatcaatacttgtacggagtgtgagacgtatccaggggagtttggcgacatgatccgcacggcattcgactatatggatgtgtggctggggaagcctgggcggtttatctccgcatgattggtgatataccgcacaatatgtatatatatgggatgaaccgagatgccgggtagacatcttctcatgactagagtggattcgacgagacaaccgtggccataggaaggatcaatctagtctatccgtctttggattgttgtcttgaatcgacctcgtggccggagacacaactggcaacagtgacggagtacagcagctgtatttagaattctagaggttgacggtagaccaggctcaacaacttagctccacggcagcgtatagaaaccagaaaggcctctgcaatagcaccaagtagtaaatgcgcggtcagctgcccatatgacgaaagccgtgtaggatgaagtataagtgtagatctacccgtccccagaacaaaggatgtactagactcagatcgggtcagccaatagagaattgctttttgtttctattttctagcaaggcagttatacggtagcaaaagcactttagtgtatttatcactagtcattgccgctgctcagtcaagatccgtccccattgcaacgccccgtgcagcatcaaaatcactttgcaatctccccatcttgccctcaaccctctccacacagtccgggcctagtggcagccttaggatcttccctttcagagcgccagcctctcccgtcccagtgacaacctcaaacaccctctgaaccgccttgcgtggatcccccgctctgcttcccctgcgcggcctcaaacttgc

SEQ ID NO: 10618 - DNA, 611 bp, Emericella nidulans
caggtcgactctagaggatcttgtgagtttcaacttgaaacagtgcggtttttaaatagtcaacaatcacgacttttagacgttatcagccgttggatttatacttgacggttgtgatcgtctacgtttaagcgggtgtatcgtatctcaccacaccgtatcttgttttcctcttctccaatacgcttcggaaaactggattacagttaacagtggattagtggataaggagataaatactaaatatcttattaagccacgtgaacaaatcttagccatggaaacataatctagtggctgagattaacccaaaactactggttcttcttcttcctctcatccatcttcgcgcgcttaagcgattctctgcaaagcttcataccaaacaaagagaagtcgaaatgccagtttcagctccatctccgccatcgtcttcattctccgttcattcactgtcccatcaatttcactccttcttctttctcggcgaggaatctccggtcgccgtcaacatcttatccccgaatcaaagctgaactcgatcccaacacggtttgatcctcactctggctatatagactttgttctcatctcactagtttttattgatg

SEQ ID NO: 10619 - DNA, 612 bp, Emericella nidulans
tagaggatccccctggctgatgctcttcatgaaagcccgtcatcaatccaggtctttgcattttttgaattactactttttgtggcataagtatgggttttaaacattaattggttttgcagttatccctttcaactttattttctctgtacatccgtgatgctacgtctggtgaggatgtctttgatgctggttggataggaaggcaaggaattgccttagcactgcaatctgctgctgacgtattgacaacaaaggaccttcctgctgttatgacctttttgatatcccgcgcactggtatttcttctcatcttgtcagatgaatgcttgtcaaataaaagaaccctccccctctgagccatgttgcaaaggatttgggtttcacaatttatcacctagaaacccacattttatgttgttttcagaaactatagcttgaatcttttgactttcagaaaatatatgaaactgagtgtttttctcatgtgcaggctgatccaacacagatgttcgtggaaagatgatcaatgctggtatcatgattattgataagcatggcaaagaaacggttcattgctgttcccatctttgagaattattaaataaagag

SEQ ID NO: 10620 - DNA, 572 bp, Emericella nidulans
tactagaggatcccccaacttgaacattcaaaggcagcacaaattgccttaaatggaaagctggagattgctggtaggacaatcaaggtgagttttgaattccttgtggaaaaatgatgagttcttttgaattgcatgtatctaatgtttactttatccgggttaatattttctttttaggtttcttccgtctctgatcatattggtacacaagattctgctccaaaatctgctgattttgatgatgatgatggaggtggactggtaagctagagatcctggtccttttactctttgtctcctttaacttaaaggtctgtttttatgactctctctcgctccctctcaggctttaaatgcacaatctagggctatgcttatgcagaagctggatcgttcaggtatcgctacaaggtatatctgtctctcttgtccgcatctatgttacccatttggttcacaaatcttttatttgcgagtaccccttataacatatggaattctatccacagcattgtgggctctcttggagtacagggctaaatggagcagcgtttaatcaaccaggcatg

SEQ ID NO: 10621 - DNA, 2349 bp, Emericella nidulans
attaattcgaccgacctgcaactaagcgctgggatttttttcggagataagatttttcaggagcgcactaatggggaaggtctctgttctgcggtatatcgtcagccgcggaatactaatgactccagcaattagacgaaaggagaaatatgaatttttttttcttttttttttttttcggagagagaaaagatagaaataaaatattccaattgtcagtacagatctgtacagatcttttaagtgtcgattccacaagcagatattaaattaaacaaaaacttttagccaagcttccctgcattccatcacttgccttgggcttgggtcggcccatccgcatactctgggctatcctaacctacaaagcgaccttgtgcatcgaactttttgttgaggaaaacgccatggtcagttaggcgccgtctcgccgggtgttgtgtgtcttaccgacttctttttgtacgtcttccatgctttttcgagatcggggttcattgattcgaagacgtaacggaagaatctcacaagcaccttgtccaggtccctatgaccaaagccatagccctcgagatccttgctgactctctcgttgaccgcattgatcatgtagaagcacggatcctttaggattccttctttgcctcgtgctgcgtggatggtgtgcaacatcgctcgaacatcgtactcatgtgaataaactgccgactgttaatgcgaccacgtctggccgtgggtacgcagctcagaagtgtagcttaccctggtgctcaacaagaagcgaacggcttaggactgggagcggtgcctgcgcgtcaggtcgggcagccccattcgcagtcgagtggcctgctggacttgcggcggacgacattgcaaacgaattgtgatcaattgtcaaagaagggagatcagaggctgttggtgggagtccaagatgcgggaagatgggcatgttttatacctggccaaggggccattagaggtgtgcaatcatgatcaatcaattcctgaccctcgaccctcatccctcgttcctttgttacacatcttctctcccaatctcagaatctcaagtatagaaagaaaaaagaaatatacaaacgggtttaatgagtgctgccctgagcgcgaatcagaggctcgccggacacgacaagcttataaatcccggaagttagagacctagtaatagtgtccgagggcaggctgaactcgtccacactcagaagggaagtcttcgcatctagattgcctcattcggcacccgccatggcgtgccagtgcagaagcaattcccgtgagcgggtccggcatgctcgagccttcagtcatcaaggtgtgggacgagcacacggcggagctgaagtggaacggtagggattgtagctcaggattggatgccgaggtctgcttttggaagtgagagccttgcgcaagtggtagaactgaggccatggggcccttcaacttagaggcgacaggccttcaacttagaggcgacaggcccttcaacttagaggcgacaggcccttcaacttagaggcgacaggcccttcaacttagaggcgacaggcccttcgacccagaggcttcgacaaaaggtacctccagcgtgcctcaaggtgctttttgcgacgcgtgctcgaatcagtccgcggccaatcgagacagccgatagtctgaaatccctgatccatgcttgcttcgttctccactttgggctcggggaagcagccacagcattgcctgcaccgctagttttcaggtccaggttaagacgttgacctcgaacgtggcttccaaatccaactcagtttccagggcttgccctcatccccgacatggttgcttgcttcgcggtctgcccaaacgcctccgctgattggccatcttggcgtgctttgaggcctggttttggatttgaccttgccttagcgaagaaccggcaaagatttacaccccaagagacggatattcgccattccagcctcatcgatggggcaccgtcctgcattctgtataggagcacatcctacgcaggctgctgatgctccggtagatcggccgcatcggaagctcgtggaatccgccgccattgcatatgtatccgccagtaatgtttgcaaacgagggtcagaacacaccgcagctaggtaactatcgggacctgatgtggtctatccagtctaaggtcaattaccggtgctcgcggaccagggtatgtcggtgtgagtcagatacgaggtgatcaaacgccgaaaacttttttattccaagtttaacctgacgaattcaataacatcataattcgctagtgatactaggcaagcctcttacattaacagt

SEQ ID NO: 10622 - DNA, 983 bp, Emericella nidulans
tagttttgtagtgcaccaatgggggaaggcggggtacgctgtcatttctcaaactgggcatctgtcatatcatacagctgctctatctatgcgccatctcatgctaggcgagtactgtagccattggctgcatttgtccgtggtgccgggagcagcggtgcctgtcgaaggacgaggcaccccttgatgggaataagagaggccaacgccagcaatgccccgaaaagaacagcattttgacagcaagcgaagcctcacagcgtacaaaaacaggttcgatacttcatccgggacctaaagccgatgaaagcaagctgactacataacgactaggaggctctggccgcaatggcttccctatggaccggcctgatatcgggtctcttgcctcgcagaggagcccctggttgtttccaggcggattattgagaaatccgtctaagtcttcttcttgtcatcaagtgtcccaaccatcgcgaaaagccaatgcaaggtattactcgcgtcttttgggataaattgtaggctgcttctccgaacaatcctcaagccctcaccagggtacggcgcagcactcacaataatcggcggcgggcaacctccagatgttttgctatcaggccattgcggatcaatcagaatatcaatctccgtcgtactcacatctcttagcaggctgacaacaagtttattggcaaggtcactggcaaggtcatgttcgttagataagatggtagaggcaagagaagaagggaaggccaagaacacgacatcggcgctttgcatcgcgaccacgttcgccttgcccccgccactgacgaaggaaatgcggtctgcatcttgcaagaactgcttgtgcaggtgcgtttttgatgcggcagtgcaagtagtgtcaataaatcgcacatgtttttccggtgcattgcttcgcgcaacgaaaatgtggcggaggaaaccagtaaggcctgcagagcccaggctgc

SEQ ID NO: 10623 - DNA, 1745 bp, Emericella nidulans
tacgcaagatgcattatagccagtagaccaagtatcaccaatcggacaggttgatagcgatgggaatgagtgtattatgatggtgggagagaggaagagggggagactgagaatacagcagaggggcagcaacaaagggaagagggcgggaatgcagattcaccagccacacaattaattaagcgccagctcacagtggaacacacaccccaccactctagcctcactgcagtttgacgagtcgatttcatagttagtctagtctacccctcagccccagagatcctctacaccttaattgcttgtccactctttattttgtttacactttgcactttccagtctacgcgatttaaaatacccactatggctccctacagcaccgccgaagaaatggatcgtctacagctgtccgactctgattctgacgaactctgggactcgccttcgaaacgtggaaagaagaaattgaatcaggccgcggtcaagcaagaaaactccccgccacctgcagataccgaccgtgatgaagagacgctttttgaccgtcaagaagcgcgagaagctgccctccgtaacgaactacgaattgtgcgcaacgtcaatcaggttatagaggggctgctgggcagtctcgacaaggcaaaaggaaatatggaggtaagttcatgtcgtatcctgacaattgaagctcaaattgacggtaaatcagactgtctcacgtacggtcaactccgcctctaccctccttaacacctggacgcgcatcctgtctcaaacggaacataaccaacgggtcatacttaaccccagttggcagggcgcgtcacaagatatggccgacctagaaaacgaggagcttctcagacaacaagctgcggaaaggcgggaaagagaacttcaacaacagagggaagcggcggcacgaaaggctgaggaggatgagagaaagagggcacagtcaacgagcaccagaggcacacggattgtttccaggggacgggtgattcggagcggaatagggaggtcaccgagtgtatctcactcaaagaccagcacaagcggcacaagaactacatctaaaacgtcaggaacgaacccgtccacgacgactacgcggcgaccggtcagtgggattgcgcggggaccaggagtgacgcgtggccggggaaggcaatgaacttgagacctggtttctttcagagcaccaattcaatcgctcggtctggagcaaaatgatacccatgtagcattccgtgattccatattagaatttagagtaaagcccagtgtaacatcgatgaagcatttctgtattgcgccaagacatcaccgcctgacgcggtcgataaggacttgtatatgataacaacgaagctcaagaccactcaacaaccccagatcacttcacaatgaacttcgctccctaccaggacgagtcgcccgaagtggagcgcgcgttctcgccgtctctcgagaaccgttccaagtcccccgtcgtccgatcaccactccattctccctcgattcctgggttcacgtccgcgggcggcctcccatctcccagccagttcgcgagcagcggccacatagatacaagtgggcacggcaatacggggtacggtagaggggatgtgcagagtggcacctggaatctaggggcctttgcaacaagtcaccccattcggatggatgtcgaggctatgctggcatatctgcttcgtgctcctgccggagaggttttt

SEQ ID NO: 10624 - DNA, 1337 bp, Emericella nidulans
aggaattgaagggctcggagtgaaacagtaagaccaggatgtcagtaggcggtagtaggggttttaaaaaagggttatatgcagatggtgggcaggcaagccaacattaagaaatgaagtttgaagtcgaaaatggcgaccggcccagaagtgtatctaacgcggcaaaatacttattaatagatatatgtttgagcgccgaggtgccgccgccccgccgagaccactcaaaagggcgtatttgggtatgacttccaacaaaacactctgaaggtccagaatttcccagagctcccttcgattatttttttagtggaattattcatgctactttccaacataattaattaccctatatacgttgtacggatatatatatcaagcccctcaccatccgcgcggctccactattgcctatagcactgtaaatgcacagacggacactgggccgggacttgtccggcactccgcgcccgatagccgtttgaagataatgttctacccaataaataagacttcaaattagagggtagcggtaaaacgaacggctgccgttaggcatctatgaggagaaagcgctatcatcgaattgcaaaccgaaagacccgaataagtgtgtaacgagatcgagatagaaaagacggcgagcgccgagagagtagtgcatctataatgcaaaggagtcgaaggaaattgcagtgaagatacttcagcatcatcaactcttcactgctcggcctcttcatcctgctctagccttctatactgggtatcatgtggacggttcgatgaccccatattgcgactgactatattcgatatccaaccgcctaatccctcaggtcgacttccattatcatcctgaggaccagtttgggggcttttcccgttgttttcacccgtgacgttgggaggattgatgtttaagccgggaatggcactatctgccccatgctggccatactgccgtctaatgtcaagagacggcacaggtgagccagtactcataagagagccacgctccccttgagtagcgggtgtaggcatggcagtggttgcatcgccgaagagtacgtccatatcctccagacgaactccgcttgtctcaggataaagaaaccatactagtcacgtcagaagaaagcccatttgaactgaaagagatactcaccaacaacaaagctacatgcacaaaaaaatgcatgaaccaaataaagcctccattttatggcagcctgaagaacaggcgtgacctccccgactaaccaattgaaagcccagttggttgccgtgctgagactggcaccctttgcacgaatgctcaagggaagaatttc

SEQ ID NO: 10625 - DNA, 508 bp, Emericella nidulans
gaggatcccctatgtttttatcgagtacgttagacatgtgtttttcttgttaggaagctagttttccaactaaccaacacctccctctagcataaaatgacacgtgggcaccagatcaatcattaaaaaagtcttcaaaaattctcaacaaccacttctagaagtcagacatgaaagccctcgcctctcgatatatagataatttgcatatacatgatgactcaacaatctgacgcatatgcaacagagttgaaagatggacagagcaaggatacgatggccgagtggaagaggaattaggctgaggcagaagacaaagagactgcgtgcgagagtgagaagctttttcaggcttctcaggagctggtgctgcagaaggcctccgctggtcagagaagacggtcttgattacacatctatacgtcgctctaactcttgctacgccgatgcaattgcagactgcattgacttcatcaaccgctcctccgcttgacagcttctcattctc

SEQ ID NO: 10626 - DNA, 1594 bp, Emericella nidulans
ccaaatcgcagcgcaagtgagggtttagtgaccgccgggcgctaagcctgaggagacccagaggcccaagaccagcagcggtgataaagggtctagcgtactcgcgagtgctgcgagtgcgtttgatatcggtggtcgcggaacggacgaagatcttactgcagctttggagaatctcggattagatgatgacgacaactcttcctcttattcaaagccagccccagacgccgttgcctacgagtcatcattggccaatgcctgtggagtcaacttaaacactcgtatcctcgccttcaagccgccgcctcctgagtcatcgaagccgattgatctgcgtgctcagtacaaccgtcccctcaagtccaccaagtctaactcggctcagttccgccgaagagtccagaccgctccagaacgtgttttggacgctcctggccttcttgacgactactacctcaatctcttggattggagctctggaaaccaagttgctatcggcctagagcgaaatgtctacgtctggtctgctgattctgggtccgttagctgcttgttagagacttctcccgatacatacatcagtagtgtcaagtggagtggggacggcgcctacgttggcgttggcctcggtacaggtgaagtccaaatctgggatgtcgaagagggcaccaagcttcgcagtatgttcggacatgaatcaagggttggcgtaatgggctggtccaaacacaccttatcaactggtgctcgcagcggtcttgttttcaaccacgatgttcgcattgctcagcacaaggtcgccgagctggtctcgcacacatccgaagtctgcggtctggagtggaggtcggatggtgctcagcttgccacaggcggcaacgacaacttggtcaacatctgggatgctcgatcattgagtgcccccaagttcactaagacaaaccaccgcgcggcggtcaaggctcttagctggtgtccctggcaactcaaccttctcgccacgggtggtggttcctacgaccggcacattcacttttggaacaccaccactggagctcgcaccaacagcatcgacactggctctcaggttaccagtctccggctgagcaaccactatcgcgagattgtcagctcaagcggttccccgataactccctcagcatctggagctacccgactctagtccgcaacattgagatccccgctcacgaaacccgtgttctccacagctgccttagccccgatggccagcttctagctactgcagcggccgatgagagcttgaaattctggaaggtgttcgagcgcaaacccgggaccagcgcctccgcctctcgcgagggcggcgttggaagtaaagcgcagatgaccaagtcgatgactattcggtaatatggcttatcttcttcaattgtataggtatctggcatgccttaataattctctatctttgggttttctgcggcatggagtttggtgtccagaggcgttgtatttaggttgacgtatattgcattctagaattcctaattcacctcacatcatcgattgctcttgtttccttctactgtagacactggaaatcaatccg

SEQ ID NO: 10627 - DNA, 287 bp, Emericella nidulans
gatgatggccggggtagaatatcacgttttctttatgtcttctggtctgaactgtcaactgaagctggagaaagtacaaagtccagacctgacgcttgccaatcgacttgatcatcaaatcaaagctgttgatctgatatggatttcctggttatttctttataagatgtggcaatgaaaaagccctgctgtcaacaggcttttaaaccccgggacatgtttcagaacctaattccaccttttgggataaataatctgatacaaccggaatttaatgggggtttttt

SEQ ID NO: 10628 - DNA, 1764 bp, Emericella nidulans
cgagtacccagaatatggcggtgcaagtaaactcaccttctacactggcagtagacttgcctcggttctgcgcggggagcaggacgggctgcagctcatcttcggcacagcggagggccagcggcttgtatcgtggatgtatggcgatgaccgcataatgtggcgggttacaagctaatgggagagtttatccggcgacttgtcgacaagctacctccagccgcagccagagaagggatgaccttgagaattctcgaaatgggtgcaggcacaggtggtggcacgaagtggatgcttcctctgctggcagcgcttccagttccggtagaatatacctttagcgacatatcccccgcatttctagctcaggcgcgacgcaaatttcgcgactatcaatttgtccggtattgcgtgcatgatatcgaaaaaccgccatcagaggacctaggaaaataccatatcatcatggcgagcaatgcggtccatgcgacctcaaatctgcaggtgtccacgggtaatatgcgacaggccctgcgaccggatggcgtgttgatgttgctagagatgactaggccggtttttgcgatagacctggtattcgggttatttcgtggctggtgggttttcaacgatggacggacgcatgcaattaccaacgagcaacggtggaaagacgacctgcaagcagtaggatacggtcacgtcgattggacggacggcgaatccaacgaggtcggcgtccacgtgtaatttttgctactgccggaggagagcaatatcacccggtctcgccccaagaggatgccgcaagactgcggacagtggtggagtatgtttaccaacacaccgcaggctttacaatgccagcattgccgccacggatcagagctccagctaaccatgcatgcattttagtcactggggccacaggtagccttggtagccatttggttgcgcgcctcgtacagctttcgaatgttcaagctgttatctgcctgaaccgggtaagccgaatggggccgcgggttcgacaaaaggaagcagtggcggcgcggggcctatctcttgagtcaaaagaagagaccaaactaatggttattgagactgacactgcaaacgaccgtatgggactatccgttgagcagtgcaggtaccttcaagaaaacgtaactcacataattcacaatgcttggcccatgaacggtgccgcaccgctgtcgaagttcgagggacagttccgtgcgctgcgaaatttgatcgatctggctagatgcattgccactgctcaacgacacccagtccgattccagttcatatcttcgattggtacggtcaatggaggtggagcgctggaagaacgtacgcggattgaacaggtgatgagcaacgggtataacgaggcgaagttcgtctgcgagcgaatgattcacgagacgctgcagcggtatccggcagtattccaggcaacaattgtacggccaggacagatttctggatccgaggaaacagggtactggaacacggccgagcattttccggccatggtgaaatcgtcccagagccttggtgctttcccttcactggcggggcggttgggatggacgccagtagatgtagcagctcgtattatcgccgaactgctactggacgagggaatccccgaggaaatctatcacgtcgaccatcctacaggtcagaactggaccactgtcgtagacgtgctcgccgaggagctggaagccaccgaggtgccgttcaaggatt

SEQ ID NO: 10629 - DNA, 543 bp, Emericella nidulans
cgtgtggaaggagtatgctggatcttttatgacatgacacccggcactaacacatcgcggactggaccagagctgctgagcaactacacctaatggaacaggacgacggataacgcgcgatgattccacccgtatagacaccgcaaggaccgtgccaacaatagaatctcccgatttatgattatatgagcagttgatattttaccaagcaggtgaacctactgatgcgcccccagcgaaagagttcgcctgccgtggcccactctctacggcgcatcgtgatagcactcactcggataaaactaaagtgcgaagtgcaggctgcgtgtccaggagctcattatactgacagaatgtgggcgtgtggactagtacgttacacatcgatagacttgaccgatatagcagacatgtgtttatccacagtgaatggcgcgttgactactcaagaacgtgctcccaaacgataaagagaaaacaaacttgtctgaggtctgtagaaaacttcatgaactatttcgcttgttaggtttttggacgcac

SEQ ID NO: 10630 - DNA, 2273 bp, Emericella nidulans
taatctcaaggctttctccaatggtcctagagcgacaaactgtgccagggttagcgcattttcgaattactcggctcgattccgaaggagaagatattgctgcacctgcacacagattcttattggagtaagacacattcatgtcttccaaattcaagcggtccgcatccatgaactgggcacaaatgtttgccgagcttcaaatatatgcgacgagaaatcacagagaagccgtcaacggcccaaaccattcagcgcacgagaaactttgaaccggctgatatgagtgagcctgaaagtccggtcatgctctcttgttacctgcgacttataggacatctctctagacagagcgctgccgttagggattggatgctgcatcactcgtcttccaacatcgttagcaccctcctgacgctctgtagtggccctctaccctctcacttacgagcaacggtgtttcaagcgcttgctggcttgatgactgataggagcgttgagaatggcaatgagatgtggcttgcaatcgatcaatggatttcgagtggagctatgagcgcatccgcccataacaaagtgccccttgtctcgaacccactcatctggcatgaacagcaggcatttgagaaaattggtgaaagctttgaccaggctaatgcatttgtggtacttatactctctcttgttgccccggccatcgattcagccgagtatgccatctgggtaccctttcctgaatcgcttggctcttcctatcgtatgccgggcattgagccttacatcgacttcatcatgggccaggcgctctcgagaaaagtccccgatcttaacgaacgccaatctcggttgctcacttacaactctttggatttcgtattaacatgtctaagatccttcaacgaaacaattgtcaccgcgctcaatgagactcccgctacagcggagccaatctcaaaacatcggctcttctctcttacgttcggctccatcccttcgctcgagtagctgaatggctatataatgaggacgtaattaagactatctttgcaacagcaaaccaagagatagccgacatatcaagagcttcgcccgactccgttttggtttcctccctggtcaagagcattgaagttatgtgttcgatcatcgacctccagtcgacctatctcaatattgttaggccattcataaaatcgcaacctgggagcaggctcaatgttgcaaactctgcgctctccgcattcgaagactgcatcttgaacaacttgcaaatcatcccaaaattgtgcctgtattgcggtacgggccaccaagagcttacggtttcttcgttggcgcttttggcgaagctatccagctctacgcggcttaacaaactttctactcccgaactatccagatggcggtcatcgaccaagattgtcgaggttttgagtgctgagaatttggacagtctatctcttcccttcatatctcaaatggagcccgaagtaagggaactcgatgccgggccgcaagcctcgggctacctcatacgccacaatctgttagaacttcttaatagttctttgactatgattccagaccgacctacggttgcccacttgcttcttggctttggcagtgtaggaaacgttctcgatgtatcctccgatggtttgttcgccgccgggaggtctctgttgcacgccatcctaggttttgtacagacttaccctgaccaattagatgacaatatcgtgtcatggatgttgcacttgaaacgcacggctttcgaggttctgaagcatttatggtcgtctaagctctcctcttacttcacgctcgcagagatgcgtgccagtggattcctggttagcttattcgcgagccagcctttagttgggccacacaccttgtgggatggcttaccaatcgctgcggacgaattttgggtatgcgattcgacagatgcccttgccgaattcttattgtaccgaagttatcttttcgactatgcaacaacggagattcgttctgcggcaaagatgggttcgcctactttactagaatctatcctcgctacgttgttcggaaattccactttagataatggagccaccattgcgaacccaacggtctatgaccttttcgatttcgcagatctcgatgttcagttccatgccccgccaccgaatgttgaataccttggtggacacaacattgacatttgcgagaagccggtagaggacggctctcttggactgtttaacggagcacaggtgagtgatacc

SEQ ID NO: 10631 - DNA, 598 bp, Emericella nidulans
cttctccaatccttcaagagcgtcgtgtttatgctggtggaacacgcagtgcttctgaccacagcagcagtggtgatctgcccgactggttgccgtggagtgggcaggaatgtacacctctgggtggctcgtaccaggcttggattccattgctctttggaattatctacctgctacagatgcaggtagaccaggaagggagttgtactgcacgagttatgagtcggcagcggcaccgtcccaggtggagcatagaactggtaatgcagagtcacagacttgcagtctaccagatcatgggaggcgtagcggtgactgaatagtggatgcaaggggtaatgagaggggcagtcataaggattcaagagagagactgttgcgattaccatacacacttgtccataattagacgtacatgaaatatagttagcttagtatgcctggaggcacaacaatgaccccaacggcagctaggtcatcgataagaagagcgcatagatagaccaaaaggcgcagagactaactgctgttcgaaccttgcgtatcatataccactacctgtgtactgggttcactacgcagattatcgatatgtgat

SEQ ID NO: 10632 - DNA, 1802 bp, Emericella nidulans
aagatcccgcagtgtttgtttcgcggtctggtcgtcctgatgaacctctgacagaatcctctgagccttgtcctcgtaacctgcttgtaccagccatcggggtgtcttgggcaaagccacaacaataatgagttggaacactgccggaagcattcccaagccaaccatccagcgccacccaccaccaacgtaggagaatagccagccgatgatgtatgctacaacctgaccaccagtgataaaaagactcagtatagtgaccaatctccctcgcgcatctgaaggtgccagctccgatatatacctgttgacgatgttagctgtgtaatgatttatgacactgcacttacaaaggtgtaaccaggctagcactgccgaccgcaaagccaacaatacttctcccaatgatcataccccatacttcaccggtagcagcttgtatgaatgaccctacagtaaagaggacgtccgcgacaagaataacccttttccgaccaagtctatctgccaaaatgcccgccagcggggcttgcgatgagagcaaagagacttgtgcacgacgtaattaaactcttatccaaagttgtaagggggcggttcgagagatcagagtcgatagatacgagcgtggacgatatgacaccggtgctgtagcagttagtccagaccagagctcaggtgtcctgacgcagtacatactcatatccaaaaagaagaccgctaataccagcagagaaggtcaaataccaaataaaccggccgctcgagtgctttgactggtcttcgtcatgttgcctcagtacaggctcttgtgcgaggagcggagcatgggcggcagatagctccgtatcttctctgctattcatggctgaccttaatcctttttgaggacattagtgactgatcacaggaaacgctgttgttgtatatctagtattgctgcccctaaactggtcgtgagcagtgagttagaccaaattatggggtaagctccggagtgtcgggcttacaagacccactcggccgctgttagaagatcagatcagatgccaacctcacgagcactccaaagggcactagcatactgaaggcggatttataggtctgtatatctgtatctcgctgtgatctatatctcttcgccgtcaactacaattcaaatattacctaaggaaattatgtacattagaaaataaacagtccttatctgctctgggatcgcaccttcatccaaccaggagcgaccacctcatacccataaatacagacgaaatccgcatctacacacactgggtctttgggctcaataaaaaaggaaactccctgttcttgtttgcgtgcctgtccctgaatgtcatctgagcttttggacagtccatatgcaacccaacagatgcgccgcctcaaatccacgagtccaacagccatcgatgcctttgataaagcacctcctcgttgtcagacaaccaccgccgattccatggtatgtatgggcgtcacaggagaatgtgggtgtgtagctgtacctgttaaatcttgaaactgctcgatcaaatcagccactgttcggaatcgacatgtttctccagttgaagggtgtgaacacgcaagcataaccaatttgacatgtccatgattaggaagcgggcgttaagtcacgatatgttcaacctcgaacatacgaccggtttaggtcagcgtagctctgttgggctttaagataccctgagacagtcggtacggacagacacactatgataaggccttctgtagcagattatccctttagtagggttaattcg

SEQ ID NO: 10633 - DNA, 2266 bp, Emericella nidulans
cacgaaacagcttgttgttgaagtacagacagacctctggaatcatgaagtggccagccacaaccagtgacccgagtaggttatctgtagcgtcgttctgtagctccagcatcggagcctgggctcctgtgaggatcaccggctttccgaggttctgcagcatgaagctcagcgccgagcaggtatacgccagactgtccgtcccatggagcacgacgaagccgtcgaacagtgtgtagtttcgctcaatggtccgcgcaatctcagaccagcccttagcgtcgatggagctgctgtcgagcagctcatcgaattcaaagacagtgtacctcactcgccggccgtatgctgtcagcggagtccgcagactcacatgagccttgatctcccccacggcgttggtcaccacatccatcatagtagagttcgacccatcgttgaatgtcggcacacgagccaggcattgtttctggaagtctcgtgctggtactaagcccgctggcgacggtcgcatacagatagtacccccagtcatgatgatcagcacccgagactcgggcactgggggttccatgtggccttcggccaattctggaatcgtatcatcggcggcgaccatgttggcagtaaagtaacccagtaggggataatccttgccaactcaacagcgtctaacaacagaatcgacaacagtaaagcagtccttggcgagtcgaacacgacccaagaatagcacagataaggtgtagtatcgcgatgggtcccgagctgaaaatctttccgcgctccaaatgcagtctagatcagccgagataagaatctggccagacagtatcaaaccgccagagtgattgtggttttttgcgccttttataggaaagtgacaggagctcagggagacagtagtagcagcagtagtgcgagcatcgttccctcgttttattctctctggtgttgagaaagtttttagcagcggcctattacgtacgggatgcgcctctgtggacgcgggcaaggagatcctggagccactccgtgttagtgtaccgctgcgagatttttgttgccgccactctttcctttcgagtatctgagacaaggacaatgtccgtggttggcttccgacgtcggcatatgagcttatgcatgagttgacattcgagagatgacgtcgaactcaacccgttggaattactgttggccagaatgaagtagaagttgttcaatcagcaggcgaaaaagaaaatcggactgtgccattgattggagccggcctgacttcgggaaaatatatctagaaccagatacggcatcgagttcaagtcgagctggcccaatttggcgagtatatccctatcacttcaagatcaaaagacggtggaggcaaaatctaggtacgaagaaaataatcagtcggtcttgtgacgttcctcgaatcacgggattcagggatcaaagcgacgacactataattcgtactccatactgggagcatccaggctcctcgtaaatgcagttagctgcaaggcagtaatattattcctttggactgggatgtcgctgaacagttttttttctactcttcggggggtgattggctttttagaattaatacagcacatcatacattagcagaccagtgtagtcatctgagcaatagtgctacctccacatcgatccttgacataggggccgctgagccacagactgtctttagacacacaagtctgacagcgaaaagcctgccaagtgaaatgtctgactgatcgcatgacgcctgaagggaacgtgcaactgagagaggtgagcatgcctacaatgtctgtaactagcattgctgagaggcttgaacctcagcagatcgttggatcgagaacgatctatgcgcctggttgcatcgaaacccacgcaggatttaccctttatggtatatagcccgtgacgtgcaactgagcgaagccccacccattcgggccaaatgtgtccagatacgtcacctcgccatcagtgggttgtcacgagaaaactccggaccgattaaaacctctccaagttagtaagtacagcttcccccagacccttctcgggctcagggactctacaggcgaacccgtcgccaacattccttcttggtcacctcctatggtccgagacaattctctggaaccctccgtacacccttttaaattcatctggttcccaagccctctttctatttcccaggcgctaatctcccccttcttactcctccccatgctcatccttc

SEQ ID NO: 10634 - DNA, 2041 bp, Emericella nidulans
gggctttctgagctaatggccgtcggtgataaaagttctgtttttgccacattaagaacgtaacgatttctcatgtccttgttgggaagggtgctgggcaatgatgcagtaagggatctggctgaggcgcacatctgcatttattctcccttcctcagctcgccttgggcagaaatattcctagacggaaggaaaaccctttgcaggaggtggttgatggcctcgcagaagattcgtcaagcgtcaatgtctttgaagctggactttcaacttcagctcagactctgcctttaacacaagtgataaatctggcctagacaagggaaataccaggctgaccctgactccagtctgtaacgactcgcatttaccacgggaagaaaccaaatcatgtcgtcgcactgtccagttgttccccaagcccgcggaagagagtatcaaaataagcagtgtcgaagccctggaatacccagttgtccacgccagctgcagcatcaggaaacatctgatcctgcatctgaacctgttgcaggaagcagtctgctgacagcaggtcatccgtacattattgaggtaaccccgtcaccggtaattgcaatgccgtattgtcgctcatggtgtcaagactcgggttgccaacttgaggggctgcatttgcagggttcgtggggctctgaacgtgaattgatccaagaccgccgagtgtgacgcttgcgccttcactgggaaccgaatgatgccctaatttagagtgcggcgtaatcgtaattccttgagaggagacacggaccgcaccaagatatgggacttgaatggagagctcggcgagccgcacaatagtgtgctccctggacgaatgtcgtccttgtgcagttactgcctcaataaccaatagttctctgagcaaaaccgcgcatttggcggcaagtacatcttcttgcagttctaacatggacttcatgcagtcaagagcttgctcgacagccgcccgatcgctcagtcgttcgtggatgagcaaactgctattgccgatctctttatgaccatggctaacaatgtgcaccagcatcaatgtcatacctgcagtgagagcgagaaagtcgccaatccgtgaataagcagtgaccgggttaaacgtacgaaccgcaatttgcctggccaagatctcgcggctggcactgaggcaggcgagtctcgagtatagaacgtacggattgtgactttggcacagaatgtatggaaggtgaagctggttcactaacatgtagtagcacatatgatccatggcccggcgactttcccagaacgcttcaaccgattccacttcaagacctgccagggcgagtggccgccagaacgagggcggcaatttctcggtcatctgaataagttcttgatcgatttctttggtcatatcgcgagccgcctgaagagttgaattcaattggttccggtggaggatcctagaggtcagatgcattacgagcgcggacaaatcgccattcgttgcgcactgagtagaggttttcgcatcggcagtgctcgtgggtagtcccagaagcagggataggaaccgctccatggagacgacgcaaacccacataacagcagggtcaagactgttccggttgtcgataagcttgaaccgatagtggcccggttggtgcaggcccatcagatgagccgccataacagcacgacgtaatgtgatccacgctcgtcggatgttgccgctgtcaatatgataaaagctttcaagaatgatgttctctaacccctccaacgtccccaaaagttcgtcgttcgatgtaaccatcctgatggccgactcggctagtctttccattatcaggcgatggccctcattgagaccggggatttcagcgtttggcgaaatgtgctgcaatgcggctgcgaacagaagcatttgccttcccagtaaaacaggatgcgtttctggatggagcaaggtaggtacttgaatttgctccttgaggagctcctctggtgataagcttttgaagttggatctatagctaag

SEQ ID NO: 10635 - DNA, 516 bp, Emericella nidulans
gtcgactctagaggatccccctccttccttaaggttgatagcatgttccctgccacattttgggggtaatcctatgcggcatctcaaacacgttttcatgccattccaacaactgtttcacttgagcatcctcaggaaaattttgagtcttaattcctcctgcaaaacagtgcggtgactctaggagataataagccttccttccctctttgactaccgaattgagagagatttgagctcgcaccagtgacggatcgcctgctaaggtgacccactgatcttccctacggaaactcaaggtgtgtcttccccaattcattctggtgtcacccagagtagccaaccacgcataacccagcactatatccatggttacaggaagaagtccgcacgtatctgcacatcttggaccgttagctctactccgctgcatttcccggcacttggaacgacttgaccatttccaatagcaacctcaaatccacgagtttctgtgatttgcagacacaccgatgt

SEQ ID NO: 10636 - DNA, 2219 bp, Emericella nidulans
tagagacgaagacacagcgagtatacacgggactacaacctcacaggaagtcgataagccttcaatttcgaatcccgggactccagtagggcagggacccgacattccggccattgtcgaaccgagcacggcggaatcttctcaatctcggggaagtcggccacctctgagtcgttcggcctcgagcaatagattcagctcttcaccaatacctgaagctcaggtcaatacagatgaaggcgccgggccaagcatcatgttcgccacaaacatgtcgcctcctcgatcgtcccacagagccgtccagtccatctacaaacgtcgttccccctcagaggtatcatcagataaggcaagcgcatccggatacccgcagcaagcttcggtcgcgctatcattcaatgagctcccaagtcgtgcgcaacatctgatcttaaatgagttgattgctaaacacagcggagacaccgctgttgtttttacgactctgccatcgccactcgagggcaccgcagaaagcgaagccgctagtcagtcgtatctgagtgacctgagtattttgtggcaaggcttaccacccaccttgctggttcacagcaacagcatgaccgtgacgcttaacctttaacgagctatgataatacgtaggaaggatggtggtgaatacagctccgtgcagaatacgagttgataggttcaatacttgccctggggttgcacgctactgtacgaatggaagaacacttaacgagctatcatacgttgggatataaccgtatcctcttcgccttcggttttgacattggtgggcatggatgttgacatcggagaatacattgtagcttcagtcccgtgacattgcttgttctgaactcagaccgggttttcatctggttttgtgtggtcgcagagctcttactcgaatttaaaaccagtcatagcgcagacaactgtagctggtctcacatgcccctccctcaggatctcgaaacaggtgagagggtgtgataggcaaacgccggggcatcagacacccaaggatcgccaccagactggggagatgatcagcggtccgccaatgaacgcggagtgtggctggaaaaatgggagcaaaatgggcacgcacggcggtcaagcggattctttaatcaggccgccctagcctctttggctgcccgcgctgtcaccaagaaccggcgtctgttagcgcagtgaacaaaccatggactgcttccacggcattcggcatatggccacgcactttaccagtcgaggttggatgttgtcccttgagggggatcttgagttcctgagttcctgaagtctctgatctctaatcaaaattcacattagattcagatgaagaattaacgagttactatcctgtatttggtacaaccctttgctgatggcaaataagcatacagtccatgaaagtagactactgtaagccgtcgtcgaggtcacgttgtctcgtgcagcagcagtcgcccatcgagtctttcaggaatcctccaccaacgcccggatacatatcacccaaattaaccaacaacagaagaccgttgacaggcaaaaccaagaagatttgggtaaccaatttagcccagcttctccttattaatattggagcccgttcttcctgggtcaggtcaaaccgaaccaacccggacagggcgcaatatcataatcttccattccgacccctctctgtccgccgttcggtgttcctcactccacttgcagctcgctgctcgtcgttgattcgactcaaattattctgattctcactcctactgccttctctcgtggacggtggataaccaagtctgaaacgttcagacgttcgttccccttcagactctttcccaccaaactccaaccttcccgagagcctccctccccgagtccgcccttttctcgccagtcaccaatgtcgttctaggcgataccgcttcctctgtcgtgtcaataacgcggattcccgccaggtacggcctctcgtcctttctttttgattgcttcttggtttctttcaccacgttcatctcccttgccgccgctttaacccttattgtctctccttcccccgaacttcaatagtccaactctccggctccctcccctcgtctccatctccaaccattcgcccccagctttctcttgcctctgttgttttctcatccgtccaagcctcgcatcactttttatatttcttt

SEQ ID NO: 10637 - DNA, 575 bp, Emericella nidulans
ggtcgactctagaggatccctaacgaattggtgtggtatattcatatcataacatatgaacagtaagaactagcattcttattgagactagaactcatagggaagaaaatcgatttatggatggaatcaaatatgcagtatttacagacaaaagtattcggttattggggaaaaatcaatatacttttaatgtcgaatcaggatcaactaggacagaaataaagcattgggtcgaactcttctttggtgtcaaggtaatagctatgaatagtcatcgactccccggaaaggttaaaagaatgggacctattctgggacatacaatgcattacagacgtatgatcattacgcttcaaccgggttattctattccacctcttagaaagaaaagaacttaaatcaaaatacttaatagcatggcgatacatttatacaaaacttctaccccgagcacacgcaatggagccgtagacagtcaagtgaaatccaatccacgaaataatttgatctgtgggcagcatcattgtggtaaaggtcgtaatccagaggaataattacgcaagcatagaggggga

SEQ ID NO: 10638 - DNA, 2455 bp, Emericella nidulans
  unsure (1)..(2455): unsure at all n locations
gctgcctcggatttaggtataggttcggctgaactctcgacttctcctgcttactataaactgctcatcggggcgtatgttaaaaggcgaaagttggaaacgcacacgatgtcgcagagatcttgtatagttgaaaaaggactgaaatcaaggtataaagagtgagcaacaaaggcctaaaggaatcccgcattgtttcaagctatggtcaattagaagcgcacagcgagcattgagaggatataccgtgacaaagctggcattctgagttgctggaagaagattagatacagtaatacattctttcagctggttcaggccaagggaacaaagaacggggaatcattatatggccaacaatacttccgctccctgcatatcgtcgtcaaaccagtttccaacaaactgaacatccacacaaagtctcttcaggaacccctctacctcaccaaaggcctgctcagacctagctcgctgagacagaaatcttaatgtcttccctttactctgactgctccgccatgtcatttaggacgaaggccagatacatcgaagccacagtggcgtcctcaacagcctcctttgcagcctcaaacgcagcaaccaattacgctacggcaacaacatatatccggacagcgctggaagcaattgcaaagactgcaaccggccggatggatgccgaatcctgtgcggctgtcctaggaggttgccttgttggagcggaaaccgctgcgtcagaggccgcaaaggcagcagagaatgcgcgcgcggctgccgtgatcgccgaagaggctgcctcggctgctaccgaaattgcctatatcaatgtatctggatgggctttaaatgaaagtttctccgcgggtactgacaatattagtgtcctcgatgatgaggagttcgagacggatagcgtgcttgcggaatggaccgctctcaaggctgactgggccaaatatcctggagaagaagaggttgaagatgaggataatgagtacgatactccgtgtagtacagggagctacgcatctctttacacgcttgcccacgacgaaacaatcaaggcgcagcaccccggctttatcgtcattggagcctctgcgaaaccttctttctccaaagattaactagggttcccagatcggatgggttggcgcacttttgacgcagaacaactcgcaattcatgtttacagcttacagcgaaatcatagagtacacctcttcaaggcgctcgtcattgctgaacctctagatgaactattttcggcggctccatgaagtttttcccgtcgatattgcgtggattacctgagattgcgtacgcatctcttcctgatgttggaaaatagctggattttgatgttctcgggccagtaattgaatgcgttgagatgagtagttggaaggcgttctatattgggaggaacaagagggcttgcattgtcaagaatggaatgaaggtctcggtgatgatagcgaggttgaatataacttgtggcgtactggtgagtgctttaatccggttctttaatatatcatattttctttgaaagaaagtggtattttgtatgactgtatcgtgcgctagatttgctattaagcaaatatcagggaagctatattatgccgctcacctggactaattatgcagcaagtctcctcaataactaagaatatctatggttctttccgttagatactttggcttgaccagtcctctaaaaaggtacttacgagataattggtctatcagtctgttaacaccccatccatgagagggcagtgcatgccagtctcaatcgcattgataatttcaccgcgatgagttatctagagtccataagcattggcttacctatccacattgaagagatactgtattgtacctcctaaaacgatgaacccttctagcggactttgtacgtcagtcatgaacacgtatgtggtgatagacaggctcaccaccatcagttttagctgcgttctgaaatgcttcagcgatttctagaaggaatgaagactctgcctcctcgacactccatacttttgcccgtaaaattgacttctgtatcactttatcccgacattgtcttatccaaaggcgttgggaatatcctatagatagagcgaacctatctctgtacgactctgaaagtgcgtcagactgttggcaactgatcaagaatagactatctgagctaccaaactctgcacttatgccaataatggttacatcaaacagttgactaatttggatgcctaacatccacgagcctagagttaatagccatgtgcttgactagaatgacagtcacttgcaatatcagtaaggcagatagatggccaggcacgtcccacctaagggctatagtttgcagttgcaactccattttttgtatgcttggacattcagtcatgtaatggttagatgactgacgntacagctttgc

SEQ ID NO: 10639 - DNA, 597 bp, Emericella nidulans
aggtcgactctagaggatccccttcgatacagtatggcgctaataatgaaagtgattttactgcaaatgatggattggattcttcggccgctgaagaagagatattagacactggatttttaatagttccttatgctggatccacacaatcccatctggtatgtcgtctactaatactcttaacaatctgtttaaatggtgtacgtacatattcgcttaagaagttagttaaactatgtttcaggatagaggaaatattgttgttggtaagagtgtcttcttaggttcaatgtctgggactgtctatgttacataggaagagaggcctgtggaagaagctactgttgacaccgagatggaagaagttccatctaatgtgtctgcaagagtttcagatgtagatcttctggtaatcgttatatacagatttccatgactatattcatatatattacattaatttctccacttatctaacgcttaactctatggtagcctatgtttcaggataatggaccacaggatgttgctgaacctggcttagttggtacccatacaggggccgatgaaatagctgatgctgacatagagatggta

SEQ ID NO: 10640 - DNA, 588 bp, Emericella nidulans
ctacacagacctgcggcatgcagaggagcagatcattattacccgtggtggacatggcctgataatcaggctgcagaggcgggcaatttgagataggagcgaaacttgctagccctccctctgctacatttttattccttaaaggctgcccgccaaagccgtgaaagtggtcacttactcggtgcggatctcccaacaagaatgggagaataccatgctgggcatgcaagacccgagaattcgtccgggaattacaagctatgtgatccagccgtttgtacaacaggtcggattcgctttgatcggggatgaaggcaaaaagatcgatggttgccgcatggttgggtgttattatagcatcaatggccgctttctcggtcttggactttggcgttcaagtattcggaaagtgtgcaatgtatatggcggctctgggtgtgtgcttttatattcgatcgctcatgccgatatcgatgggtgatggaccggagaagacttcactaataggtgtaagtgagagtaccccaatccaggaaaaaatgcctaaataggaggctgcactcctcaaccgtgttaagaacgtttata

SEQ ID NO: 10641 - DNA, 606 bp, Emericella nidulans
tgcaggtcgactctagaggatcccccaaaatcctccaacatctcatccacttttctcttctcattctcagcctcaatctcctcctttttcttcttctccttatgtggatcctctcttcccacaccggctctcgatcttcgaatatccatagtcactggctcagctctaccagagccttgtttaccaagagcagaacctggcttgtaacccatttgcttcaatagcttaaaccctatgttagactctcctattggagtgtctactatacgagccaatgtctgctcatcttcttctatctgtttcctctctttctccaatcttcgtctctcgtgccaattgagattttttaacttcttccgtgatggttctacgattacagttttcttctcagattcctgcaaaagcatttatatacgaatttaaatataatcccaaaatctcattcagctatcaaactaaacgaaatttgttggagattattcaaaatcagttggacaaatttggattcaggagcttgacaattgtggacataagaagatgaaaattttggcctgaagatacctttcttttggaggtctggctaagtcctgaggaataactgagaaa

SEQ ID NO: 10642 - DNA, 624 bp, Emericella nidulans
gcaggtcgactctagaggatccccccaaactacacaacgaaaacacataaacaaagaccatgaattagagccttccgagttatctatcatatgagatatgaatagaaaaagaattagtctctaaactaacgttttgtaggggagcttactgtactcctcctcgatatcgagcagtataaagtcatcgtacattgcaacttcgcttctcagctcaaccattttggcctcgtctttggttttgcctataataaatctaatggctaatcctgttgattcttccaatctgcaaagaacaatggttttttcagtgagtgtactcagacgattgctaaattcagtctttaaatgatgcaaaagttcattactttgtgacaaattgattccagagaatcctaaagctatagcagaaatggatcggacggttgagagaaggttgaatcagtaccttcgaaggccttcgggatcggacggcatccatgtgttcctgagagctcgtctccggccagcagatctgaatccggtctggattcgacgaatccatcactttgtgctcttgacttcgcattaacgatctattacagcgacgtccagacgattttacagcttcggtggcagttggtgagc

SEQ ID NO: 10643 - DNA, 448 bp, Emericella nidulans
gcaggtcgccagtagaggcctgcgtattcaggttgatagtatctcagcttctccggttattattagctatcgatatagggagtttcgcggcacccctactggttattccataattagagttcgagtttgtgaatgaatcgataacaacctagctgtcattagatctactaaccaatagtgtcctgagaatacctgggtcctagctcattattagctcgtgttcaacaccgtcaacttgctgtctttctacgtggttctcttctcagtgcactcatagcctgctagcttaatctcgacattgaactcgctgtttaaacaagagaatcccgtgaattcgatctctaaaatactacgattgagctcaggtttgagagagtcgttctaggtgatttgaacgttatcacattcggcgccgcttgcgaagttcttgggattcagatgggagttt

SEQ ID NO: 10644 - DNA, 575 bp, Emericella nidulans
gatccccgttctgtaagttccttaatgcaaggtgaggttttttaacaaagtaaacaaacttaatagaagttggatgtttcatgtcaagtcaaaaacaagaaaacaaaaacggtttcatggttctaatgttgttacctgggccctgtttccttcactagaaaggtctgacaacttctccacattccagctttccacaagatgttgcagtatatcagcatagtccttggcagtgtagacaccaagcctctgggccacggacgagaagtgatcaaatagattatcatcacgaccatcatacatcaaatgagcaggcatcgagatctttttcctcatcatgtcagcaaagcccacgactgtggtatcaggatcaatttcaaagagcttctctacaatcttggtgtaggcgtgttcatggcgcctctcatcagcagcaatggtgccacaaatcttcccaagtgtcaagtctccaagatcctttgccagtctagcagtgtttccatgggagatgaatgtagctctttcttgaaaagaagtatatatgaatcccaagtaaggattgttttcagtttttggat

SEQ ID NO: 10645 - DNA, 2773 bp, Emericella nidulans
gcctttccaatcagggtgaagaacaagcatttctattaaaatagctattgaatacccctttggcctccttccaagcttaaagactagcaggcggttaaagaattaaatgaaaagacccccgaatgcaagaaactcgccaatcaaaacaaattcacccatgcgttcatcataatttaccgaagtttcggaggtgagaagagatcaggtataacattcatcatcgttcatccctgggcattgcattctctcttgctgttttttttttattccgtgtcgggtcgccatatctgcctcgtagccacagttccacttgccgaaagattccaggttaggggaatagtggcttgagcatcaacaaccccattacgaaaggtggaatgcgccttgtccttccttgatcgccacagatagacgctcccggaggacgtccagactgctgtagtcgggtaacttcaagtagtttacacaagtcatgacactgggaaggtaatcgtcgggcaggtagggcggctcgctcgggcgacagacgacggtgaagatcggcgtaagactcttgaagcctagagcatggttagtaaatggagtcctcagataactgcgtgcttcgtgtctaagcttacctccaataggcagtttggggctcccagtaacaaattgaaggaagtcacgccgttgttgcgtgtctagttcactcatcgtctgtagcaagttgcgcacgctgcgactgtccatgttgaagccgtgatccgcttttatagagtccatcagggctaaagataacgttagtataataagcttgtctagcctgaatgaagacttactctcaattgaccagtcttcctcagctctaccaaataacattcgccagttcattcggcgtgaaagtctgtagagcggaatgggggaagacttgggagaagcccgtgcggaaagcttttacctgtgcttgttcgccagtgcccaaggtcatgtcctcaactctgtcgacatacgcgttgacattttcaatcgtaatcggtatattcgagccattcttgatgagctcaattgcagtatatccaggaagtgtgaaatccaggctctagtcctcgacatggactccatcgacctcaatcgccatcagagcctgcgtcttcttggccttagggaggttctttgcctccaaggcctttttggcattagcgaagcgtttcagcaacagtagagatttggccaaatcttgatccactgctttaactgtaccgagtgaaggggctactggggaagaggtgtcggcgatacggaagaaggcgggattgaacgagatgtctatgatcctcgaatccaacattgagcgagcgacaaatttcccaagggttttgaacaactgcaactgctttttgccaaattctgacgcgagctgttcttcgctcagcggtgcagggaacagaccccgagtaccaaacgcgtattcttcggaatcaccgcagtcgttttcccgccacatctttagtttcttcttcgaaaactccttggagaccgtcgaatagaactcaagagtgggacctaagccggttccaacttcttcaaaatattcaacctcaagcacactgggagaggagccgtaaagttccatgactttcatggctgactcgagaatacgacttcttgagatccgtactttttgtcgctgcaaacgacccagcattggccgatcatctcgccgctgatcatgacgactatcatctccctgagagttgttccatcgcatcatggcccgcgaatatccaaaggcggtagattgaaggaatagatgccgggtctcgaaagggaacaaaaaggcgaaggatcgcgcaaggtcttcgctccaatcaggcagacagctgcttgcaacaatcaaaggctcctccagctgtctattaagttttgcggtgagcttcgtgttgataaactgcgccaatggctcaggcttgagggcgataagatctttggtctccgcgagtatatcgtcgagagttgtgttcatgccatgtaggacacgaagaaggcgcaagatcgaggatgtgatatggtcttgattgagagaggacggcataccgctgctattgtcttgtggattggatccggatgcgttggtggataccgtagacggctctgctggtggcggccccggtacacgtcgaaagctaactgtgtgaactgcggaccacacattccgtccgctagggtccaagtggcgacggttatgatgaacagcacggtagatcgtagtgtcactggaaacaggctggccgtcaatactgaactgaatgtgccagtcagatggggccgaagccatggcggcagcataagaaaacgggcggccagccatgcccaaagagccagcacccgctgaacttaatgaagaccggcggggcccggatgatgacttggacacgggtgtcgattgcgacggtgtagatacgcgagtgccgtcttccttgcgggcagtaactttgcctgatgatgccacctccatgtttacagcggatggatcatgcacgttctcatcagacatttcttcctcaagatcgtccacaatggcatttagctcttcatcatccccctcgacatcgtcatcattatcgtcctcactcaagtggcgctcgtcagcgcactccagtggttcatcctcacggccgttgtcatcaggctgcggttgagaccgcttagatcttggggttaccttcggtccaccagcaaaatttttctttcgcggaggcctaaactcagaagtaggggacctattgggggg

SEQ ID NO: 10646 - DNA, 635 bp, Emericella nidulans
gcaggtcgactctagaggatcccctgatattaatttattttatttatttgaagaaacaatgaatggtggtgatatttgcttggcagacagtgcaactagtcatactattttaaaaaataagagatatttctcttctttgacaatgaaagaagcaagtgtaactaccgtaacaggtagtgcaaagataattgaaggctctggaagagcaaatatttcaatgcctatgggaacacaattagaaattgtggatgctttatactctcctaaatctcaaaggaacttattaagttttaaagacatccgcagaaatggatatcatattgagactatgagcgaaggtaatatcgaataccttcaaatcacaagtaatatccaaagctctaaaaatattctcgaaaaactacctgctttctccactggtttatattatactacaattaatacaattgaagtaaatgctacagtaaaccagaagtctacagaaaacattaaagtttggcatgaccggttaggccatcctggtacaataatgatgcgaaagataatcactaattcatgtggacattcattaaagaaccagcagattcgtcctaatgatttctcatgtgttgcttgttcacaaggcaagttaatta

SEQ ID NO: 10647 - DNA, 581 bp, Emericella nidulans
cttcatcaataggtattgcacagcatctatgcgcgcacgcaccaaatttgagcttgcactacttgcaggtacctgcgatgaatcatgaattgagccttcaaatatacattatgatgagggaacggctgtaatatatgctcggacggatctggactacactggatgatatatctactgtgatgtacaggttgtgcgagactgggaggtggattctatagccaagcacgtgaagcggtatatcggtaggtctctgaatcatacgagactgtcctatccagaatcattgcatataccatgatcttacacaattctgggagattgtacgtgagtgcggttatttcgttcatagggcaggctggacgacgtagctcagtattctggccagggagactatctaatgcgattactgtccgcagcgcctgactctgacactgtcgtagagtccatgattcacccacctgataagaatgatggggatgatgctgacagagacatactcttgcgcgacatgcgatctgtgcttgaacagcggattatatgtgaaactgataggatcacggcgatagtcctgtcgatggctg

SEQ ID NO: 10648 - DNA, 639 bp, Emericella nidulans
tgcaggtcgactctagaggatcccctgtagtgttagtaacagaaccatactcagattatggaatgtggttttgagtatctgatgccacataacattaggtgcttcattgtcgtttcttaatctgttgcttcttaatcgctccaggtcacgaggttaaaacgccattgttgttggactgttctaaagtcagctagctcaccggacaggttgcttgttgaatgaagggaaagtctcgagttggtgtctgatgggtttttagaggctcgttgtgcacaagtgttgacttctttcctttattattttgtattgttttggacaatttatttcagcatttttacacagaagattagacattactagagaaattctagcaaaagcttggttgtattttagtgtatttttctattttacgtggatatatattgcgatatctttaatttcattcgaactctttcttttgcaacttatctttatgcttaattcataatttcttataattccatcaaactctagaattattctttattttcctcaaattactttcttacaaaatgaactcttggtctctttaaaaattcaccagaaagttttagctaaccttgaaaaacacaaaacgtggaagagataattaagagagat

SEQ ID NO: 10649 - DNA, 645 bp, Emericella nidulans
gcaggtcgactctagaggatccccctctctccctctatgatatcgccaacactcccggcgttgctgctgacgtcggtcacatcaacacccgatctcaggtacccgatcgcttccatgttttcatcttcggtctagattcgatgatcgtccacgatttgctaattgtattggcgataatctgtaaaatccttgtcttttatgtgcgattgtcatgtttcaaacaggtttctgggtacatgggtgatgatgatttggggaaagctctagaaggcgctgacctcgtcattattccagctggtgtcccaaggaagcctggcatgacccgtgatgatcttttcaacatcaatgctggcattgtcaagaacctcagcatcgccatcgccaagtattgcccacaagtaatcattctctcttctctctgttttttataattagatattactgtttgttcacattcactaaacaacgtaggttttgccttgcttactcttgatctggtatataccaaatgagtgagatctttgtaaatttattctttgttgaatcaggcacttgtcaacatgatcagcaaccctgtgaactccactgttccaattgcagctgagatttttaagaaggctggtacctatgatgagaagaaattat

SEQ ID NO: 10650 - DNA, 583 bp, Emericella nidulans
cctctgattcgtgttcgggacctagagcggctcgcagatcgctgtccgttacgaccgccgacactgccttccgacacggggctccgggaggtcgtcctggatcttgaccttgaacgaggagatacggatcgtcttggtcggcggtgacgagacaaatccctatacatagcgcacggaacacgcggattttgatgatgcgattttgctctgggatgagttttcgtgaagcgcaaagaacagtcgatgtgtggcgcgacaatgtgtggaatcgagcggaaacagggtgtgtgagaagcccggctaggagcaatacgttgcgctaataacagaggtttgagctgtcgagtaatcgatgattaagaaaatgggatgttgaagggttattatctagtccagagtacggagtacgaagtagttagtaccccagttgctggagctcgggacaatgcagcctaacttgaacgggttagaggcatcatcggccaacacttagatatatagaggataaattaatttaccatgtacattaccaccaagctcgatcggaatggatgtctataatgtagatacttgacatcacaga

SEQ ID NO: 10651 - DNA, 635 bp, Emericella nidulans
caggtcgactctagaggatcccctgtttttctgtcagttgataagcgtcacaaacactgcacttctcggtttaaatggggtacgaggacatatctctattatcccttttggcgtctgaaagagaagagtgtggtcacccggattcgtcaactgcaccggagatttcccagagctgaactactttgacgatttcataagactcgccagaatggattatcacaacaatctttgtcccaaataccctgataatgcaacagtcaaccaataaatccttccatttcttcaagacaccgagctgcgtactttttattataactaactagcaactagtctggtccaaggctagacatacttcccattggttacattagacagcttgagtgtaaggatgatattggtgtgaaaagttactttgtctacgatcatatttcagtactaattcatcctatttctttatccctaacaaaatcaaatgaaatacataagaaagagaccaccaaaaaaaagaaaaagaaggacatataccgggaagagttcccatcaacttgtagagcaatatgggaattatgagaattaacgcgatgatgacgatgagaattaaccgagaggaagatgatgatacaaggactatgagc

SEQ ID NO: 10652 - DNA, 1088 bp, Emericella nidulans
attactgtattattgagtcggttacctgctcagtaccgcagagcgaggccgccacttaggtacctaagcccaaggtaccccgctgtcagaacccaaaaggtaaactcgaaggatccagaactggtatgtcatgactgtcacagagttcgtacctgaaacctacgtcctagtaatgcctctttgcaagatagttcaagatagttcaagatagttaatagattgatattgataagcttagtgccacgttcctgacatacttcgtacgtcgcaaggtcgtttcataccataatatttcggtaccctacagactgatgcaaactgatgcaaggtcaatgctaataataacgcactccacctccacatgaaagaccaccacagattagggatatactccgtatttacagttctatctgcttaccgcaccaagacatgccacccaccaacagcagcggctaaaccaaaaattaccacaaccacccaaagtcatcacgtcatgcggccgtcgtaagaacataactaatagctaggtcagctgagctcgatcgaacggaattggtggtggtgggaaggactcacgaagtaatactatccatccgctccgtcgtcagctttagactgaccgtcagcaactcgcgcgcgatatccggctcctcctctttcagggccttccaattctctgcatcaaggctccacgtcacgcaatcctgctctgccttcaccgtcgccgtccgccgcgtctcgctgaagaatggcagctcgccgcacggccgtccggcgacaatgagctcaaagtatcggccctgcgggagatcgtactctgcgcgcagcattccagactcgagaagatagaatgcgttggggacgtcgccttctcgaaatagggttgtaccattgcgtaggtcgtgcggacgaagtatgggcacgcagcgaaccagaaatcttcgttgcgcgaggttaggccttggaaggtctgaaggaggagagggaggggttggcgcatcgcgaccatgctgctgggggcaggatcgcgctttcgtcttcgctgagtgtcgttgtggctgcgcgctggagatattgatggcgtgggg

SEQ ID NO: 10653 - DNA, 615 bp, Emericella nidulans
tcgactctagaggatccccctccttctcactggactctcacacacccttgtaaagcttctaatctctggaaccctgaaacataaacaattttacacgattattgttatactcttgtttagaaaaaactctgtaattaactggttatgagtttctagacattgtgattttagtactgattcggtctcgagaatccacattttcttagtttgtgagtgtttctctaacattcaaacacaaccatgtattagtcacagtcacagtcacacattaaaaagatacatgaacctataatgaatcgtaattttgtttgatctctgaatgttctgtttttgtctcacgatccttctatgctataggattttaggtgtgtgtagcgattgggattgagaaatcgttatttctttggagttttgtcttcgaagaagtatggaggctcgatgtgacttttgtggaaccgaaaaagcattaatctactgcaaatctgattcggctaaactttgtttaaactgtgacgttaatgtacctcagcgaatcctctgtctcaaagacacacgcgatctctactctgcgagaaatgttcttacaaccacggcagtacctgtatgacgaaaatg

SEQ ID NO: 10654 - DNA, 755 bp, Emericella nidulans
aactggacagggacatggtttaaatgatcatcgtccatcgcgcttatgacggcagcgatcttgttcttgctccgagccagcaccgagttatctcagcgcctagtgccatccatggttagctggtgactcaagaggctgatgcaactcttactcgtagtctgaggaagttgcatcttctccggacggccaccccgcaaaccgcatgattccggctcattttcgtggctgaatgagttcacctcttgaagccctgaaaccctggactgctggatgtcatcatcgtatgactctaccaccggcgcatcgcccgcatcgcccatgcctcgtcaacgtcgcggtaggcatcctattgggctgccacgtccgccctgctggtggttttcctcggtttatcagccaaccatcagaggtggatcgacaggtctcgactaggctatctccgaatcctatcaatcgaccctccccgtggtgccccagcctgccagataagctggggaaggaattaggaaagtgaggcggatttccaattccagcttgaatgccccgatcgggaaagataacgtaagaaatccaggacgatctgtcgactatgtaccatcgctccaggctatcacacgctgaccccgtcttgggttggtgttcctgtagaacagaccaaaccaaaaaaattatgcgtgcagaagaagtcagaattgcataattttcccgtcttttgtagtgaccgtctgaaccctcagatgatgatagacatgccg

SEQ ID NO: 10655 - DNA, 494 bp, Emericella nidulans
tttcaagcggctagaggggctatactatgagcgcgagtgaagttgaaccggctgccagggactatccttcaacatgccatgggtagatatgctgaacatgctactaatgtttggaggtagtgaaacagagaggctcttcgaaggtttggcttaatggtcacaagcgatctgacatgctcacggggatcacagcgctgcttctagctgcgctcggaccaatattgtagcatgcgccctaaacgctataatgcgagttgcggggtaggttcgacttgtatcgtacgactagcgggcataagtgacgtgacgcagtagacaggagacgtgtaaactacgggtgaggatgccgtcgcgaacgatacactctaccaacatacttgctggagtcgagcttggcatcatagtccagacgaacagttgtcaacatataacagagagctggactgactcctacaccgcgtgcccaacctgattgcttgggcagtagataagag

SEQ ID NO: 10656 - DNA, 1330 bp, Emericella nidulans
gtcactgtggagttattggaagcagtaggattcattgcggagaagtaaagtctcggtaatggccaaagtgaaaggctttttcggttacatggaagtgaagccaaagtatcgaacaccgagataatcaaatcccgctgaagggtctgagtcagccgttttcgatcctctctacattgcatacccactgattcccttatctgcatttcttagcctcagaagtcacttcttagcttcagaggttcaacgtttcactttagccagtaaccatgtcgctcgcctcgttgaaacgcaaagacctcttccagcaacatgggctcatcggcgacaaatgggtctcgtcgtctggcggcggcacattcaccgtcacaaatccagcaactcttgagactctcgctactcttcctgagatgaacggtgcagacactgaatctgccatcacagccgcgcacactgcgttccagtccttcagaaagactactgcccgccaacgcgctacctggctgcggaaatggcatgccctctgcgtcgagaatatcgatgacctggcgctcatcctaaccgtcgagaacggcaagactctcgccgaggcgaaaggcgaggttctatacgctgcatcctttcttgaatggtttgctggtgaagctgagcgagttcacggcgaggtcgtccctgcttcaaatgccaaccagagaatcttgactgtcaagcagcccctcggtgtggctgcttgtcttgcaccctggaattttcctatcgccatgatcacgcgcaaggttggcgctgcgctggcggccgggtgcacgaccgtctggaaaccagcgggtgagacgccgctgagtgcgcttgcgcaggcggtccttgcaagagaagcagggtttccaagcggtactatcaacgtcattacgacgctgaacagtgtcgctgaagtcggagcggcattatgcaattccaagcttgtgcggaagctcagctttacgggctcgacacgcatcggcaagctcctggcaagccagtgcagccaaaaccttaccaagctgtctctggaactcggcggaaacagcccttttattgtttttgatgatgcgaaggttgagacggctgtcgaggcctgtattctcgccaagttcaggaactccgggcagacctgtgtcacggcgaaccgcattttcgtgcaggagggtatctatgaccggttttcggcagcactggtcgagaaggtcaaggcgctgaaggttgggaatggtgtcgaggagggtgtgatcattggacctctgacgcatgagcgcgctgttgaaaaggccgtcgcccatataaaaggtagcttctcctc

SEQ ID NO: 10657 - DNA, 626 bp, Emericella nidulans
gcacgcgatcgcgcgaagtccttgtgacgaaggaaaatgacagagaggtcaacgggcggttttggtggacggatcaagcactgggaagccgaaatgcactaaatccaagaggagcagaggcagatgacccggaccgatacaatggctcttgaacggagaatgtggataaaaagaatgaaggattgacgagaaacagaatttgtcagggatagcgtcagggataacgacagaaaggaaagactccctgagagcgagtgaaggactgaaatggaagaagggagagaagttttctgcaggaggggaggttgcaagccaaattgggcattacagtaatcaacagaaaccacccggcgagattatattgggatgagaagaggatgaacaataatcaacgtcgacactcttatattattccgcaactatattctttcattattctgatgattcttctttttcctttccccaccttccttttctttcagtcatcgttcacctcaccttttgagtccctgacccacgcaaaaccagactgatcatcaatgccttatcaagacatgaaagaggacaacattacctacggatccttggggcctgtcaacctaagccaggaactgagggacagcttt

SEQ ID NO: 10658 - DNA, 4019 bp, Emericella nidulans
ccgcttcactcgggcaatcctgaattggaatacagaggatcccgtgctgaggaaccttccattctcgcaaaacccgaaggaagaacgatactcaataacactttcggatctaagtcagcgccgtctgtcactcatctcatgcgttttgtccaacatgcgcgttcatgtccaaaaccttgatgatgtgaaatctcgtgacctctcaaccacgcggcaggattacagagaagttattcagaagatgatgtcgtccatgaaatcgaattaccaggagctgggcaatggcgaggcggaggtcaaaggagcctacgtagagttcgtccagagaattgtcggcttcttgcagcagcatacaagggatatctgccctatcgacccattcttcacagacactgctacgttccctctgccatccaaggatccattatacattgttgctcgtttgcgaagctaccaacccaagctctcgtctgccaaagttgcaaaaacgctcgttatcttcatccaaagtgtttcagaacgagccgcccttgatgccgagcaaacgtacttcgtcgaccagctgtgtgagtctatgaaaaatacctacgaaactgggaacctggaacaacccaccttgcgagcaacccttctgcaaggcgtcttccctgcctaccttgcgacggccttcaccaacggagctgcatggatccttagccggccaatcattgagactattactcgagtattccaagagctgcttttcagtattgacaccacagactcagcctgtgtctcatcagtcatgggcatcttctgtgcaatcttcgagtcggcatatagagctctccaccacataataacagacgctaacatgctcactcagcccgaggtgttgatcaccactactgcctttctcgagatgataacatctgccctcccggttgtcgactatttagaccgtctggtcgcagactcgagcgcaatgagccacctgttagcgcaaatccgcgcttttcagaatctctccatattcataaacgcctgcctccaacctcgatcgcaacaatcttcagaaccacatatcagcctcacccctactctggaggtcttgcacccttctaccagcgatctcgccgtctctgctaccagagagcttcagacctacattaacgaaagctggtcccgccaccagggcaagtactacttcaccaggcgtggagcgcacgcgccacaagaagtgattattgacgcatcgatatccgcaaagctagacagtcttcccgagaagggggtgagtgacgctgcaacggcgcttctatgtgcgctggatagcttggatctgtttggggagagcaaagacgtgggtgatcacctgcaaaccaatctttcctgggaatggaaggaagaagtacttgttgtttgataggactgtgctctacctaactacttatataacgacgtgaacgagcaccaaatagaagttaaatatcaacgacatcaatctctactttgcagttacaattaagctatctcacatccattatgacatctcattatatacttccctgtgcaagtatacttgaggacctatcttgattcccccaggtttcatggcctctaggatgctgccacgagtaagttatgccatatacccatatctagaaagtggagccctggtagcaatagcgcccattaagtagatatcaaaccaatacggcaggtacgattcactgggctgcacgtgtctttgtcgttccttctatcctgagccgcaaagcgtagcctgaaagatgcaagtaattcccgggcttgtgtcttggttcatcttactgcaaaagtatatatctgtagacatgacgacatggaactggcagttagtcgtgaaaagcatcaagggcctattagtttacatgtcatgctgtacctagtgtcgagtactcatgaagaatcaggtctatacttaatccaccagaaagccattttcgtttgcttcgctccacgtttctttatcaaaggtagatgtaaacatggaacggaaataagtttgtggtaatctttttttgtgacgttgagtagataaaccttaataaatagttttgcagtaggtttccctacaccaaccaaacattgggatataagatatagaatgagtgtggtccccgcttgcttcttagaaacgctggagataggggaacagaaagaagagagagatagataaataaatggccctgatactgatgtcgctcacagtcgcggacaacaaaatgtaacgcagtgcccggccatgcttctatttgtctccgtgctcaacattcgcacccaccgatgagccctcagcagccccaaccccggcttctgcaggatcctcctgatgcgaaatattctggctcgaagagccacgcctatgaaacggatggtgctgaaaccccgagaaatgcaagaccttgcgaactgtgctcgcaattcccgacttgcgcttcgactcgggcgaactcggtctgttcttgtcacccgatgctgatgcaggaatcgcaggcgtatccgggtgcttagtagccgaggcgttacttggccgaacgatggcgtcgttcgcaagtactaggttctgaggctttggaggccactgtccgtctgctttccagccctgaaccatggccttagtcatgtcggcgaggttaatgggaactgtgggcgtgaggccctggatgacgaccttagagtagatggaagggtacattgctggtgtgatggaggcgcgtattggatttgaagttgcaatcatggaggggacgacagggatgagagggtcgtagaaatggtcttgcgttgagggggtcgaggacgtcgtagtagtggttgaagggggttctgcggtgggaacggcggtagcggaggtgagagattgtggaaggactggaatttccggaatagcatcggtagtgatctcaagttttcctgcgttatcgttagggattggtggttgaatgtcgctgctttgatcttgggcttgttgagcttgcaacggtgtggtttgattgtctgcaatgttcagagcctctgtcctcgatgcgaggttcggcgactccccagtcgcaggccccgtagccgggatagcaaacggacgagatgttgtagacgccggaatgctctgggcgtctgtatccaacgccgtagcggcgttaccacccttatccccagactccgcgtctttcgtggacattgaccggtgtttctgctcccacatcctgacctgctctctagacaaggctcccgaccatgcatcccgtctctccaaccacgtacgcaacccttcattccagctcatctcctcctccatctgcctgcgccttttgcgccgacgctgttgtgaccccgcagactggggtgaagaagcatcaaaagcatcgccaacgtccacgcgctccggactgccgatgggcgaaaattgcggctcgagttccgatcccgagctgtcgtattcgcggagtcgccattccagtacttccgtgggctctgggttcgcagggtactttggcgggtggggcacccgggctttgcagaaaactcgaaagaccagtcattcttgactaccgtcgcgacgtagcgctttggttacacgattgccctatttcgggatatcgaagacatggcgagggagcttgtgacttctgagaaggaggtaggaacgggaaggccgcggcaaagaaaagatgtgaggggtgatcccctaggagacaaggcggacaataggggaggccccccaaaaaatcggcttggtgttgtccaatttacttctatatcagcttctgggctgtacgccatggtgtttctttctccctcgcactgtacattctcaatcattcctctctcgtgcctcagtctgtcccctcctcatatatgttgcacaatttgcgtggtgggtcctcgcgcatcagtttcatcctatttctttaggcatctcttttgcatgccgagcttctctcctcttcatcgcgcagatcttccttcttctcactctcgcggacctctcacacctc

SEQ ID NO: 10659 - DNA, 608 bp, Emericella nidulans
caggtcgactctagaggatcccccttcatgctcaatcagtagcaagtttacttcatccccggggaccgtccagtagaggagcggaaacgactctgttatcttacattcctcattcgcattagagcattagagtatgaatataagcaagctttccttattccgaaatctaaaaaaaaaagagctctagaagttcagtcggtgttctctcatctcttaattaagatatttcttaatcgagaatcgtgagactccccaacctagtaaaggggcttgaatcggtattttgtttagggagaaaccctactaaggaaaggatgagatatagcattaactccacttgttggtattcgttgggacgcatgcttggaacggcctctaaggggttgttgtataacaagtgcataattgtccactagaacgtccgtgtattttatcatcaacctgatgaatgaatttcaagatatagggctttcctattatcacaggctgttcaaaaggatctcctgttcttccatcaaaaaatctgctttttcctggatactcgggttcaaatacccatggattcgctgtttgcttactggcttcatataattaagaaaacctagttt

SEQ ID NO: 10660 - DNA, 573 bp, Emericella nidulans
ggtcgactctagaggatcccctattctttgataaatgtactagtgtacgttaacttcgattttataattggaatttggataattagaatacaaaagtctaaatataatttatgttaagtatataactatattttggatacacattcggttctcagtttgctttggataaaattttgggttttcaactatatgtcaggttattcatgtatagaaatttaatacctttcgaataatttgttagttctgggtttagttcttatttttcgaatatgttcgtttgattcttaagttttaatctatttttcaggtgtaattagtacatggatttaatgttttgtttttatattcaaaaaatatttgaaacgtaaatatacaaattatttcgatgtttatgtacatatatagatacaaattacgtgtacgtacaaatgtatacatgatattgttaatttttaattatctttaatgtaaaaattaataaataaattaataaaaatgaaaatatgaaagtgggtcttaaatgatataaaaaaatgaatttgaacaaaaagtacaaaaataataaatatttac

SEQ ID NO: 10661 - DNA, 1279 bp, Emericella nidulans
  unsure (1)..(1279): unsure at all n locations
aaccacgaacaattaatacccagaatatctatttgcattgctagaagaccaataataatcttcgccgtgaccttctccgtgccaatcaagcagcaggcactgcagcagggttaccagagtctggaatcaacgcatactcaatctccccattcttctcaaactctgccatgtcaagagccacgataatactgtctctcacaaccttttctgggtcattcaagaacttcttcaaagtgtcctccacgccttcgacgtcacctagactgccaagtgcctctgcagcttcgtgtcgcaccataccaacttcgtttaagtcgctaagggtttctgtaaggcttggtactgacgccgggtggcaaagctgaccgaaaacgaatgcgatctcgtgacggaaaagagcggagggatctttcatgccctttgcgagtgattggacggcttgcttggcagtgggaagatcaggtggtgaggcaagatcgcgcaacccgaacatggcacggtatcgttcgaacaatggcagattcgtgtcgaggagtgttttctctaggtcaggaatcgaaggctctttcgcagtcaagggcatgggcggggccgggtcaatggacgtgaaatcactatgatatgttaggatggaaatggagaatgataattaaacatgagaaaagcagaattagagcgtacctaggcttcagtttctcagccttcctagcttccgattgctcccacagaatcctatccacagcaatgtcgcatgtctcccgaacaacatccacttcattctcgttgtccctaagcgccttcaaaacctccaagctgctctcgtagccaagcgcgcccagcgcctccgcagcttcatggcgacacatcgaatccttctgggtatcctgcaccacgtcgagcaaaaacggcaacgcatcagtgtttcgcgtctgaccgagacagtatgcgagttcatgcttgagcagagctgacgcataagagaaaccggcagcgatggcttggatcgcgggagtggtttttggtggccgttgcagcatccaagagctttacgggatgagcgcgaaacaccagcgagcgttaattcggagtgagacatgcgaggtttgaccgngtgccccatgtacgtggcgtgcattaaatatgccgatattttgaagaaaaaagccggaccgagggaaatttttgattattccaaaaaattgggggggggcccaccacgtgccgtttttaaaccggacaaacagttgtcccttgaacaggggatgggttttataaaatt

SEQ ID NO: 10662 - DNA, 641 bp, Emericella nidulans
gtaagctgatgttcgtaggatagaaacggagagctcatacttgtatccgcaaacacaggtatagaaaacggtacttccttcatcggcactgcgcagttgtactgtagtgaagtacatttccttcctcccacacttggggcagtccttctcaattaaagcttccgttcttttgtccgcttgtgtcaaagtttggatcgcggaccgcttcgcgcgcagcatgacgggaaagagctcggtttggactcagagacaatcgttttcggtacagtatctggcgggcagcatatcagtatcttttcttaggtttccatcatccatttgctctttggaaactcacctttgttgcgggttccgcagacgtcacaaaccaagatccttgttggatccccgacggagccttcaagcaaagaaccgcagtctgtacagaaaactaaggagccaattgtagacatagtgagcgttgattgaggaggaatgctttctcttatcgatgtgcttttgcttcactttttcttcacttttttccgctcggggagattggcggacccacggaccacaatctgttggacaagaactgtacattagcgcagggcggtcaaggggagacggcagcctcaagacaatagtcgccgtgccttaaa

SEQ ID NO: 10663 - DNA, 490 bp, Emericella nidulans
ttgaagatgagctgttggcggcatgtttctctttgatacaccagtgtgagtcggacggatcgcggacagatgggtcggggccactacttggtactcagcacgcgaactatgccctatttgacatgaatactaaaccagtgcaccactacgcatgcagcatccctgtgcatctccctgatgtccattaaatcaaacgatcggcgcaagatgacgtatttaacttgaggacacacaccgtatactaagacccagctatgttcgtgctttccattttttaaatacgattccgacctcatgattgtagttccgagaactcttcgtatacacttactgtggaacaccccgactgtctgaactgacaccgcacatgggggtgtgagcataacacagagcgagttcaagacactgccgcgtatcgtcactacctgactgaatctgtacgcgtgtaatcggactgccctagatatcacgattagccagctttgtggat

SEQ ID NO: 10664 - DNA, 876 bp, Emericella nidulans
atcctctgcgacgcttgccttggttccggactcttggaacaacaacagctttgttgatcttccacttggggcgagttttgtagccagatttggcctgtataacccattagcaacttgcaggaacatacaaaggacgagttacgtaccggcagaccccaaggactctttggatcaacgttacccttcgattttcctcgtccaccaccgtgagggtgatcttgagcgttcatggcaagaccgcgcaccgttggtcgaatgttaagccagcgtgatcttccagcctttcctagttgggcatacttcttgtttgggttgctagcgacaccaatggtggcacagcaatctttgtgaataaggcgcacctccccacttgaaaggcgaatggtgatatgctggagagtgcgctcacgggcttgcttctcgcgctgggtcatgggtttcttctcttcgccagccgcttggctttctttgctctcttgatcggctgcagccacctgattgacacccttggagataaccgtcgcgaacgtaccggcgctacggcacagctgtccacctccgccaggacgcaacccgacgttgaatatgagcgaccccaccggaaccatgtgtaaaggcaagcagtttcctctccaggcagttctggcagccatcacaccaggatcaacagttcctcccatgctctgccaaaggtcgtcgggaatcccagccatgtaactttgcacaacatctcctgccctcataccgtctgcagccaggatatagctcagcttcccagtttctttactgcgaagaagcgcaatatgagcactccgtccggggtcatgctcaatgcgctcaacaatgtgcggaccgggggcatctcgtttaaaatcg

SEQ ID NO: 10665 - DNA, 1045 bp, Emericella nidulans
aaactttttttttctttcgttcgtttcttgtttccatttatcttagttgcatattccacttaatgttctcttgatgtaaaggtagtcatatgacgctacctctacacttatgcaatcatcaatttctccttcagtgtcttaaacctgctacgtaacttacattgttagcgcttttaaaaactatgcttgcccatattagagttgtccaaggtcaagattgatgcggtgctttgggacggttccctgaccctaggtaagtacaacattatccttcacccggagaactgtcctgtgctgcccattcaaagagtgtatgaacaattaacattgcatagatcgcatggtaggagatcgacgagccgctctacactgcgcgttgcatctcaataaacgcctccggctctaggcatcaactgcagtcaaaattcagcatagccggatgaggaaaggaagcaggcggcagccaggtgctgggagctcttaaccatatcccagagtatgcaggggaaactcacgtggtagttaaaagctcaacgccccttgaagctttatcagcgctccagctgcaatttcaacctgcaatcatcattcactacagatagcgtcgatccactccatcaaatacgccccctccatctcctccgctttcccctgcagccccattgttatcgtcatttctttgacgtgcgcttgttaaatgcctattgttcaggtacttcccgccatcagagcttgtctggaaaccctgggtcgattgttcgcattggcggctccctgctacggcgtgtacccaccatttgacattgtttctctcaggatctatttggtcacttcgattctctttaaacacaatcaggaaaacacaggcgtttggtggtccgccagcatattgacaagggttggagggcaatgagcagctgaaattccaaaaagaagccagaaaatctatgcatcctacagtcggcgatcaccagagaacaaatcctgtttcacccaaattgacattaatcccggcttttttggaataaacaggcagagaagatgc

SEQ ID NO: 10666 - DNA, 642 bp, Emericella nidulans
gcaggtcgactctagaggatcccctgtgttagtgtcttttgagagtagtcttggtgttatgacaggtgaatgcaaggagtttctggtggaaagtgaaggaaacgctgttgatgaggataaaggattagatgaaactgtaagcagccttgtcgaacaaggggtgggtcaagctagtaccagcaaggagagcaataacagaactgatgttggtagtgtctgtgatgcagatgaattgataattccacgtgacgagtctattggatcagaaagcagagactcaggggataaagacgctggaaatatgataggcaaggcagaagaacactgtgaaaatgatcgtggtgctgttagcgaattagaaaaacttgagtgcgcggatgaacctgaaattggtatgagttctgaaagttttcagttaactccaacttcagattctgaaatgataatgaaccttgaggtcgctggaggaatagatgtcgttgtaattggttgtggttcttccgatcaaaaagctgaagaagaatctgaaaatgaaggaaatcaagaatcagacgatactgataggaagttgcacttcctgatgaagatagagcatcaagtttaataagttcctttgaaacagccaatgagactgtggaagat

SEQ ID NO: 10667 - DNA, 2321 bp, Emericella nidulans
acggatccttgcatagtccggagtatgcgtggcctaagatggagacttacataagtgagactacttctcgctaccgtctccaaccacatcacgtgttcgtgcctatcacggttagcgcccggtcctcaccgagagaaatgttgagaactgagctccgagcttgcggccagatataaatctcctcttcccatcttacatccctctgtttcaatagcgccgcgggcccatatctgtctcacgaaacagaaccccggcatcatggtcgcctctgctgtcagaatgcgcgtccccagcgcttcattcatctcaaaaggtgcctgctccttaaggcgaccacaagcctcttacaaattcacggctgctatccagtacgtttactgtcttttcgcgcaagagacctcgtgttcatcggagaagtaaaactaactgaattcttatttgctatagacatcaattgcctgctttagctgctctttcacgttactacgcctccaagtgtacgcttatctcacatcctcatgctagtgcctagctttttctgaccaagcgcaaatctacagctttccctcctcacactatcatcagcatgcctgccctgtcgccaacaatgacggcaggaaacattggagcgtggcagaagaaagctggtgatgctttgcaacctggcgatgttctggttgagattgagaccgataaggcgcagatggactttgagttccaagaggagggtatcttggccaaggtgctgaaggaatctggcgagaaagatgtgtctgttggctctgtaggtgttcctttcctttgaccatgacaagatacgtttgctaattgtgaaatctcagcctattgctgtcctagttgaagagggcaccgacgtcgcggcttttgaatcgttcagcttggaagatgctggtggcgagggtgctggtgccgctcctccaaaagaaactcaagaaactcctaaggaagcccctaaggcttcagagccatctacgccccagcctgctgctggtgcttatgagcccgatacctccggtgagaagctccagcctagtctggaccgcgaacctgcgatcagcccggctgctaaggctttggctcttgagaagggtgtgccaatcaaggctctaaagggtaccggccggggtggccagattaccaaggaggatgttgagaagtacaagcctactgctgcggctgcggctgctgggcctgcttctgaggacattcctctcacatcaatgcgcaagacgattgctagccgcctccagcagtcttggaaccagaaccctcactttttcgtttctactactctgtccgtcaccaagcttctgaagcttcggcaggcactaaacgcctcctctgagggcaagtacaagctctccgtcaatgacttcctcatcaaggcttgcgctgccgctctccgcaaggttccccaggtgaactccagctggactgaggagaacggccaggttgttattcgccagcacaacagcgttgacatcagcgttgctgttgctacgcccgttggtctgatcactcctattgtgaagaatgcccagggtcttggtctttccagcatttctaaccaggtcaaggaccttggcaagcgtgctcgtgacaacaagctcaagcccgaagagtaccagggcggtactttcaccatcagcaacatgggcatgaaccctgctgttgagcgcttcaccgctatcatcaacccccctcaggctggtatcctcgctgttggcactacccgcaaggttgcccgtccctgttgagaccgaagagggtacctcagttgagtgggatgatcagattatcgtaaccgctagcttcgatcaccgggttgttgacggtgctgtcggtgctgagtggatcaaggaactcaagaaggttgtcgagaaccctctggaactccttctatagttgccaaatttggagttatgtgaccatttgctagcgcatcggcccagagccttgacctgggtgggatttgtctcattatgtattaaaatcttcatattattttgaccgtcttggtcttttataaatcctagcatttttttgtttcttacggcgatagcatcttccactgaaacaggaaactcatccatccgttaactgcctttgatagtatcgccaatgggcgtactaaagtgccttggagcaggtacattattttcgacctatagtctacccaaagagcaatggataacaaatctatccagacggagcaggcgcccttgatgcaaggtatagatcctctctccatgtatatatgacaaaactattgggaaataaatacatccttacccagtacg

SEQ ID NO: 10668 - DNA, 591 bp, Emericella nidulans
caggtcgactctagaggatcccctaaagttcatttatttattttattttataaactttatcggctgatccggtcagcctcagtagaaatgcaccgaaatacttcagagtggacttctccccgaaagaccaccacactgtctgtcccgaatttggatgctttccgactaatgccagggggtagtcaggccgcctgcatttctgactaccaggtaaaccaattgggctaaagcccaactgacagactttccaaacaaatgtgatttttgtttccagggaggatcgaacccagctctgaaagtttcacccttccccaaatcttctcccaccactggatcacagatgcttgggcaattaaagttcataatatttatcttttgctctataagttgtttcatgtttcggggagaagatttctgttgacaaaaaactcgaccttgttcttggtctaagaggaagacatgcgaatcaaatgtaatgtatcgtttagggacttggaaaaatgatttactaattagtgttaaaaacgcatataattatactttggaatacattcaagcaagaataataaaatatttcaactaattgattct

SEQ ID NO: 10669 - DNA, 505 bp, Emericella nidulans
gtatgagacgtgtcagggatgaacttttaccgagccgcattactacggttggctttttgcgagtgtattagtactggaaccctaccaagataccaggcacgacaggctagggacgtgactgtaagatagaggttgcatttcgcagcgatgatattcctagtgactgctcatatgccgagtgagtgcatacacggcgtctatccaaggaaatacaggccggtacggcaagcgcaggtgtcagtgacgttgatgcgaggagtgttagtccagggctgtgaatagtggacggcccaacactgttagaaccagtattaagggaaatctcaacatgaagcaacgcaacgcataccggtggtggagaattcagtagatggcgtcaggatggacagatacagccctaggtcgatgcccgactactacacctgattgctcaaatcagatgaatacctggctttgtaaaagaacttccttcctgggagccgacccgttgttggcctgaaccatt

SEQ ID NO: 10670 - DNA, 1930 bp, Emericella nidulans
ccggtctctcgccaaatgtcgagtccgtgacggtgaacaaggtctgcgcgtcgggtctcaaggcagtggtgtttgcggcgcagaatatccagcttgggcttgctgaggcccagattgcaggtggaatggagagcatgtctcgtgtgccgtactatctcccgcgttctagccagctgcctccatttggagagatcaagttggaagatggtctgatcaaggatggactgtgggacgtctacaaccagttccacatgggcatctgtgcggagaacacggcaaagaagtatgagatttcgagggagatgcaggatgagtatgccattgcgtcatacgagcgggcacagaaggcctgggctgagaacaagttcgccgaggagattgcgccagtgaccgttaagagcaagaagggcgacactgtcgttgagcgtgacgagggttatgaaaacctgcgggctgataagctgaggactctcaagcctgcgttcctgagggacggcacgggtaccgtgactgctgggaacgcttcaactatgaacgacggtgcatccgccctcgttctggcgaacaaggagctcgcccgcgagttcggtgccggaaagcgcgccctcgcccgcattgtctcctccgccgatgcggctattgacccagtggacttccccgtcgcgcccgcgaaggccgtccccatcgctctcgagagggcgggtatcaccaaggaccaggtcgctgtatgggaattcaacgaggccttcgctgccgtcatcgaggccaacaaaaaggttagttcttttcgggtcaggcttaccgaacgcttgctaacaggaacagattctcggtctggaaggtgcccgtgtcaacgagctcggaggtgccatttctctcggccatgcccttggtagctcaggctcccgtattctgacgacgcttctgcaccagctgcaggctggcgagtatggtgttgctgccatctgcaatggtggcggcgctgcaactgcggttgttgtgcaaaaattggaccgagtggattaattgatgaatgtttttagcagcgtgcattggcattgtatatatcctatgaggcattgacaataatataccttgatatcgtatagtctatttagtagcgtacgcctatactgccttggcggggtccccgcacccatgctaagcgtttatccggaatccgcgtcggctgcgaagtcggcagtcgttgccacaaccattcccgtcttccgatgacttcaataagatctacgatcatggaagggcatctccttcaaagacttcatttcgtactcgtctacaactgaaaatacacgctattcagcaaaatggcgacccccggcctcctgtacgtgacgatgcagcctcgtccctctctaccggctgcccagtttcacgactggtacaactctgaacacggtcctctgcgtctttgtttgcccttcatcacgaaaggctttcgctaccgtgccgtcgacggcgttaagcccaatgggttggccctttacgacatcaccgacatggacgagctcacgcgcgagacgtaccttttttgcgcggggcaccattaagaccccggcgggaggcgaccttgcccaaatgatgggggccgaacttacgactttgaggacaaaagcttcgctttaaccgttgggtcaacggaccgtgttcggccgttcaattgaaccctgcttcccgcccaagaacctctgagccggtcagagaacattcctgttggctgccgttgcccaatgtttttacggtattcccaattaggggtttcctcagtcacaaaaggtgggacagaaggttggactggggcttttattttcaaaccggtatggatttgggggcggggggtttgaaaaaagcgggaaaagactcctctcaaacccgggtttcacccggggcctctctcgttatctttatt

SEQ ID NO: 10671 - DNA, 2189 bp, Emericella nidulans
tctcacctctgaatccccctatgagtatgttagagctccagtctgctgaattccatgttgttccccttctccatctgtctacctccgccttatggcagagcggggatttccgaaatggatcggatcgtctccgagcatcgagtatcgggaatatagagtggcagcaactcatggatggtctcccacacattactgttaccgactacccataccgtgaagtgcgcgatggcttgcttttcagcatctgagtgtgtcatatccaacctcttcgaccctgctaaatacccgctcctgccaaggtcagacctacacgccaccaccgactctgctcgatcctttctgtaacagaattctggccgacaccgcatcgtaaagcaggcgtttctaagcatagacgtgacagggcgaagtgagtacggttgtactaccgggtcaggtcctgcgagggaccatcgcctagagacttcaagagatgattctgagccccgactttcgattacccctgtacatctgactgctgcctcgcatccatgatctagctggtgacgtctcagttaccagaggcacgctcgtccgcttattgttcccaatgccagaccactgtctctcggataaccggtttctgcacatactgccgctgcaaagcttgaacagccttgaaaatgtgttgttcacagagcaatccctatctggtctctactcagacttaatgataagggacgcgcttcccctcttccgacataggaagccctagttttcgacgccgttcactgagtggcccagttgaagtcacctgttgactgcagcttcttcaagagggcaggggcagttaactttggtctagcagagcgcgacaaaagaggagaattctcagcgagcgttagcctcccaacattgacccagctaggccagagactagtttggttcatttctgtatctagatggaactagggaatatgtcctgcggctgattgatatcaagaattggtgcttgtctttagtgagcaagtttaattgtagtctagcctggaaggttgtcatacattcgcctctggcaatgctctatgagcaacatacgttagtctatttatcccaccaatgccttcagctacgttgtaatattttatggataattctcagtagctacaggaactaactagtatttaactacacgattccgttatagtcacacatacatttggtgtgtagacccatagctgtctttcattattgtcatatcttggtgacggacggtaagatatatatatggagacggcgagttagggcaacaacacggtttacccaccttttcacgcacaagctttagaacattaatcatgcacatatcctgctaatgatcatttagatcaggtagtataatagcttttcttctgtagagaatgtgaacttcggggaaattccgagccctccactaggacatgttgactagaggcacagcccccgcctcgcctttgctgagcccccagacaccggattctctccatttcctctacagaggagtccgataggaactctcgctgtgaattatggcctctgctgtggatttccggtttccgcgcctgcctgcctgtcatgtctgctacaccaaaaagatcaaggttgggtccctccttgcctctgccgctcctttctaagagtcccagtgcgataacaatcggcccaaatgtgacccgtgcgtgcgcagtggattagaatgcactactttggcctttgatggccagccgtctgtgtcgcgagggtaggcttccttttccttttgctacagagtttatatcctcaacccggtaggtacattagcgacctggagcagaaagtacgagcactccagagtcagcttcaggatgcgatcgacgagcttcctcacaatacctcttcggacagcagaaaagagaggaggaggagaagcagtatgcggtcagcgtatagctcgcctacctttaccgagggcgcagggctcaggtcggttgcgtcccaccaagaaaggcctccgctgatatagccaaatagcttcatgagaccattatttacagatccaggttggagagcacacaatccaacgctgctgcagagcctatcccagtcggcccgtctggccgaggccaccatcacgccgaatcccctaccgtctgctgccgacgcgcggatgatatttacaaaagataacaatt

SEQ ID NO: 10672 - DNA, 2074 bp, Emericella nidulans
ggacagcttataaggatgtttgaatttatcccacctcccgatccccgtgaccttctgcctccgctgctagcatgtcttccaacggcgtttgtctctcagaaacccccgccagctcttcttccgctcttatcacccattctacgccagagagttcagattcttagttcagtgtcgacttcgtcgagtgagtcatggcttcggctactatgctgggattcagaaaagggtgagcgcctccaatctctgatcgatggtgcgagcttcgagcctcacccggtgtctggagaaattgagctgcccgatgatatcccggtgacatacagaaggctggacgaggagacactccaatcacgcgtgcttataccggaatatgagcttaaagtcgtgtatctttggtgcccgaaggaggagtctccgggttggcgcattgccgaagtccttcctcaccaaggtctgggagaagacgacggggtctggtcgtctactatcggggatgcgaacacacatgcgaaggagaagttggtagaggatgcgttgaaagcagcggagagggatgatcacatagcacctcaggaggaagacgacgatgacgatgactactgggctcgatacgatgccacacccggacgcactccttcagtgaagaattctgctccgcctgcgttgacgtctatgctgcaacaccacggcccatctgaatcatcctacttctcccaatatgacgatgtgcagcctgtgatggacaatcatgacccagatgaagaacacccggagcttggaccgtcttcacttggtggagatatactcacggaacttgccaaacggataccgactcagagtctcatgaacatatgaatcagacaaacggagcgtcattaaaccacccccgaccggaatccgcgacgtcttcaaacccagaggcagtctcaagactcgagcaggaagctgagaaccagtctgcatacgagataggagtgaagcaacacatcggctccaatattaagagcttgttccgcctcgccaaagcgacgggtatctctcgagccgatttccaatccctagtcaagaccgagctggatctcttgaatttgtctgacgacgactgaccgagtagacattccaacggtctgtttatcactgtacagtttggggcctttcagattggttctcattggcgcattactggagtgtttggagcattgaggtgcatttggatatccagcgtgtcctgaacatagttttcctgtcgaatccgattccatgtccatatatatacatatataagtactatgtctaaataaagtgaacatacaaatgaatgaattacgtagaccgccccctgaggtttcggaattgttagagactcacatgttcgcggatctggcctttacttgttccgttccggataaagacacgcaatccagaccaccgcagcttccaggaacacctcgatccgactatgcagctttcttgtccaattccatagctaatttgaaaagtgagcttgaatgcctctgaaatctatcacctttttctccgtctcagctaacctactgcagttttattcgtactctctttcatctctgttgttttggcctggtgattatgtcttcatcgccctctctgcgtaagaggggcggcaagagagaggacaccccggtgccctctgaccgttctttcgctccttcagcttcacaattgggcgcagcatcgcgctcgtcagaatgggattatcggctggccattaccattctgaccgtgctagcttttatcactcgattctataagatttcctaccctgatcaagttgtttttgacgaggtgcattttggaaaggtatgtacatgtgttgacaaacggcaagttgggactgacgccggtactcttagtttgcgtcttactatctacgacgaacgtacttctttgatgttcatcctccgtttgccaaactcctgctcgccttcaccggctggctagtgggctatcccggccacttcaagtttgcccacatcggcgactcatacattgacaacgaggaaccctatgtcgccctccgtgctatgcccgccgtcct

SEQ ID NO: 10673 - DNA, 965 bp, Emericella nidulans
tgaagaaatctctgtgctctaaagctttagaggacgtttgttgttatgtttacagaagagtacaagtggaatccctgcgggtcaacacgacttgttccatggtcaactgacactctctggctgtccgctaccatggcttctgggggggcgccagctctcgaccttccctagaggtggtaaactcccgaaatgattgccccgttctgccccgttcggctccacgttccatcaaagggtgttcccggaaaggaataatacggagatcaatgaatgaagactcctgggcgtcccttgcgctcaggcctcttcctttaattgcctttctctctcttttgccttgattcgagccctgataatcatggcggaagatcattgcagcaataacctctccagctgtcaagccattggttcaactctaaatcctatagttggatcctctcataccaatcaatagtgcataccttttacaaattacggggaacctgcagagtcctacttcctcctgcattttccggtgcgctagcagacgatggttggtcctgcatgcgtcggccaaacggagatcacaaactatgcgtccaatccgcatgcgcgcatgtcaacaacctgttcagattgtactgagactcgaccgcacgcttcgctccttttcgattacgcttctagaaactgtcatcatcgagtcccgacgaagaccttgactcggccggcggaacggacttttgtttcccccttctgccaaggtccgactcggggatttccaatgagtagcagcaaccttgaatcgaacccgctggtctttcgggaaatgatccattgctcaggttgcccagcagtgtttttttttatggcattctcgtcttttctctgtgaaactggtttcgtttttcgcctcggcatatcggcggccgcgcacagcccagttgagtgaattggggttctgaaaaacacttgagagcttggag

SEQ ID NO: 10674 - DNA, 1422 bp, Emericella nidulans
ccacgcattgcgctgccgagaggaatatggcaccgccgattggtacatagactaagcacgttgcaaggttaggaatgcaccataccaagttagaagggttcttacagttgatgatcgcagtgacctgggacatgtcctccggtgaggcatgcacttgcccattcgacaaagcgacctgaaatgtccagcctactgtgaagccgacgataatctggaaaccgatccactggcccgtggaggtgtcgacatccatagtgtagaagagcccggctccaactgtgccgagtattcccccgatgatccagaacaatggaacaataccaatcttgacaagcgccattccttgcacaatggctgcgattgttaggggaataatcagggcgagcattcggacaccggacccaatcgggctggagttgaagacactctggaagtatatcgggaggtagtagagagtgataaagtacgcgccggcgaagaaaaacatatagatggagccaacccagacatatcgcttcagaaactgtggcattctctcattagcaaagtcacatatgcctagctagaatttgactcaccagtcggggaacgatcattgcgcgttcctgttggtacctctcccaaaatacaaaagccacagagatgagcacaacgccaaccaacagcccaatcacctcgctgctcttccaagaatgtgtttggccaccatattgtagagcgagaatgtacgaaatgatcaacgccatcatcaggcctgcgccagcaaagtccatctgtatcatcttctccatcagcgtggccttcgcaggcaccgcactggcaggagccttaaagaaaagaagaacaaccgctgcagccagccctccaataggcaagttgatatagaaataccaccgccaagtcactttgtccgtgaaagcgcccccaataagcggccccatcacagcggcgataccataggtggctcccgtaaaccctagcagcaccgggcgtttttcaggcggccctgcgaatgcgagcatagtgaagactccgacggcgacgccagcccctcctacgcctgcaatggctcggccaacgattaaagtggtgggattctgggccactgcgcaaacaagacttccgacctcaaagacgaacatggcaatgataaaccagatcttgacagggaagtatttgtacactttaccccaggttgactggaagccgccgaacgtcatgaagtatgctgatccgtaccatgaaactttgttaaggtcgtggaactcatcggtgatctttggtatggccgtgcctaagatggtctgcaaaggagcattggtcagtctgcgcaagattcattggcctcagctggctagactcacattgtcaagggcaacaaggaacatgcccagcatcagtgacagaacaatgatagcttag

SEQ ID NO: 10675 - DNA, 860 bp, Emericella nidulans
aatcgctctcatgatcatcagctgtcagctgcattgggatggagccgtttgcttccgccagtctccgcttcctctctcttcgttcctttctctcctcttctgatcgctttttcttttcttgcttccttgtaggctccttaatttcgccatttggcgcgtccccgttcgtcggtgtcgtaggagagatgtttctggcaggactctcctgggtagacgtccctttaccactctgcgtaccttgcgaacgcttcggcgattcagcctcatccttactcttggactttgagtttgttcgcttcaatttgtgaccattcacatcaataacgtgacgtcgcgtcgtgcttgggctttcctcgtcggaatcccgaggtgctatacccgcaatctcgacgtcaacgcaaaacgcaacccgccgcaacttcgcctgattcaagtttggaactttacacctatcccggtctttatcaatatttagtgtgcgacgctcacaaacaataccatggccagcggctggctttcccccactagaacccgaggaagatagtttcctaaacgcagtctgcagaaacgaggggccccgaggcgagctggaggtaaatggtatattctcatccttcttctcttcttccttatccttgagcgagtatgctgcgccaaacggattatgcatgtcaagttttgaggcgggagggctcgctttaggcgctgcagaaggtttcatattggattgcgacggaggtgttgacccagacgagaacttggaactgatgcttgaaatccacgatccgcgtcttcctatcggtttcggtgcactcttcggagacgaatctgacgccggagtgttccgttgctggttgcga

SEQ ID NO: 10676 - DNA, 2035 bp, Emericella nidulans
  unsure (1)..(2035): unsure at all n locations
ctttgtggtaggctcgcggacggtcgacgcggaggatcgacgcggagggtcggaggatctttttatcggacggtcggacggtcatcgctatctccgttgtctttcagtttgcaccgccaaacttctttttctccctctacgaggttgggcttcgcgagacgtcacatcatggccgacaatgctcaacgtccgcgtccgccgcctaatcgacgcagagacaaagtccagctttcctgcgacccttgcagacgccgaaagtacgtgctttgatatttatcagagtcgtgcacgcttacctttgccaggctgaggtgtgaccgacagcacccatgcggagcttgctcaaggcgtggcctcacccactcttgcagttatgctacgacgtcttctccgcccgatgctcggcgtaatgttcagcggtccgttgctccacggcagtccaccagccttcaaggcagaatctctgaactggagagccttgtcgtgacactcatgaaaggccagccactcccaagcccgcccgccctggcatcgccgagaccaagctcgctatcaatcgcagatgggttctctgagattcagagactgaatgaaaatcacgctggagctgcatcgccggccgaccctggcaccctaaagttgcgcgagtctgggaccagctatttccagagtattcattgggaggctatcctgaccaaaataagaggattgaaggaggatttggtcactgatagcacggctctgcccggttcgcacttgttctatggcccgaaccgtcatgccactcgagatgaaatcctggctgctgttcctcctcgtacagttgttgaccgcctcatggcccttcattttgattcctacatgatcactccgtgtcagtacacccaagcgttctttccgttctcagaggcattgactgggtgctgtagatctcattcattgcaataaattactccgagaggtgggtttttaaccgggcggattgcaagcaatctgacattggactagtacgaaaccttttggaacgatccgtcggcaacttcgattgcttggatcggtctcttgttctccatgttatatgttgctgcgcaattgcagaccttcaccattgactttgccgacgagcgggccgaatcgctcaaggtggagtatcttactatgaaagatgtcttccgggagaaggccgttcagtgtctcattttgtccaggtatacaaggggaggcccgtatatcctggaaactcttataacgatccttactggagagtttgtgctcttgaaagagagcgcgacggatagctggcttttgatcagtctgatactccatcttgcagtgcgcatgggctatcaccgagacccagatcactttcctggagtatctccattcgagagtgagatgcgtagacgcgtctgggctataatcattcaattagatctcgctctctccttggagatgggccttcctcgaagtgccacagatacgcacatcgatacaaaacagccccgcaatctgtacgacagcgattttgatgaagacacaaccgagatgcctccgccgaggccagaaacagaatggacgccggtgctccctctcattgcgaaagggcgactaatatcagcccttggcttgatttgcgacatcaacagcgatattaatcccccttcctacgacgagcttattaaggccgacgcacttcttgaagacgtgcacaatcgtgcgattccgcctgtgctgcgctggcaaagtatgccagcacccattacggatagtccaagccttgtggtacagcgggtgagtgtggagatgacctatcacaaatcacgcatcctactgtaccgaagagcattgatcaactacccagttagacaacccaagagcgggacagggagtcggtgcgtatttgtttagattccgcactcaagatcctatcgtttcaacagatgcttcacgaagagtctcagccattnggtcgtttgtatcagcttagattgaaggtcagccatattttaaccaggatgttctcctcgcacgagcg

SEQ ID NO: 10677 - DNA, 621 bp, Emericella nidulans
gcaggtcgactctagaggatccccaagataaatgacagatgctaaagcagagagacagaccaataccgtaatggatcttgatgtcagattttcttgaggggacaaaagaatatcgggataaagtataacgcatttgtctctgtctttagtgtacactgaatccgctttattagcatgatatttggatgcttgagcagcgtaatgatagttaccaccgatgttgaaggatgttggctgagtttgggggatatgaggccgagtttcacctttctgaggtgatttgagaccagcactttcaagggatctgtgtggtaccggctgagtttgtgggatcctagacctgggtggttcaaggtaacttcctctaggttctggagtctttgagcgtggtccttggtttcttgtcctgtgttctgatttccttggcctagtatcaggacttagaggtgtcttaagccgagtcttagatggcatttcatcaagaattggagcttcaccttcacggtgatcgatcttcacatcgaaaacaagagccaaaataaacatccaaaagatgtgcacttaacaaagtttatatagataacactgaccgagaataaatgctcacccttgatgagaaac

SEQ ID NO: 10678 - DNA, 591 bp, Emericella nidulans
ttcttattgtccctcgattattgttgtgtcttggcacgtggaccatggacgggaagacgctcgaagtggacgttgattctttctcctctcacaattcaaaacttctcctccttgcaccctttctctttcgcgcggcgcactacgaccctcccagcccttaacatttgctcccacctatccctacttcgtctgcgtccatttttccgtctcggtttgggtcccgaatcccgtgtgccacgccgtctctggctctgataagttttcgagcgctccgtccgtgtcgtcatgtcaactcatgacaacgcggaccgccagtcagaatttgttgccgatgcagtcactgcgatgaaactggagcagtccgagaataacaccgatgctccgatcctcaacggcggaggcgccgcgatgaagcccgactccaaagccgcgtcgccagaacccctaataaaagatgagcgggcatcctcgacctttatgaagtcgcgatcctcttcacgaacaccgtcttcacgaacaccgctcaaaaaagaacactcagatagcgaagatatccaggaaacgagtaaggatgatgcgtcgggtacagaa

SEQ ID NO: 10679 - DNA, 584 bp, Emericella nidulans
gatcccctgctttagattcctgtaacagagatcaccggtttctctagatcaaaattcataatagcgggatttcgaagaatcaaaagagcagcatcttctttgctaacaccaaacctacaaaaatatccagccttattcatcagagcttcttcagaatattccagaaaaagtgacttatttctacacatcaactcccacatctcttcattctcacaacccaaatcgtaaaagatcctaatcttcctgctaacggcgagccaagaatccacattttcttcaaaaagatgatgtgaatcaaactcatcaaaaagtcttttcagcttaacaaacaaacaacgtatctccgaacccaattcaccacctccacagagagtacgaggaatcgctaaacaagtaccaatcaccgcaactgtactgaatcctatatctttaaacttaagtagcctggattcaatttctccaggacgctgcacaaaaaccaacctttcctctttatacaacttaccaagcttattccaaggaaacccaaatccagataaagcaaaagctgcatccaacacagtccgatcctcagagaagaagaa

SEQ ID NO: 10680 - DNA, 1840 bp, Emericella nidulans
caggcattacagcagctctgtggcttcaacagcttgatgtatttctcagcaacaattttctcccttctgtcattctcgtcgcctacgcttacctcgttatccgtggccctgacgaacttcctcttcacactgcttgcgtttgtctatattgaccggattgggcgccgtcgcatcttgctatattcgatacccgtgatgatcatctcgctcttcgtctgtgctgtgacattctcctttgtggagttgccgaaagatacatcagaggcgcaagctcgtcaagccgcgacggatagttccgttatcccactgttaatccttctatgtctcacagtgtatacagcagcgtacgcctttggcctcggcaatgtcccttggcagcaatcagagctctttcctctgaatgtgcggtcgcttgggtctgcccttgcaaccgcaacaaactggggctcgaactttgttgtcgggcttactttcctcccgatgatggagttgttatctccgagtctggtttttgcgctctacggggtcgtttgtattgccggatggtttggcgtacgaactttctaccctgaaatgagcgggctcaatttagaagacgtaaaggcccttcttgcggatagctggggtgtaagagcgagcttgattggggttcggaatagatatgcttagctcccttattcttgaatctagtacctagatagttcaatcgatatatattgtccccaagaaaagctggtagacaaccacatcatgaaatgtcttatctaacttgttttcatacgagttaactatctaatgagctgctgctacgccagcctcgtctgcttgtgcgctaatcttcttcttgtacgcgtcaacagtgccgtcgaacttctgcactgttcccttgtcgcagacccagagactggtgcagacattccgcaacattgtcacatcgtgagacaccatcacaacacctccttcaaacttctgcagcgcctcagacagtgcgtccataccttcaatatccaaatggttagagggctcgtcgagaacaaggatgtgtggatttgttaatgacaagcaggcgaaagcaacacgagacttttgacctccagagagcaactccatgcgctggaggccggtcataccggtgataccaaatctgcagccgttagtactagccttccatataggtggaggaacttacgctccaaggtgccgacggtactcctcatctgttttcccaggatatgttttggccatgaagctcacagcactggtcgtcaaatccagagcgtcgacgtggtgctgcgcaaagtagccgatgcgcaaccgtggatgctgtgacatgagaccggaagtaggttcaagctgcccagtgagcaatttgagcaccgtggttttaccagcaccgttcggcccaacgataccgatacgcgagtcgagttgaacatcaaggtcaacattcttcagcagaagcttgtctttcgtgtatccgaacgcaacttcggtcatctgcacaattggcggagagagcttctctacttcggggaatttgaagtgcacaacatagtcgctttccggtggtgtcaatacgggcatcctctccagcttcttgattcttgattgggcctcggacgatttggcagcattgtaacggaatttatcaatgaacgctattctagtcagtggtgtctgatggagcggtaaggagcggaaatgacaaaccttgcagatgcgcacgttcagccaattgcttctcatactcgcggttaggctgtttgttccttactccttggttgtgaagaggagtctgtttaatagtttgtgaatgaaaaaaatatggacctccaatctt

SEQ ID NO: 10681 - DNA, 373 bp, Emericella nidulans
tccaactacgcaaacacagaccacatcttgtaccgtcaggccttatcgcgctagcaacgtgttcacttttaaaaccagcgggcggaccaaacacctttccatctatcagggggccaaaaacagaaccaccatacagactactaaccgagaataaaatgcatcccgaagcgaaccatcggctctagaaccacgacttctcacggactcagaccctgaataaaagcccccagtgcctaaacgtcaacccactcaaaaaccgaacttagatttaccgaaccacggattcaaatgcactagaccataaacatccaggcgtaagaccacccagaggccgtgtcacaacacattaccaaccatgacatgaaaaccaaac

SEQ ID NO: 10682 - DNA, 637 bp, Emericella nidulans
tatgaaccaaccataatccaaactcctgaaaatgtttcgatccaactccaaccttggaaggcaaaattttcctttcccaaaatgcaagaaagcggaacccgactcacgtcacggtaaggttaaatgacaataacatcaccttcagcatctgcggggtcggagaccatcatatcaccgtactttcccactgtcattaacattgagtcgtcgtccagatcaatagcactgtcgtcgtgattaggggcgtgaaaggacgttaagttttcggaaatatcagtaggtttttcatcatccatgcgactgggatttgtttcgactcccatccgtgacctctccaatgatgcgccatcttgcgcatttgacgtagatgactcgttaccaacaacttttggggaatttctgaggacgagtcctcccgggccggactggtcagagtccaggcctgctttctgcaaagtgcttggtgtgtaatgcatgaatccacccttctctgcctgccataacatcatctcatggaaaaagaccttggtcatccaccaggcactgaagctctgggcacctcccaatgtaaggcggtgtagtatgcaatcccacaatgcatccactcgttcaatgatgcactgtgtcaggtgttgag

SEQ ID NO: 10683 - DNA, 461 bp, Emericella nidulans
aaaaacccaacttacccacaccaaaacgaaaaaaaccaaaaaacgctaaaaaagaacaaaaaaaaaaaacacaccgacaacaacgaacaaaaaacaacaacaacccaaaccaatactaaaaaaaaaccccaaaaaggaaaccccaaaccaaaaaaaacaaactgaaaaaaaaaaaaagaaaaaaggaaaaacaccccacaaaaaccataaaaaaaaaacaccaaaaaaagatctaaaaaaaaaataaaacatcctaaaaaaaaaacccaattaaaaaaaaatcaaaactaaaaaaaacaaaaaccaaacaaaacccaaacaaaccaaaaaaagacaaaaaccaaaaaaaacaaaaactcaaaaaataaatccccaaagggcgcccaaaaacaaaacaaacccaaccaaaaaacgaaaaacaaacaaaacgtacaaaacacaaacccggaaacaaagaacaa

SEQ ID NO: 10684 - DNA, 536 bp, Emericella nidulans
ctactaacccaccgtgatgtccacgcggccccccctcgatccaatggttttccatgtcaagcaccccctatcgctgcaccccgaccattccacacattctagtgttgcctttaaacaggcaaccgcggccaaacaacacctcgcgcttccaacctcgacccctcaatgacccgcacaccacaacgccaccactgtggaacccaaatcgttccgaacataaacgcttacgcgccaatccaactctactcgctttgcccaatatatcacaggccctccacgttcaacacccctaacaacaataccacattgaatacccaaccaaaaccctacgaccttaaacacacacaaatatgcacgatgaaaacgtacacgcatcccctcacagaatcacccccaaacacccgacaacccaaatccactatagatgaccaacctacgaccacaatgccaaaactcgttacatccccgccatgctcgaattcactcttcaggacccgacctccacataacactgcttaataaaaaccgcgatgcca

SEQ ID NO: 10685 - DNA, 1860 bp, Emericella nidulans
cttaggagtctcgtgcccttcttatggttggcgcttgggatgtcttgtgtgctatagtatactctgataatatttcgctcatgctgggatgaagcggttgagatacctttttgcacgttcaagcgatatgtactatgtagaaaactgtactcatgttgggtaatatcaaaaaaacgaatcatgctggattgcttcatactctacgccaaatatgtatcttcctctagtgcacacatatacaaaagcttggctctgaccaatatgacttaccataagctcctcaatatagtgctttatccagcatgactaaagaacctcacctcttctgtcacatggcagttctggtatgatgagcgtggaccgtaggtcacacgcggagcggaaagcggaggagcagcggacggcgtcatcaatcccagttccgcgaccaagttgacctcacccactaactctgtcaatatcagttctttccagttcattctcccgccccgtgcttgtggaatccttgctacgtttctcagcactctatgattcctcctggcaatggtgtaatctccgtcttgagcgcaacgagcgtctgatctccccaccgaccacccctatgcgagcagtattgccggggagacccccagcgaagctccagtctttcggcactgcgtcctggaatggccttcgtgtggttgtatgtccttcacctccataatttgcccgctcactggccatcattgagctaattgtgtgtttccgcttaggtgtacatctcgggtcaagcactggtcattctcggcggtccgcacaacctcctacaaacaatttatgtcgacgatacgcaagcgctacaggctgttgctatagatggagcttcgggaagaatagctgtttgtgggggcccgtctgctttcgtctacgagccttacggtacctacggcgaaacgctgaaggtgtgtggttgcgcccaagcttgctggagctgggagtatggcaaagctcggagatattgccaaaatgctgacattttggtcccaatagtggtccttggcctttacccttcgttacgaagacgatgaagagccgatttgtacgatatcgtggggttcttccgacgagctccttctggggaattcacatctcacgctctggttcctgcatgacacacctcgggcggcatggcgggagaagctcgctaacccggttaagttcgcacagatttcgcctgactctactctcattgttaccacaggagtttatgatcggtttgtgaaggtatggaagaggttagcattcggtgctgacgacgtgcgcttcgatgtatcatacctcgcgcatcctgctatagttacggggtttcactggcgccggccgcttcatggagagcagtcaatggcgaatgtcttctacacattatgcgccgataataaaatccgagtttgggcggcgattgataaccatgccccatctccactacagctatggacgcagattgacatgaaccgttccgtacagccgagacacgcaacgaatggagtgggcgtatcacgccgctacgggtttatcatcgatagtcgggatttctgcagcgctaccgagcgggcggtggaacgaggtgcaggaaacaaaggaaaccatgctttggaacatattatcgaagttgcgacgaggagcccggagatatatgtggtaatggatggtgaagggcatatggctgcctgggcgttggaagacgtcggctccaaggcccaatccaaaatgaacgtgttcaacatcctccatgtcgagggtttggatttctcgttcttgcgcggacatctctgcgaggaagattatgcgcaaatatgtgcctttcaaagtgcagatcctgga

SEQ ID NO: 10686 - DNA, 1125 bp, Emericella nidulans
ggtcgtggacctggaatgcctcgggttctgaggggtccggggcgagctcttgcatgaaccggatttcgtaatgaatgtttggtcgtgctgacggtgtgctgaagattttgagccgacgtgggttcaggcccaggatgttgatgatatctgtacggacctgtgaggtggcagtcgctgtcaaggcgctgattggcacgggtgggtttgttagggaatgcctgaaccaagagagtgccttgtatgccggacgaaaatcatggccccattcactgatacaatgggcctcatcgatggcgatgcgcacaagctctcgttgcttgtgcatagtttgtagatttcgccggaatgtattattttggcaaagctctggggtaacatagaggagtcgaatcctcgggtgaccagagagaagatcctcaagtataactcgcctttctgcaagtgagactgttgagttgatggtagctaccggcacgcccagcgcttgaagtgcgtttacctggtccgtctagtagagtatcagcccgatatgtcagagatcgtacggcaagaaggaaccagtggagccatcctggtcaaactcaccatcagagacagaagagggcatacaacgacagtcactatggaacgggacttagcgttggttgagcatggaccattagcaggagataacaccaacctccgtgggtggtcatggcaggtaactgatagcataagctcttcccgaaggaagttgaagcctggagaaaaacatcgtgaccctcaactgcggcagcgattacatctcgctgtagaggcctagcagtcgatcaattcaagtcacgttggatttagtgatagaatccaagcttaccggaacgatttcttacggaacacacggtgaagatagaagtctaaatctaccttccggcggctcagaccgttatccaacatcactgcgacatctttacggaaaggagcatccaaaagccactgagatagatgaaagctccgctgaaccgaggtggatgcaatatgcaattaggaaggtcctacttggatcctcaaactcaggaaaggcatgtgatcacgtgagacccatacctaccgtgagtgaagccaacgaagagacaatacggcacaaga

SEQ ID NO: 10687 - DNA, 880 bp, Emericella nidulans
ctatcaacagatcataatccgatccacgtctccccttattcgcaggctttgccggcttgtcgacaacgattgtccatgggatgaatacgtctgccgttgttcgaagtatgattgaagaccacttggcaaaaacgggctgcgccaagttctgccggtggtctacaacattcgaggatgttgttcgtggtggcgatcgcctgcgcatcgaactgcagcaccaagggatgatttctggaaatatggcacttgaggttcaggtgtggaatgagctacaaacctaaaaggtgctcagcgcagcagctgaggtggagcaggctccgacagcctatccattctgtgggcaaggcagtcagaagaaggaaatgggtatggcaatctacgaaactgatggatctgccaaatcggcgtggcacagaggacaccgttacctgtttgagctttatggtaagaatgtctgacatcgccttttctctagacccggcactgataagtccacaaggattctcactgctgaacattgtccgcaacaatcccaaaagtctcacagtctatttcgggaccacgaaaggtcgtcaaatccgagcaaactatcttgctctcgcccgcactgaagtcatcaatggacgcgaaatcacagtaccagtcgttgatggtttgagtgagtcatcaagttcgatcacctttgaggaaccaaatggactcttgttctcgacacagtttgcacagctggcgatcagtctgatgaacatagccgaatcaagtgcgctcaaagcccgcggtctcttccaacaaggtgccgcgttcgcgagccactcgcttggcgatacagcgccttgctcgcctgtgctgactttatgagtttggagaactccttagtgtc

SEQ ID NO: 10688 - DNA, 597 bp, Emericella nidulans
gatcccccaatcagaacttttcgcagcaggttttggttagagatggaaagaaggaaacttttgatgaagccaatccatttgctaatgaaggtgaagagattgcttctgttgcttataggtatagaaggtggaagcttgatgataatatgcatcttgttgcgaggtgtgagttacagagtgttgctgatctcaacaaccaaaggtcgtttcttactttgaatgctcttaacgagtttgatcctaagtactctggtgttgattggagacagaagcttgaaactcagagaggtgcggttttagctacagaattgaagaacaatggaaataagttggctaaatggactgcacaagctttattggctaatgctgatatgatgaagattggttttgtctctagggttcatcctcgtgatcatttcaaccatgttatattatctgttttggggtataagccgaaggatttcgctggacagattaatctcaacacttctaacatgtgggggattgtgaaatccatagttgatctgtgtatgaaactaagcgaagggaagtatgttcttgtgaaggatccacgaagcccaagtgaggatttatgag

SEQ ID NO: 10689 - DNA, 920 bp, Emericella nidulans
cttaggtgacactatatgatatactagcgatccatgcctgtgaccaaggaaaatgttgtataaaggggctactggtcccttattcggactggagttttcagagctaccggcatttctgtctttgtgcttgatgtgcacctttatggtgctatttattgtccctgggtatccgaagtaaggccccagtccgaggtgtagagctgatgctagaggagcagccccaaaaggcaacttggaatataaagctgtcaagttggtcactactacagacgctagtgcctgcccctcttcgggacttaagggagtctgtcgcccagtgacccttgctcgtagtagttccgccgagagtgtccgtgtcacgtcgtcaggtcttatgatggtactgggaacgccacttcgatttatactcgatgctgtgtttgtgacgactgtggcactagatccttccccttgagaggccgctgctccgttatttgcgacggccggttcgttgctcaccccgtttacgagtaatgtaggtggagtcgcgagccgaacaggggcacctgaatgctgtggaacttgtagttggagtttatttggcttgccattggtattcaagggcgttggagattggttgtactgggactcagtagagtcttgctgcaggacaatggagggtgagggcctcatcccggtactgtgggaatgagaaggatctgagcgattaggattgacgggaaaggatgagaatggtccggatactgttcccctgtttggaggccttccgcgcatcttcccagtagacgaggttgtgatgtttggccacgcagatgagacagcgggtccatgtcgccttctagcacgagatttgtctcctgaagatggtgtcacgcggaccgtggttctgcagacgaaaggaagacgtctgacgaatggtg

SEQ ID NO: 10690 - DNA, 635 bp, Emericella nidulans
gcaggtcgactctagaggatcccctacttgataactgcctccttctaattccattcttatgtcagctctaacctttggcaggcgatacgtgccacgaacaagctggtcgctcactatgagcaacgtctgagcaaggttccctcggcgagcgagctcgaagaagggaagaccctcatccaggagctgacaacgagtgtgaaggatggtcaggagcatgaggtttcgttccaggtatgcctcggttatgtcttgtttgtatatattttatcgatgatacgatgactctgacctgactatggtttcaggcggagatcgagaggttaaaaatggagttgtccacttcgaaagacctcgagaaaggttatgctgagaagatcgggctcatggagatggaaatcgggggattgcaggttgacaagcagacagcgagaaaccagattcattgcttggagcagaggagggaggagctctccaaaagggtgatggaactgacttcgactgtgcaaggagcgaagaaggcggttcacgatgctaaggttgaactggccgctgcgtattctaggttgctggctgggatcaaggaaaagtgggttccaaaaaggagtacacgatgctggagggtcaacggccgaggt

SEQ ID NO: 10691 - DNA, 547 bp, Emericella nidulans
tttgtgtttgcgctagcaaagcaggctgtgtttatgcgcgcatcaagggcgcacgcgagcgtgcagtggttctgacggaaacggggggggacgccatatacacaagtatggtgacaaagtgcgggccacgcacttagttacagagggtgcaaaaagtgatgattatcgagccgcacctgctatagaacagagtttaacatggacacgaacctccacagagaacagatcgaggaagagagctaactgcgactaacagagtgtgcatagactgaataaacagttgacgatattcaggataccatatatagcgcaggggttcgctcagtacaggacaataggtacaatacgtttaaatccatgatatttgacgtcttatcttcgccttgaattcaccctaacacatagaggcggctgcagtccgactagatataccgccaatattccaggtctagagacagcattctactatcattaatgctaggagcgtgtgatggaacatctccgacttttgggatacgcgagcatatctaaagcaagagctttttcc

SEQ ID NO: 10692 - DNA, 640 bp, Emericella nidulans
gcaggtcgactctagaggatccccctactctgccatcagatgtaaacaccaacatgcttccgactctgaagagaattatacagaacaaaattcctgttaggatcttcaggtaatagttctattaaaaatctcctactgcttttatttcttactgcacctgtatttgtacctaacacttagcttgtcgacaattgcagtggagatcaagattctgtagttccatttctgggaacacgaactatcgtaggagaactcgccaacgatctcaatttcaagacgacagttccatatggagtgtggttccacaaaagacaggtagttagcttacaccattaaacaagcagcaagttctcaaacagattgtgaacttagttatggatgtatgggattttgactaggttggaggctgggcatcgagtatggaaacctactaacttttgcaacagtgagaggagcggctcatgcggtggcgtacacgcagccctcacgagctctgcatctattcagcacctttcttcgtgggcagagattgccaacaagacagatattgctatgcatgactgaaagagaaggaactcattattagagtacatatcttggggacatataagggattgtgttgagacatattttcatatga

SEQ ID NO: 10693 - DNA, 940 bp, Emericella nidulans
ggccgaccttcccggtttcagcttaccgaaggtatcactgccattttgccaatcttcctacagggtcttttgaacggcagtgttgagcaacgtacccaggccgcccttgcaattggtgacctcattgaccgcacggcggcggattccttgaagctgtttgtgactcaaatcaccggtcccctcattcgtgtcgtgtcagagcgctcagtcgacctcaagtgtaggcaaatcaatcagctgttttccgttcatcgaagctaacaagattccaggtgccattttctttacgctcaataagctcctgcagaagattcccctcgctgtcaagcctttcttgccccagcttcaacgaacctttgcccgaggtttagctgaccagactagcgagactttgcgtaacagggctgccaagggtcttggaattttgatcaccctgacgcctcgtgtcgatccactgattgcaggtatgagcatttacctgttccccatgattctgatactgactgaatacagaactcatcactggaacgaagactgccgatgttggcgtgcggaatgccatgatgaaggctctacaagaggttgtaggcaaggctggtgcgaacatgagcgaggcttccaagaactctctccttgctcttatcgacgacgacgccagcgatcaaacaggtatgtgatatcacctttgcgtgaacttgcaaaaactgattcgcgcagatgccgtggccatcaccaacgccaagttgcttggagcactcgttaaagttctgccaccagctactgctggcccgcttatcaagtacgttaaaactcatctcgttttacgcaactactaatatccattaggagccgcgtgctcacatcgaacttctcgcatgcgttcattttgggattgaatgccctactggtcgactcttcgtcatcattgacagagcacttt

SEQ ID NO: 10694 - DNA, 564 bp, Emericella nidulans
gatcccctgatataaagatgggattgacttttaggctttgttaattaacgggttagagggttataaatctgatagctgtgatggtttttggttttataatatactcattccaataaaaactaatgtaattaaacaatttatagataattagatagaacgctaatcagctctaagtttatagatggctacgctacttcgactaatatctgcatataagaattattgatcttacgtgatttatctgcagtcaatttaaagtttttgtcttaattctagtgtttcttgctttctgtggtttgttggtgaagtgtgttagtagttctatttgagtcctatggtcgtgttggatttttattttcatccatattggtttgttatttgcttatctttggtgcctggtctattcggatttattggtggtccgacatttagatattctataggggaactttatgaaaatctctctaacttttgttcaatagtgtttagatgcgatcctttttagtacttatgatttttttcaacaaaattaattacatctcaaaagagttattactaacatat

SEQ ID NO: 10695 - DNA, 1131 bp, Emericella nidulans
aattaaccctcactaaatggatcttctgtccttcaggaacccaggccgcatagattagaatattacccgtgtcggggtcaactttcttgaagcgagtcttcctcattgggactgagccagcaccatcgaccgtcccagctgcagcaccatacagtgacggcaagcccggtcttctctttgctagaaattccacttctggggcctccaagtgcttagggaccgtcgtccacttgcgcaaggagaaattacgctccatgttttgctgggtttgctgttcctccgggtccgtagtctccttttcctcatcgtcaatgtccttcgaaacttggcggatgtatatgcaccctgcacgagccgcgcgtagcagcgcccgactcatcgggctcaggagatgactatctttcggcattgggagttctggaatggatggcttcccaccatttcccgacgtttctaattccgtccccgcggcttttggtacttgcgatacggtttgtatctggcgcgtccatcgccgaacgggtaacccttcgaagacatcgtgatcgatctggccggttctagtgcggttgacgccgtcgccgaactgacggccagaacgagatgacctaaactacgcgatgttaaccttcaattcgggtagatttgcgatcgaggctcttccgcgttacaacaagagaagggtaggactcactgtcgggggcatggcgcgcgaccggtaaaagcccaccttctttcaatccacgaacaagaaagtgtggtcgtcagaagtattggaagagtaccacaagatactggctggactgcccctcaatcctcagaaaagggccgggcttgacagggaggtagtgtgttagtaaacggactccaagctgtgaacaaatgcgaggcgcgcttcctccggcacgtgatcattatgaggatgaggaacaaatagcgactacaacgcccatatcattcgtgtcagaagtactccttgacttgtacagagagaagattgttctcaaaatgcgcaacaaagctaacgacatgataaggtggttctgaataaaagtacaggtaatttccagatctattccattctcctgcatcatcaccaccaccaccattactgttatcgctccctgacag

SEQ ID NO: 10696 - DNA, 2283 bp, Emericella nidulans
gattggagggacgtaatagcgaaccatgggtgccagttggtgagctatggttgaaccgtcgtgagggacgtagcggtgaataatataggcattatgttgtccgtgttcttttagcgatgaatacacgagccattcatgtcctcatttcctcatattgtattgttgggttcttgctgtcggggcgagccgaacccagtcagctgagagtctcccgaaagacttatcctcaattcctcccatcctcaggcttagagacgatcatgtatgcaaatatgcgagtatcgtatctcctaagcccaatctgtcgattctcaatctgtcattcgctgctgggcggcaatttgcagctagagcagcccctcctctgcgacctgctgggccaatgaagacgaccaagacgctgccaaatgcccggcgcctatctcagaccatccgaccaaccatcgtattcgctacttgctcgttgtgtgatggtaatggtgatcaccgtcaggctgaggctggtcacggacttgtgcgcttgtctggacttgctcaacccagtcaaatttcgagctgtggcgtatacgttatttactgcgcctgcgctgcctcgctgacgcctattcttctctccaacaccccgcatctcagcccacctcgatagctcctttttcgcgtcccctgaaccctggaaatcctgttcatttcttttttcctttcgttgtgccagtcgcagtgtgatcggacccttcctatattgtattacattgaaatcatcggggggtgaggaaacactgccgtcacgatgaatcctccgggaacaatcgttcccaggaggagctttttctaaacagccctgataatcaacaggagggtgagtccccagtaattgggccgttgcgcatcagcaaacgagagactccctcaccggcttctgcgggtgctgctcctctaccataccccgacgaccggccaaggctgcagcagcatgcccgagtttcaggctcaagtggttcgagcccaatagcccaagcaggtagacagagtagatctccgacgtccagtggaggactatcgccagttgactacccggccgctttgcgaccccgggatggccgcgagccaaaacaatcgaccttggctgaacgacgagggaatgcgcccaaaccgctaccggagtctcccatagtcgacacggctgacagagaggctttcgctgctaggatgaaacagcgggctccaggacctccagtcgatagtccgtcgcaaagtatggcgtacccaaattataaccagcactattaccctcccccgcagccctccacctccgcgagaccagcgtcccgcacggcgtcgcagaatacacaaccgccacagcacggtatcaaccgctttagctctacagcttccacatcaacaacccgtgccgagcgcgggtctcctccacctccggaaacacccatcgttgaacccggacagcacccggcttctgatattgaggctcgctatgccgcctcgggaattgcgggcacctcgaccctgaccgggctgcaggctcaaagcgctgcagcgcagcgaagagcagaacaatacgctggacagcagcctagaaacccggttcagcggccgtggacaccgactgagctgccagggtctcatccccatgggccgcccaccgtatatcagggcgctgaggtggtcgcgttacagacatcaaaccaaagtgcaagcccttatccttctaacatagctgcggcttcgtctcaagcgccacactctcagcagccggcgagaataccgaacaacgccctcgaacaagacttggagaggatgcgcatcagttcgtcgccccctccagcttactcaagcgtacctcgcccagcctccacttctcagggctattcgaatgaaaagcagcgtcttgcagctgcatcaaaccaatcgaatcccgcatcagcacagcaacctgctgctgctgctacggcgacagccgcggtggctggagctgctgcacccatggtctcggcccaggaccatccggcatttgccaacgatccaagacagcaacagccaccgcaggtatcaggaccatcgccacaaaacgacgtgcaaaatggtggccagcaagaccagcatccggctttccaggcccagcaagcacaggccagtgcagttccagttagtgctacgagtttcccccggcatcgcctcctccgctcccagaaggctggattgcacatctggacccaaactctggccagtactactatatccttccctaggagtcgccatctcagggac

SEQ ID NO: 10697 - DNA, 582 bp, Emericella nidulans
gcaggtcgactctagaggatccccccctttgggtaacaagtaagctactcttttttttcttcttgatattctctagtaaatggtaagctcaaacctacataatagattgatattatatatcaatgaaagaaagagatacaattactccaaagtttaactaaaatatcatagtctaaactattcttcatgagtctcaactctttattatcatacatttgtactagtgtatacctatgtttagtttttgtaatcaatcctttcatgagaacttacatattttcacaaaatatatataggtggtctacaatcgcaagatatttaccaggacgaaccgataatgaaataaaaaactactggagaacacattacaagaaaaaccaaaaatcttcttcgaagcaagacaaagtaagaaaatctctatcccggaaacaacaacaagtggatcttaaaccacaaccacaagcacaatctgagaatcatcagtctcagctagtgtcccaagatcacatgaatatcgacaacgatcataacatagcttcatccttgtattaccgacaagtgtcttcgatgacaaattatata

SEQ ID NO: 10698 - DNA, 467 bp, Emericella nidulans
tgatcccccgatcgtcttgaccacgactcatcagacaccattcatctcctctgtctccgctctgtatgtgccacttggcgtctctctcttcctctctccaacaaatacaaccgtttgtctaaattcccaaagtatcttcctttgtggtcatcttcttcttcatcctctggtttcttcactctgaaacaaagcaatgtctataaacttgaagctcctttgaatccgagaacttgtctggttaagcttcaagagacaactccagcggattatgcgagtcttggatctattctcaaacgacagaatctgtttcttacatgagaatttcccgtcaaagatcgacttgcaggagtttcatgtgagattgggtcgtagaacttatcgtatggagtacgctgactatggtggtggtgcagtgcctgtttctggtctctgcactccgacaaagttgtgatgatgtcctcagggga

SEQ ID NO: 10699 - DNA, 998 bp, Emericella nidulans
gttatattttttttcttttttcataccctcgcctagttgaatagctagctaacccacttcacagagccgagcattcttcaaccgagacctcgaaacaaagatcgccgatcacagatactcaggcttaacaacgaatgctcgattcgttccattcggcagcgagaaggtccgcgaagagccgcatctggatgaaaccatcgagctcaactacggcgtctatgacctggtgccaactaacgattggtccttgcccggaagagagctgatggatatctcaaggcccctgcatgaagaatgcatccggatcgcctatagccttctcgacagcctttctcaatctctgggccttttgacctctttgacgtctattcacggtccagagaacacattcttcgcgccgtactattaccatttccccgatgacatggataacaatactcttcgggttcctccgcacatagaccccaccacaatgctcttctgtttccaggactcgcttgccgggctccaaactgctgatatgcgagacttgatgggaaacctgtccagcacggcagtcgcaaagagggcagcgttctaccccgtcgggagccagccaggagaattcgttgtcttggcgggtcatatcctgagaaagcttgttggaaacattaagcactcagtgcatcgtgtcgagagaccgctgggctcagaaggacttcacttgaatttttggatcgtcccgcgtctggatacgaggattgcttccggccgggccggggaggaggaagtgagggcatatttgaatagggtgtttccagggcatttggggggttcttaggtggttgacaacagaggtgtgctctttacagaaatcagcatcgtggtgatccatttgatactccggagaccatatagtggctataaaactgtgcttcgttagaacgcggtgtttccggactatccatccgctgggctaagcttgcctgcttactcttctactctctttatctattttc

SEQ ID NO: 10700 - DNA, 2111 bp, Emericella nidulans
ggtggatatgatcgtttcaccatgctcacggcctgactcagctcgaaagcaacttaaaaatcgatcgacagaaagcatgacagctcgaaagctgtagacaataataatgtgaatgggaagacgggcagccgcaatggttgcgcgatgacagcactgcagctgcacgataccggggttggcatgttctgagcctcgttcaaagctcagtcacgctcttcaagtgattcgatgcgacgatgacggctatctacggacatgtgcttgttcgtttcgcgcttacggaccatatctgagcgcggaggaggtaaaaagccttagcatttattcccgtggcggcaacggcagtcttcatctaggggtcgttcgggctcctcgctggaaatcgcaatcagcatggtgatacactttgggctactgtgctccgtcctcccgcgctgggttgaactaagcatgaaaaaaggataggctgatgtgctcgatcccatgccatcacttgtcgcgtccgcttccgccacccacagccttgtctcgctcctgccacgctcggacgctaggctcgtttgctccgtccgaccgttgtcattgtcgcgctcatcgaggattcgaggaaggtttgtgtatcatggtacgaagtacagacacctttgctcattccagagatctggaacacgggggaagtaggaagatggacagaggctcaagtcgcaaatcgtaagtcgcgcaaaaagctgctgatcgtcgagagaaatcctcaagtagatgaggctgcctgtcatgaatactcaggggaccgatgattttcgggcaacttactccggagtaagaagagagacgggggttactgcgttgctgctgttagagtcacgctacggagactatgcgcgatatagttgagagcggacgccacatacaacaggtgctcctccatccctacggtatagccccggtctcaatcacttgcggcgcagatgctggccagatatgcgcgtctttcttcttgagcatattgttcgaaattaggagagtcaagtccagagagcaaagctggataacatacccccctccaaccagaagcattccaaggctcgcatctgccgccgctattccatccgtgccatcaccacctcctcatgggtgtctcgccgacaggtgcttccgattagccactcctagcgtcgctggccggtggagatgttgcgacgacgtacgacaggcccttgtcctgacaggggtgggattccttagctagttaaagcacgcccagccgcaggtttgatttcttactccgaaacccaccagcctgcacttcaatgttctcatccaataagctagctctcgattctgctagacctgcgaatgagctgggtttgggtctcccccgcttcctgatgatcacgaatcgcgctcaaaaaagccggcgcaatctgtcgtgctgagcgtttcaggccgcactcttcctgcctccagagttctttctttgcttaccctttccgaattatttttctcgtttttgattgttatattttcctgctgcgactgccatgccttggcatgggaccagaacggcccggaggggtgtgaaatgatgctgaggaatccaccaaatcgcttcagagcagagtctcaagagtaagaccgttgtgctctgactcttgaggcctttacaagctaagcttgaccagcgccaatccgccaaatgggcgaactttctctctttatccacctgcatctctctggttctggcgatgtactgtacctctactttgcctctttccagaatccttccttcccagtctctggctgctgtcgaccgcagcccagaattcaacgtgctgcatagggactttatctccatgcacaacggcgtatcctgaccctgtctcgaccctgcttccgtttcccttttcttccatctatcccaacccctttcgcatcttactactcgattcccatcccccctcagaaccgggtatacaccaacgctgttgcgactaacaagccgcttgacaagttcatccgcggactcgctcggattaaacgcaaaccctaccatctccgctcaggtctggggttggtccgtttctacttatttggctgtatcctgcactttg

SEQ ID NO: 10701 - DNA, 567 bp, Emericella nidulans
caggtcgactctagaggatccccttcaaatgtccccaacaatacaactttgtagagaagctcagattcttcttcaacaaccaatttcttactaaagttatgctggatgatagacctgttatggtcaaaaggtcatatacaccagtgtcctgttttttttgagatcgaacttcatgtaaaggctgtttaactctaaccctttatggatgtaaggctatagtggaagtagctgcccctttaactctttttcttcttcttccatgagaagccgttgatactccacaacttccttttccttgatagatctgtagcccacagactaatgtttttaattcacaagtctccaactttcaccaaagttgactacctccgtaaacatgccagctaaaaaatgaatcaactgactttagttgactaaaacattagtaaacatgccagctagaaagttgactacctccgtaaactacattatgagttacatacaagattgaggtaatttcaactgactttagttcaagaaagtgttcgtaacgttactcaagaaagaatgcagtaaacaactaagata

SEQ ID NO: 10702 - DNA, 448 bp, Emericella nidulans
gatccccgtgatgatgatgatgaagctgaggccattgaagagacggagaagccttctgttccagttagcaacctaaggaaagaaaagaaaaaaagaacaaggaaaaacttgcaaaatcaaaggaggacaagagaggtaaaaaggataagaaatcaaaatctgaaaatgtggaagagccatctaaaccaaggaagcaaaagaagaagagacgggaatggaagaacgaaatagctcaagctacggtatataaatatctatccccatccatgaactgagagaacaaaatgctttagacttgtctcttatatatagttgcttgacaatgatttgtataatcacgtttgcagggatgagaaaagaatagccatgcgggagaaggcgaaggaggagaagtaatgatgacctcagtgttttttcatccaaggggagttcctgcatttgcggcaac

SEQ ID NO: 10703 - DNA, 1333 bp, Emericella nidulans
agaggaagagcagctggtagagaagagaggccatggggaagaaggccgttggggctggggatgatcatcgtcaattctcggggcgtcgctgcgcatttgtagccggatcctctccagcaactttttgtttgctaattttggccgagtccatactccatattcaacataccccatccagcgaatcatcacagtgtccgcgagccaagccggcattaggctgtatacggtgcctatgcggagcgcgactattaacgaagcggtgtgcttcgtgagccagcggcagcctcacaaggaccgaggcgattgaaaatcgctgaacacctggagaaacaggggtcccatgtgaagaatcctgcgacaaatcacagaagccgactgccggaattctggcgctagaaaagccgaatcgtcacggtaaacttgttgagcatggtcgcagccgatcctcatccccagcttccccgccaaattttcaccaaccactgcttagaaaatggggacccctgtcgattcaccctaaatcaagagataacccatgttatcgtatgacatatgtctatgtacaaaggcacgcgtgatcagttcgcagggattaccattccaagctccaacctcagtacgcattcaacacccagtgccactccctcaacttccccgccctccttgtcagccctagcaattagcctgcattcctcctaactgactcctagaacattccgttcacaagcttgtctctcgatgttgccgacgcctgccacggtgcgttatgcgacccctcctccgacgaggctctcagccccgacgtcttgatcttatcgacctcctgccaaaggttaacgcatatcaacgccatatccgcatggaaagacacagaagctacggaggagtacgccgtgctagcttcttcgcatggggaggttggcaagctcatggttgctccggctaacccgaacccaggaccatacgaggcattggtagggatcgttctgagattctcgcggagaagaggtcacctacctgtcatggccgcagacctgtcgccaagagagctcccttattgttctggagacagagtcgccgtcgcatctgcacctaccctactcttacacccacacccacaccagcgcctgcatctgcagctgcacccgctcccgtagtcatactcctatgactattcgtggtctcctgcatgagcggcaggaactcccgaatgggcatcggcgaccctaaacgagtcgtttctgactgcatctcgtacccattcctcggtggggaccccgtaatccccgcagaactcccgcataacagaacaacgcgtccagactagcttcgg

SEQ ID NO: 10704 - DNA, 596 bp, Emericella nidulans
gcaggtcgactctagaggatcccccctaaataacaaatctatacatcaatcgattaccatagctctgttttttaaacaatgtaacacatataacctctagcataagcagttcattgttctccttatcaacttgtatcaacgaagagggaaagaagaacacaggaagattcaacattctcttaagcataaaacttaccagtttgcatcttcaaactggtatggttacaaagaattacacagtaactgcaagctgagacatgcaaacgctactacaagaagccactgtcaagttacattggtcactagtaagaagaaaacacacacaaaaagaaaagagaagaaaaattaaaattggagattatttattaaataaacgggtagctgaattgatatacattcagaaactcaagctaaaacaaaaacccctcaaattttgatcacaaggggttttcctgaaaacaaagcaacaaagacacaacaagtcacttactaacaccaatttgccaatttacacaacgacgattctattttggtcttccacactcacaaagactaaagaaatatatctaatcgcacttccctggaattttcaaagt

SEQ ID NO: 10705 - DNA, 610 bp, Emericella nidulans
gcaggtcgactctagaggatccccgagtggtttgatccaagataagaatgagaaaaaaatgccttgagtgcaaagggtagaactaggatcatattctgggcttaagggtagtaccatctgctggtgtatacactgtgtatgtttttgggtagatgggatactattcttgtatgcataggttggctcttacctttagcattctcctaaagctcagtccatttcttttcagagtcccctgttactaaacttgaaccaccagaaagggaccatctgtgtctcttgaccttcaccttagccaaatgagttcattgatgatgcatagcttgattcacgttcctaatctaatgaatgttaaagggattggtagatttgaaagcatgtgtaggtcgagtataagagtgggattgaactataataaggcatggctaacgtttttgagtagagttcgataatatggcatcctagaactgccaacttggacattgattctatctgatttatttgatgctttggttctgaatcccaccttcaaacctctccttcagcttatgtctacttgtttgcttgagggcaagcaaagactaagtttggaggagttgatatgtgtata

SEQ ID NO: 10706 - DNA, 649 bp, Emericella nidulans
  unsure (1)..(649): unsure at all n locations
ggggccccccctagatccgaaatatgacccacaacaccccgtnttgtacagggcggatgaccgcgtctggcagagcgttgacttttaagccgatgggcgcgcctcatcccccctgcacgcattacctgctcttcgacagacagcgaacgcaaacctgacgagggcacatttatccgcgtcaacataaacgaaaaaagagttcctttaccatactgcaaaaccggacctggactgtcttgacctttggatgaattcaatgggtatgtaggacgcacagaacctggatgacggcaattaaggctaggactgcagaattagatggggaagatggacgaataacctcttagaagcaacagaaaatctattacgcgcacacggtctcggtgcaagttccgaaactacctacgtaaatcccgcagtactaccgtaacatggattgggggactctttgcaaagccattctacatataacaatccgtaatgtcatgtgtcaattacccaccacaacactggttatttgtcttgaaagctttggggacgccgcatcccactataatatctgtaacccactctccactgaccccccaatatataataaaggccccctaaccaggaaactcccctccaataatttatttctaaaacaaaa

SEQ ID NO: 10707 - DNA, 567 bp, Emericella nidulans
gcaggtcgactctagaggatcccccattcctctctttaaaccctctgtcgcactcatagctacagctctaactcgattatttcctaataattgctgtacttcacaagtcacattaatttcttgaccaagagtatctcgacccttaaccaccagagcattgtaaatattaggcattttgcccggggggaaggctacatccagtaccggaccaatgatttgggcgatacgtcccaggttttttttttcacgtatcgaaacctctggatttgaagtagtaggatttgttctcataataaaaaaaatatgttaaattttgttacgaattttttcgaatacagaaaaaatcttcgatagcaaattaatcggttaattcaataaaaagtgggagtaagcactcgatttcgttggtcccacccaagcggatgtggaattcaattttttattcattcaatgaaggaatagtcattttcaagctcaactaactgaaacctagttttaaaataaaaaatatatgaataaaaaaattttttgcggaaagtcttttatttttttatcataataggaata

SEQ ID NO: 10708 - DNA, 517 bp, Emericella nidulans
tggtagtacagactgggcgacgtcagtatttcgttttcctggcagtcacggcgacttactgtaagcatataatgtgcggtgtactgttatgctcagggagcacgctccatggcaacatcgttttccagttacgaagccgctggtacatgctacttccatagtcacagtcttccttgcttaaggctgaagcaggaaatttgagagcaaatcgggcgatgtcatggaccatcgtgaccaggtcgccccttaccatcgcggccgtatgaaagaatggctgcatggctgacgtctcgaacggataaggacgccatccagctccttcatctaacattccagcctcctctggtgagaacctgatagctggaggtcccttgcaagaagaactttttctgtacacctggcacgctaatctatgctgagttagcggacacatatataacaaagaggtactcatacgcttggatatcgaagatagcccaagagaccagcttctgagagttcgagatcgttgttggat

SEQ ID NO: 10709 - DNA, 1309 bp, Emericella nidulans
ttgtgcgtgtatgactatgattatacatcacttggcgacgtcatttctcgaacaagctcggccgcgactgggttccgctccctctctgctattctgctgagattagtctactcgctcctccaaccgagacaactaaggacattggatgatggagaatgcgagcctcgaccaaaatctgattgatcagcctcagcagctcgcgactccgctcgactccgaccccggttcgcctttgcccgcgaacagtaacactgccggcgcccggtctcccagtaggccgagtaccagtcccaccgcagcagaagccagagtgcccatccccagactcggcgcttctgagagggttcccagccacacgcgcattccccgcgcctgcgccaactgccagaagaagaagacaaagtgcgatagccggaaaccaacatgtggcttttgccttcggtctggcacggcctgcacgtacacaaagtcaaaacgcgaaagccaacaattgcaggttcaatccctagagaagaggctgactgcctatgagtctttgttgcgagatattgtctcccgaagcgatcatgaccaccgccagacaattcatgatgccatccgagtttgtcttgctgttcgcccccgtgctcggtatcacgaactgactttaagcagcatcacttccaggcgtcccccgagttcttctcgaccctcctctctgcacaaccgctctccgggcagcggataccgtcgcccaggcccgggctctcgttgaggcgaatgcatctagcatggcagtcgaatgagaaaagcaatgcactggtgctctgtcaagagcccccgatcagagtcacctcgatacggcattggacgtcattggtcgatgacgatgtcgctagccatttgctctccttttatttcacgtgggaaaatcccacatggcagcttatcgaccaagagctattcatgcatgatctagaacaccggcgcacgagattctgctcctccttactcgtgcatacactcctctttttcggttgtgtaagcttgtcgatggctgaagccgctcggaggctaatattacccagagtttttcatacaaccttgaccgtatcaccgatcgtcgagaggagaaggtgctgggtgagaagctttatggcgctgtgcagcgtctttggctacaagagaaagagagcaccgaccttcccacggtccaggccagcatactgatcggtcttctttgctgcacgtttggcatcgacaaactcggcaccagctatattatccatggagcagaattgagcgcgaggtataatattgatgaaagtga

SEQ ID NO: 10710 - DNA, 597 bp, Emericella nidulans
gcaggtcgactctagaggatccccgaattgcatgagaagaatgaaactatatatagaggaagacagattaaattgtgtttgtaatagtaaggttggttaaaccaaatggtgggttctaacatggttatattgtatatgcagcctcaagaaattgtggcagtgaaagatctgacaaacgcaacggtttagaatgatacatcagctctgaaagaccacccaattattgcaatcttcgtctccttttgtgtgttcattggtacaaacttcggtaacgataagactgttttactagagtctgtggttttatcaatgttcttcttgtatcataaacaagaggaaacacttttgtttgtagtctctatgtcaagatttttcaataattttcatatatagtagagattatatgaacaaggcctatcactattaacaaagtaaccaaaaccaaataaaacaaaagacaaaaataattcacatttaggtgatctcatcgcgggccggacacttcctgagacgctatgtaagacgcagactgcctagagccgccactattagagctctctcgccggtggaagaccatagtttcactctccccatttt

SEQ ID NO: 10711 - DNA, 560 bp, Emericella nidulans
ggcttgcgttaaaagcgaagaaatcttttataaagaagtcggcgctgcattcttgttgataatgaagagtatgtaaatcaggtaaggaaacgaactgtgatgcacttccgccaaatctaggtatactccaccgcttatgaccgagatgacgcgaatccaagcattggcggcattactttggccagagcaatcagcaccgaatcctttgtgatagagtcggtagacttcgagcaccagtgctcgggaatccgtgaaacacctgactggtgtctttggttgcaaagatcgctgctcgagggtccctgatctcctcctcatggcaccaagagcttcaaaggttaaatcgcgatcggctaatcagcagttaagactaccgtatagaaatgagtttgtgctaaagatctgccaaaaactccgtatccacaatcaggcaagtcgaccttaggaaggcacttaagctgctggtcggagaggattgctgcggtccccgactgtcatttccagtgaattccgcggatacctaatgcgtatactgctttggcttgtccatggtgaagcgt

SEQ ID NO: 10712 - DNA, 703 bp, Emericella nidulans
aaagccgctgaaagttatctcatctattggcgaggccatcggcatgtgtttccgagttcctttgaatgagttgcctgtgcatcggagggtcgcctgcattgctaggctaggcaaagtaggcgcagaagtcccagacgcgctagagaaggaagagcgggatgactgagaggacagcgttgaaacatccgaaaccatcgactctggtgacgatgcagatgacgtcgaacgagccagggacgaccgacgcataaatgtggggaacccttccagtgcgctgctagcctttgagcacaacgacggccgctggtcatacattgaccgcgccgtgcacatgctctgagacatagcagcacacatttgacgtcggtaagaggggcggcagccagcactcacagcaggagtggaagcattgctcgtttgcggagtcaactgaggggtcggcagcagagggagacggggtagcgacggtaggggtggaatagtgctgtccggacgggatggttccgagatctgagagatagaaggaagcgcagtaggctcgacattcaccgaggggtagatcggtggccgcgcgcaggtgctgcgaggcgacggggaatttgacgcaaaactactatcgtatcctcccacactagaaggagtcataggctcactgtcgatttcgtccaactcagcagtcagccgaggtatacagacgccatgc

SEQ ID NO: 10713 - DNA, 540 bp, Emericella nidulans
gatccccgtaactatacctccatccgccaatccttttccgccacgtcctccgatggtgaaggtgaaactccaccaccttcacccaccactcctctaccagcttcacccaacactcctccaccagcttcacccaccactcctcagccacagcctgagcctcttgttccttcccctgaagttccaccagagcccccaaccaatgaagacaacgaacgtacttctgtgatcttcactttccgtggtgaattcctcggtcgatgggagcaaaggtcagtgaaattccggatgaaccaagaatcgtattccccaaactcagaaccactgagtatcactttattagaaatctgattaagaagtttacaactaccttaattggttttacacaagatctaaactactttagcttgtcaccagagatttccctaaacacacaagagcagatcacaagaacacactctttgatctctctagaattccaatcagactaaaccttagtctctaataataaaaagcgttgcactagcttttcactcacaatca

SEQ ID NO: 10714 - DNA, 1345 bp, Emericella nidulans
agccgctgggccttgccgagcatttgcgagccaaaagatgaactttggctcagtacgatgtctagatccctccaagcggcattggatggtacgccgatgactcccagaagctccagctcacttaatgctgccatcgacggatgggttggcttccacgacgactctgtttctgccctgagcgcagcttcctcgcgaagggccacattttcacgcctgagacgagaattctcctcctgctggatttctccttggcgtctgatggcttgcaactcttggtagaggagagtcgtggcatctgctcccgacttgagcccgtgatgccatgtgcttgcctcttgcgctttttgcttcgagagctgcttctgattgtacatgatgacagtcatcattaactgaagatcccgcatcatgtcatgagttgtggaattctcctcgcgcagtcctctgaaatggttttccgtagcggaaaagtgtttgtcggcctggttctggagatcaaccccctgttgatgcagcgtgccgagcattctatccctcatgcgctgcatgcgctgattgaaggagtcaattatgcccttccattctgacaggacctcgtccaccgcaacggtttcgggaatccgaaatagcagaatctctttcagtttgcgataccctgacactcagtcagcaaagtcatgcagaatatacataggcatagattacgcacaaggcgctgctcgcagtagcacgtcgaccagcagtggcattcccttgattaaagtcctgtaaaactcttctctcagatcgaggtctccctggctcggtcgtagaacagtgcaggcgacattaatggtgacgatcgtattgggtatcgaggagaatgcgtctaagattttagctctgttctcaatcccctgtagtgcaacctgaaaagtcaagagcgcaatcttagtgagggtctcttatttgttgtgactgttctagcagggccatactcgaaacattaagcccaggatgcccttgactgtacccagtccgaactcagctggcaaggcttcgaatgctgatagggtcacgtccaacgccatcccggtccgttgcccgcaaccagtatttttggcataagcgtcttgggcttgagtaagcgattggatgaccacctcccaggagcattggtagaattttggctccccgggttggctgtcgtcgtgcttgcggagaaggttttccagatacctacggaaaagaaagtcattcgataccccattacaatgggtacctattggccgttaagaggactcactcaatcgcctgctcctcatcggagatgtaccgcttttcgcttcgatcgtaatcggccggc

SEQ ID NO: 10715 - DNA, 592 bp, Emericella nidulans
tcgactctagaggatcccccttgcttttccgattacaccaatgctcgtttcaatatctacgatcgaaggttaaaactgatcccctgattattaatgtaactcaatcctcaagaatcaaagatttattttccgttgattgaattttgcagtggtaaaatcttcccgacgggaatcgcttctgactcgtataaaaaggcggttgactcggcgattctcaagttaaagagccttgaagctcaatgttctggtcaagtagctgaagaagctccttcgtgcgttttgatcctctctgttttgcttactggtttttttattttgcttcgattctaatgtgttttggtttggtgtttaggtcaccgaagacgccaatagaactagccattgactttatcttgcatgattttgagatggctggtgagttcttgagaaacacacatgataataatgtcgcagattgattggttgattgattctttatactactaatttcagaggtagagccaatatccacttatgtagactttggtgaaagagagttcttggttgctgatgaaagaggttacgaatgtttactttataaaatggctgagga

SEQ ID NO: 10716 - DNA, 1910 bp, Emericella nidulans
tgcgataatacgactcactatagggatccttcagaccgggagggttatcggtaccccaaagcttccggcgcacgcgttcggtgatcggggtgctgtcgtcggaagcatggcgaagaaattgacgggcgacgaaagggcgggggcgcgcttcttgtctgcaggttgagcaaacgtatcgagttctggatccctggagcggagcggccgcctccaggttcaacaatcgcagagaggaacgcatggttgcgattttgagatcttgcctgtaacttgcacgcctgggaaaagttgtcacggaagccgaaaagtgaagcacgtgacccatacttatgttcttggcactgtgtacgacttcgggagttttatagttttgcagaatcattttacagagaaaatcggtaatcaaaattttcaattgtactatgcagaggtatatgacgctaaaaccattatatagacaggtggcagatttactcccgaacaaacatgccggccatacccatgccagttccgatacacatgctaacaacaccgatttcctggccggtacgctcaagctcaggtaacagggtcgcgacctgtctggctccagtggcaccaagagggtgaccaatcgcaatggcgccacccttggggttaatcttggcctcatcaatacccaacttacgagcacagtacagagcctgggacgcgaaagcctcgttgagctcccagatgccaacgtccgaaatattaacgtcaagcatctgaaggagcttgggaatggcaactgcagggccaacacccatctcatcaggggcacaaccagcaacggctgtgccgacccagcgggccttgatggacgaagtcaggccgagttccgtggcggtagatcgacgcatcaacagagcagcggcagcaccatcgctaacctgggagctgtttccggcagtgctggagccagtttcagagaaagccggcttcaaagaggccatcttctcgacagaaatgttggcgcgaacaccgtcatccttagtgacagttatctccgtaggcggggcttcagggttctgagcatcgtaggaaagagtctttacgggaacgatctccgagtcgaatagtccagcattttgcgcagccgcagccttcttgtgcgagttggcagcgaacgcgtcctggtcctccctgctgataccgtaccgagaagcgacgttctcagaggtgattcccataggcatgatacaatccctcgaatcctttgagggcgattccttgagctcaggccacagaacagtggggatagcgcgcgagccgtagtttctggtcatcgactccattcctccaccaacaccaatgttgagagctcctgcccgaatgctgttcccaatagttgaaatagcagccaaaccagatgaacattgccggttgattgtgtggaaggggacgctgtgagggaaaccggcgtggatctgggccattcggcctgccttcgcgcctccgagttcttgaagcacggagccgatgcacacatcctcgatcagagcggggtcaagatttgggttggcctccagcgtcgcgcgtaaaacatgagcgagaagctcttccggataagcatccttaaaaccgcccttctttgcacgagtgacgggagtgcggagagatgagaggataacgatgtccgaaggcgatttttggaggacctggcgaaggccgcgggggattggagaggccattatttataaagggacagtcttcgactcaagtaatctatgatctgccttcgctagatagtcagacataatgcacgtaaacaaccacgctctgaaatctggtactcacaggagaataaccgagcgtcgccaacaagaaggcaatccaagtcacgaacgcctcactgggaatacggcgtttatgacaacttacaaagattg

SEQ ID NO: 10717 - DNA, 640 bp, Emericella nidulans
gtacccggggatccacaggatccctgattgtatatgtatattgacattatgattgcatctgcagggagacgcagacagtggcgtggacaggctctggcagaagaagaaggtcgaagctaaacaacagtgagagacaatctgacaatgtcataagctcttgtttgttttttgaggtttcgatttattagctatgtggctttgtcattgaattgaaaatgttagtttctctttatgcgaattcatgttttcgatttttctgctttattaaagataattattaggctttgaggccaatggaatcagattctatctacagtctaatactcgtctatatttctctttcaaatataactgttagattatctatcatcaacctctcggattagtgatttactgtatgaacataagagattgttaatatgtctgcaaaatcctacttttattgaaaattgaatcgtttacacattctcgatcaaagcttaaagcagtggaactttgttctttttcaactttaaaattcaacaaaagacatcttttgattcagatctcaccatcccaaagctcttcaagtgttttataaggctcaacgtctcatgaacaaacgacgtgccttggactaccctagcgtgcacagagatga

SEQ ID NO: 10718 - DNA, 642 bp, Emericella nidulans
gggtcgactctagatcccccatataacggaaattgaaactctgcaagcagaagcaaccaagcaaaatgacttcaaagacaccataaatgagcttgaggtttattttcattcttgatgcactcctgtgttttcttcttaaaaatctccatagagattttttgtttcttaagatagtgttatcgttttgtccagagtaagtgttctgttcaaaataaggagatagaagagttgcaggatcaattagtagcttctgagagaaaactgcaggtctcatcacattcttgagttttacatatagaaacgaatatgtatatgaaaatctctaaattcttgtcgcttatttattatgattaggtggctgatttatctacttttgagaaaatgaacgagtttgaagagcaaaaggaaagcattatggagctgaaaggtcgcttagaagaagcggaacttaaactcatcgaaggagaaaaactacggaagaagttgcacaataccatacaggttaagatttgtcatttggtgtccatttcccttgtgaaattttgagcgagctgcttggccgatactgaagcattgaaatgttgcaggaactgaagggaaacatccgtgtattctgtagggtgagactctattacaggagag

SEQ ID NO: 10719 - DNA, 364 bp, Emericella nidulans
taccggcccccccttgatctattctcgatatcataacaggttattttcgtcgggctggcatcgccagacactcaatattgataggacgcgaccccggtcgagttcacatcactcctatcacgatctgactaacgtgctcgctctgagcgcaataggacaaactaccgagggcaaggacctcctcatcacatacactgattaacttgcacaaactcggccttgctcatttgaggctaaaatcaaagaccacacctcctgtagctactacccgctgtgctcagaaatacgacagatttgtactctacgtcacaggactagagttcgcatatagcagtacacaatgttaaaacagcgcatttgttct

SEQ ID NO: 10720 - DNA, 1980 bp, Emericella nidulans
tgtgattccggaagggcctttgaacctagggggacgtctaactcagcttgagaagcataactttccggacacaccctatcgtgtgcccgaaggtagacgccaagaacaacttcgcagcgacgactttttctctggtctggatattaatagtggtgacctcttcagcgctaggagaccctcaataaatccaaatatcaaatacaagacagagcctcttggaagcccggcgcggcgttctgcgacgaccctgacatttacgaacgccgctgtatcgccaaaaactcgtatacctcgcctttctggacacgaccgaactcgctcaacccatctggaaacggtctctgagagcggtgctcccttatcaaagttccgcacatctccacgccgaccaggccatgtctctcactcctccgtgtctagtcttccaatagctgggtcatcacaggggtcatcaattcagtttacaccaacccgacgttcagtgggtagccgggtctcaaaagaagccctagcaggggagcatgctcctgggaagcaacttttaaaaacgaaacgatcaatgccatcaatgcgcaacgcaccgcatacgacaagtagcacttcattcgcatgcccccctgggcaaagtggcttgaactggcttaataccggcacctgggctgccactgaccgcgctggactggatgggaagttatcaactcgtaaagcccagacgcctttcttacctgccggagcctcagaaagacagtctcaccacgtcagcgtgaaaagctaccgatattcacgccggagctctgacggtgccagcgatgctatcagctcccaaggtaccgttactcgattgccgcgaaccagccgtcaagatggctcaggcgtaacttcagaaacattaagcacaacccccaaaaggaccctcacccgaccaagcacgtcgccgaaattatggtgacgggtctgaactagcctctttcgacgacttacctacatctaccgcaatggagagcaagtttgtaaaacaacccagtggccgtggggcaccgcgatccttgaaaaatagactgagcataagtcaatccggaccttcaaagccggattcacctcaacagatgttgactacaaataacccacttcaacagcaagcatctatccccagatttgcgcgagataccaatgcatcaaggaatgctagggaacagcgcatcgcctctatgtcctccatttcgaagacacgggaaaacaatcctctcacccctcttagctcaaactggaaaccccagaatatctcacgaatgccgtcaaccacgggatcagtaagaagcaagaaggggagactgggctcgtcatctggatctagaccgcagctaataaaaccgattggtgcgggggtacaggaacgaaaatgtaagtactttctcaatgaaaatgcaggaatctggcactgactttcattgagccgtgaacggtatgcattacaatccagatactttccgttgggaagggaatgagaaattggttcaaggcttcgacagcgccacgcccaagtcgcctaaaccatcgcccgccctaattaccaatgtgggggctatgcaaaacgtgcaagtggttggcggaatggtgtttgatccgcaacgcatgtgctggctcaagttagcgccgtgccagccgggcttggatggagttcttgcagtcgaagatgaagatgatgtattctcgaacttcgccgatctagaggaggcgggcgtctccaataaaagagcagcaggagccccagaggacttcggtccagcagttagcggagacgatcgaagcggcgaggattcttctgacgagtggcccataacagaggagtttgacgtgggcccagagtttattaaacgccagcatacggaagaagaaaaatggagacgcaaggtcaacaagtggatgaaccataaccctgctggctccggaagcagctggaggtgggctatccgggatttg

SEQ ID NO: 10721 - DNA, 1662 bp, Emericella nidulans
atgaagcgagaggtaggacgatgaaggactgtgagcagttcaaggtatcagcagagtcaagggcctgatgcaatggcggtgatccgtgatcagcgaacggaaggggcgctaactctgtttctttaccaatgatcggaagctcctgctggcggacttatgagtcattcacgaatcatttctcagttatttgtggatgccctcgttctgtccacaatttctttccgccccaagtcttttaagttctttaacatctatattcttgcacttccaatggcatcccttcgctccgtactcaagagccagagcttgcgacacaccgtgcgatcctactcctcgcaaaccatgcctcccgcctcaccctttgctccccgccacttcctctccattgcggacctctcgccctccgagttcgcaacccttgttcgcaatgcctcctcacacaaacgggctatcaagtcggggtcaatgccccaaaacttgcagggatcactccttgggaaaactgtggccatgatcttcagcaaacgaagcacgaggacaagggtatctacagaaggggccgttgtgcagatgggaggtcatccgatgttcttgggcaaggatgatatccaactaggtgtcaacgagtccctatacgacacctccgttgtcatttcgtccatggtatcctgcattgtagcccgtgtcggtaaacatgcagaggtcgcagatctggcgaagcactcttcggttccagtcatcaatgctttgtgtgactctttccaccctctccaagccgtggccgatttccagaccatctatgaagcattcacccccaaggcgcaccacctttcaagtctagggttggaaggattgaagatcgcttgggtgggtgacgccaacaacgtcctgttcgatatggccattgctgctacaaaaatgggtgtcgacattgctgtcgctactcccaaggggtacgaaatccctcctcacatgctggagctcatcaagtctgctggagagggtgtctcgaaaccaggaaagcttctgcaaaccaatattcccgaagaagcggtcaaggacgccgatattctggtcacagacacctgggtctctatgggccaagaggaagagaaggctcagaggctgaaggagtttgatggtttccaaatcactgctgaactcgccaagcgaggaggagctaaggagggctggaagttcatgcactgtctcccgcgacaccctgaggaggtcagcgacgaggttttctacagcaaccggtcacttgtcttccctgaggctgagaaccggttatgggctgcgatttccgccttggagggtttcgttgtcaataagggaaaaattgaataaatataaccaggcttccatttaaatatatagaggctggcgttatcaaactgatgagttgacgggtatgagatcattccgtccctaaatatatttactccgatcacgtaaaagcctgttagtagaagcattttcccaattatcctgaccaattctttctagcatatatcaaataactaattgacatgttctctcgcttccttatattactcagagtattggaaatggggcaaatcgcacccggtgactttcacatgtcacgaatgcggagtcgtcctagccaaggtagatccaggcctaacacaccccaaccct

SEQ ID NO: 10722 - DNA, 3093 bp, Emericella nidulans
cccacctcggcggaaatctgggatgctgaaaaggccatgggacgtgatgcgctgtgtgcaaatgctttgctggtgaacggcaaggggtccgtgacctgcctaggacagcagaccattgatgagtacacctccgttgcgcaaaggggtgttttgggaaaccagagcttgactgacatagggtatggtcaacgtgcgaaagaatatatgatagctagcttcagtcgcggctgatactttcgcagatgtcttccgccagacaaccttttggcgcagggtccatggtcacacaacctcagcgccattcctccaacggtattttctgattgtatcccaagccatggtctaacagaacggttctacccggacgctaccaatcgatacgccagcttcgacttggttagtgcggcgttagtttcgacgatcaccttttcaattgatgagcatcccatgtatgtctatgctatcgacggaagttacatcaaccccatcgaagccgacggaatcaccataacgaacggagctaggtattcagtgctagtgaagctcgacaaaccaagaggggactacacaattcgcgtggtaaacacgggtctcaaccaaatattgcacggcaatgcgctgatgacttaccataacggaattggtccaattcaacaacacccatcaactccatctatagacctcgttggtacacctacatcaaatcacaccctgttgaacgaatctatgattatcccgttcgctgcccaggacgtgagtcgagtagatgtcgctcaaacacttaccttgacgctcgagcgctacaatgcttcgtacacctggactatgggagactcaagctttcctctacagctagaagaagaatcaccgctcctgttctacccccaaacagcatccaaaaacttcactgctaccagtaagaatggcacatgggtcgacgtggtttttgacgttgcgaacgccatccagccccctcatcctatccacaaacactctaacaaattctacgttctcggcggaggcaatggaaaatggaactacacctccgtggccgaagcagcaaagcatatgcctgagagcttcaacttcgaaacaccccagattcgagataccttcgccactcttcctgctgctactggtccgacatggttggcccttaggtaccatgtcgtcaaccctgggccgttcctgttgcattgccacattcaaattcaccaaagcggaggcatggcattggctttgctagacgggattgacgaatggcctgaaattccggaggaatatcagcttgcgtgattcgaggaagtatctgaacaggaggatgctcgttacagatgccgaagtatcacaccggctgagtaacaagtatcacagctgtatatagaggtttggtcaatttgttgtacgttctagtaattagtaatatatttataattcttctaccatagagccaaccactgctctttcatttttccgtttgacaggttttgctccttaagatttctattgttcgaaaacaaacctagataatgcctgagctataacccttgtcgatggcctgtttgtaccacgttgcaccgttgtgatcgttctccactacgacccatacttgtggagtcctctatgagcgtgcctgtctgatgaatattccccttttagctggtttcaagtcgaaggactcgagccagcgcggacggtttaaagtcaagtcgaaccgcggaaaaggggcatcattgcaagagtccctctcgtctactgcaacggtaagttttcttcaataaaatagaacgcgaaactccgccttatcaggatgatgtaaaactctgtacaagaagcggcgaagcccccaccaagaatggttgactaggtatggttacagattggctagcgctaagtgtagatcttccccgcatgactatacagcggtgatataggcggtggatatattgccggactattgcccgtggcggcgtggccccgtgctttgatacccctgacctgacccagagtctcggacacctcctgagtctggggttaccgcgattgaggcggggtaactcaacgaggttacagcgcacgagtcagcagtaagacgcatcagtactgcacagaaagaacccaggcaattaagctggatatcgaaagaaggctcgagttctcaacctcggatgtgaacgcagtcagcgctatccccgcactagttgaagctacctgaattccgggggccgcattcgcactgcttaccctttcctgcttctttcctcgactgcccctgccgccgtgttattcgcattcagctacaaaatacaaatttacttctcacgcggcggcgctcgcgcaaggccccgccgaaccagatcagttcaatatggtcttctgcggtaaaccgagtaaaggttgcggcgaatgccgatctcgcaagatccggtgcgatcaaggccgaccaagctgcgcacagtgcgctaaaggaaaccgggcctgtcccggctaccgagatgagttgtcacttatgtttcgcgatgagagtcagcaggttgtacgcaaggcaaggggtggcacgtcaaggaggcggacaaagaaaacgacaggcgcctcgaagaagaaggaatatgccgtgccgcggccaacagcaaatcccccggcggcgtgtcagagtcgcacagcaacagcagcctcagtccggatgagtccttatttgtcggaaaggcgggtacgccaacacagtcgtcaccgtcggcaccgtcggtgtatactgcgagtgacatcatcgacttcaatgattttgaagaggtgaagctcatcaatgaggaacagcttcagatccagcaactcgcgcacgagccctggaatgcacagccgtcttggcagctgacggtaaatgaagccgtcagctacttcctctggcataatgtgtggcctggagagatgtttatggtgaatttcaagctcaagtcacccgggcatcccagtgctactttgagcgaacaggcgcagatggctgcgcttgtctctgtggggacggccatgattgcacgtgtgcggcgaacgccagacttggatagggttgctgcggagaaatatgaacttgcaacc

SEQ ID NO: 10723 - DNA, 618 bp, Emericella nidulans
ggtccgtccatccaggcgtcgttggtcggggtttagtggagaatttaggctggcgaaaacgcaccgtttgtctatgtgacgaaccctgtggaagctgatgaaaccggagaagggtgcgtacaaccagctgtgggcttctaccacgcccaagggaaacttgaagaacgggcagctctacgagccggttgggatcctgtcgtccaagttggataaggtctcgaaagacgactcgttggcgaacgagttgtgggagtggaccgacaaggcgttgacagactacgtccattagtgtagttgtattctgcagacgaaggagtgactgcagttgagtaggcgcatatcttccttgaaccaaggggaggtgatttacggctggatctgccagggatcctatgagacattgctgggaagacttgagggtcacgaggtggattactagggatattgaaatgtgtttcgtgggaacgttaatgcggaaaatttcttctatacaaaaatgatttcactggcgtggtttctggtgaccgtggataatataaacttgaaccagatccgttcctctctttgaggtcctagttccatcgaaatataagccgacatcgatatctggatttccta

SEQ ID NO: 10724 - DNA, 1400 bp, Emericella nidulans
ataatagatagtcttttttctctccgtcacaaacggcgagtctaccaatgcaaaatagatcggtagattcgttagcaggacgcaatcactatttctgtttctggtagatcccttccaacggccgtgatggccagagatgttcccgcggaactctgccggcaggaccggtgatatattatagttttgaacagagttgtatacaacagtagacggttggaccggtcgatacagtggagtgctgttgcagaaattgtgtgcgcgctctgcatcatcggcagaggcattgccagcattagagtagtagttgcctgatattggcgggggcggatattccgttgtgtcaggaactgcctcctgccagttgtgatatggaggcggagggccctctgtatagccgggaggtggtcccggcggtggcgggtagattttatctgccatcagaacgtcccttaaatgggtatgcgaagtacgtattattactccttgatccctaggaccctccttgcgtcccgacggtttcgaggaaataatgcggagtatgtcggcggggtccgttcgaatgacgtccagttttatggttgctgaaattgtggctgtgcacctgcactttccataggcgcaacaacggatgattcaaggtatttgttgacggagaatcagccagagcctctcactgtagatcaccacatttctgactccgtcctggagctgttactgaaccaagtcaaccctccgatccacccgatctagttggttcctgcaccacctattcactgtagtcagcgtgatcaacaaacagcttcatgttttgctaatttctcgactgccggtagatcattaaccatcagccactctcggttgcttcgttgtccctactgagaagttcgcaggggagccaggagaggtatttttagtaagcgtatcggtagtcagatcgatgcatgcatggcagcacccttgggctccggttgggcaattcgttctgcgctcacacgatagtttctcgaaatgtttcaccttcatgtgacctgtgcgtcttgtcccattcgagctgtacaaatctctgtgttcgctgtcatggcagacttttcatgcccgattttctagggtcagctgtgcgactcgactgcttacttatactgtcgcgctgaatctgtccttcattatattcttgactgagcgcttgtaaatatgattatcttccaacattctttgccaactcttgcgtcatcgttggtctgcccacgtcaagatgccagcgctcattgaatcgaatagcgaaaacaagaggcctcggaggccttcctttacgcagcaattgcagcgaatgtttcatatagacaagcccgtcgatgtgagtttggttttgcattagtgttgttgtggtgtaaacaattcca

SEQ ID NO: 10725 - DNA, 1008 bp, Emericella nidulans
ctccaaatctctgcccacctcccaccctcatgcggctgctggattgcatgtttgtcacttcagtggaaatccagccttccaatttctcccctctgattttgggaaccctggtccacgctctgtcaactgtccatataaggtctcgcgatacctgattgtcatatattctaacgcgcaagtagaatcgggaccgtcattttgactcgggccaaagcgagtccggggtgcttgtatcctgatctggtacatggcgatcgcggaacaactcgtcattactgccatcagaaatccagacgggacgttgattagaaaagcagtcttagggccttctgacgacgcgacgatcatcttgacgtcgtcaaatcttctcgggcctgttaccgttggcagcggcctataacgtccctccaaaactattcgaccgttggctcggtagcctgccggggcttctaggctctagcagcaccgatgtatgtccgcgacgctggcggatccgtatcgagactatgccattgactatactcaacatgccacctgcaagcctgaggaacatgaaggcacgctcgtatatcattcccaacagccacatattcagcacacgaaacagacagacacatctttcacttccggaaactcgcacggcgcagcattcgagcagcaccatgcgaatgcgaccgtactcccaacggcaacaccacaaactgcagtccctgatatttcacaggcagtcgtcctcaaccaagctcagatgctcccccgtcagcttccggtgcagtacgcgactgccaactatgacattgcgtcctctgtccagcgcggcaagaaacggcctcattccgaaactgaccctgagagtggtaacacagaccatggaatcagacagttgccagtcctcccaccagatgctccttcgaaccaacccattctcccgaattacttttctccgtacatggagaatctgcgcagcaccatcaccccatgcaaaccctctaaagatttaaagcacac

SEQ ID NO: 10726 - DNA, 2035 bp, Emericella nidulans
gaatcactgtaagaactgacaaagtgccatctacctccgctctcaaaaccagcttcatactcactccgattaaaatgcaatcagagagtgtaacttacagagagtctaccgatgacacctctagtcttccaagcagagaatccgacctatgaccgtcttaacgcctcgatcgtttcctcgaaagagatagcactcaatgccatcttgggcaacggaatatctatcatcatgtgcgcaacctccgccgtctgctccaccggcaattccaacacattgttccggatcacatagacattgtagtcgagatcaaacagtctatgaactgtggccatcatgacacccgaaagactgagtccagactgtccattggcgctggttagcacggagtaaatcatggcagaatcgtgtgtcatatacgcaccaccacgacagacttgattcctatagcccgtagtatctgctcaagtgggctcccagcggctgcagaccatcgcgtcttctgcagcaggatgtccgattcatttatctggaaccgatcatagatttggactctgtgcgagccagtcgtgaacttgtcgtatggctacatttgcttagtaatgataaaactatgttcatcaactccgcgctcaactccgacatttcggcgtcacttccggtggccatagccacatccactccacttgattgtatagtatagatcgttatgcagacaccaagatactcgacatcccgccagaaagcctgccaccagtgctccagtgcaaagacgcgctgcgagcgcagatctggacatggttcaggcaccagatgtatacgtcgtggtctgccctgctcatggttaccgaaacagtcgcatgatagcagactgcatagcaatgacacaacaaatatcaccattgagacggcacagctctccggcccattctcagtctcagagtcgtcaactaggagtccaggaagagtgacggtcaacccagacacaaacacaagcactgacccaagggctttccccctggatactcaactagggcaagacacaacttcatcaagtcttaccatcccagttccagtgtcagaaacagagtatgactattcaacgcataatcacgcagcattgttagcaggcagatcacattcaatgaaagcgaggtacttggtgacaatgaggacaacaccctcaacttctccaacctgaacctcttatgccccatcaacgcaaacgatatcaaagaccgttggattcaagcctacattcctgtcccgggacaaacggtaaagacgtacccggcaggtgtcagcaccttcatctacccgaccctgaaagcgtatacggccactgtcgtaaaagggcgcggggcgcttctgccattcatccatccaatgcagatgaaagtgtcctaggaagcaggggagagttcgccgctgactacttgtctgaggttggtgcgggtatgttcgactacttcaacctcggccttgggagactatggccgcggtagcagagacgccattgtgggtataattcagcgcgatgcaccgtttgtacgatgataatactcagaatatcaacagcaacagagataggggctgtcagtgtatctctcagcctcctcgccacctttcaatcctatctccattacacattgaccctcttcttccactttgacctgcaccattccacaataaacaacgacaacgacaacacccagcccctccgagtttccataacaagcctgcaagaccgcgcatacgcctgcgcacatcaaggcctcctttgcaccgccgagtcagccgcaatccgcacccggccccgctgggaagaatggattgtggccgagaccacccgccgcacgctgtacatcatgtacttgttcgacagcatcctctcgaggcaggaggggctgccgacgttcttaggagtggagctgcatgggctccccgcgccagcaccggggttcctttggagggctcggcatccaaaaaaaggggaggcggaatataatttatttttggtggaatggggggattggcc

SEQ ID NO: 10727 - DNA, 619 bp, Emericella nidulans
ggggatcctagtagaggatccccgtgtgtgtttttgggattgcagtggatggatagagaaggaaaaactccgttgatcttggcttgtatgaactccgagctatttgatgttgctaagactttgattgagttgggttctaatgttaatgcttatcgtcctggtatgtcaaagatcttaacttttcttgtaatcctagctttgagtagctgactcaatgcttagttaggatccggtgataatcattgaaatgtaacaacttgttaagttgaagttagtggaatgtgtttggagtttgagacattgttgattctgttagaggtattttgaatcagttctgtgatattagatgctttggttttagagtgtgattgagctaatgtggtcatatgtgtttctcttcaggtcgtcatgctgggactcctctgcaccatgctgcaaaaagaggtcttgagaacactgttaagttacttctttctcacggtggtaagtgtttgtcttctcatacaactcgatgaatgtgaggtcagtgaatacttatggtgtctttatctcatatggtgtaacccattttcttgtagcgaaccacttgttcttaatgatgattgtcagacacacttga

SEQ ID NO: 10728 - DNA, 1101 bp, Emericella nidulans
tcgtagagttgttgaaaccttggtatctgaactttgtcaggtaggactatactcggacgcgaatatggcaaaatagtgactggcttgcaattcagggatcacgagcgcggtataaaataggattcgacgagaaaatggatgtgaattgttctttccgcagtgcattcacttatatatacagctttggatatccaacttgcgctattatcagggaaacaattgttgcaatgcaaggctcctgaagaatactcattacttgtcatcaaggaactgtgtcctacattttacgtatgcaaaaggtgtatcgtaaaccaaaggcgaaaaaggcaatccaccccaaaatctctattggttcaagagacgatttcggcaatcacgttgcttaaagtgctcacacaccacagaataataagaccacaaccgatcttgcggtccatccgccacttattccaaggtattataatcagtaacccgaccaaggtcgttaaaagcgtagcgccactgataacaaggactttggagacggcgatgtcgtaggtgatgtcggcggcatcgctggtatggcccttcgtagtgtgtagggtcatatatagcccaccgaggccgatcccaagaaggatgttgagcatggggccaccgaagcaggcgcttagtgccatgactggataaccaagacgggcaacggtgatattggcgaccaagtcgccgagagaatttccgacggcaaaaacggtgagaccgaggagagagtcgctgatgttgaggatgacgccaagggtcttgaggagactgacgacctctgtggcaatggttgcaatccagaaaatggcaacaatgaagcccagaaatgcaagaactgggcgccacgaggtcggcggatggcctaaggagctggggcttcggcgctcactgacgagaagagcaccgaggcatacaagagtgaagaccacggcgcatagtgaaaggagcaggaaggtgcgtgccgtcaggtctgagtctatcgcggaccaagaaatcaaggctacgaattgggggcctgtaaagagctgaatatatacagccacgggtaccattctcgtgttgttggagcaggatctgccg

SEQ ID NO: 10729 - DNA, 1036 bp, Emericella nidulans
aagtctgtccactctcatggtcctatccactaaaggagatgtggttggctggcatgttgcagctgtatgtttgcgcagggtcataatattggcagatcactatggataagctgcagctctgcatcctctgcatcctacgtatacgtactgtgagaaaagttgtgtccgcaaatcagactagtccgccaccagcccagtttagttcgtctgccaaaaagccatcttcttcacctcttccatagagatggatttgaccaccgtccggggaaaccggctatccaccggggtttgagtttcgggttcgtttccgagatcgagataatacaatgttttgatgtccgtattcgtctcgatgaactccagcatcctggcgtaattcaatccaatctgatctagcccgtggctatcatccgagaaacagaaccgaccaccacgcgccaaaaactcctgtccactcaattagaacattatctcgcatatatccgctgcggtattccagctgacatgaccactatccagacagtcataaagagcagataaactgacctggcaaatctcagctttaggataaggctcgctcatcccctttcgcagcgctgcagagttcagctccagaatgcccccgtacccagccacgtagtccagattccgcagaattcgctcccaaacacccggccactgcttgaagctgcgctcgggatcgtcgctcttcagccggatgagatcgaagtggccgaccacgacaggcttcaactgcttcagcatgtccagctgttcgtcaaagaaggcttcgaagagcttctcgtccgacccgcctgctagatcccgagctttctcgtacatctcccggtcgtagtcgatgggtatggtcttggtgtggtggatcgagcccatgaagaactcgaacgggaaagcacgcattgatgtctcaaccaaagtccgcgactctggcaaaatccagtcgcattcaaagccaatcaggattttgatctggtctgcgtatttctctcggagtcgggtggcttcgcggaaatcg

SEQ ID NO: 10730 - DNA, 111 bp, Emericella nidulans
gacccgtggaatgacaagcgcgaagtggcaccacgtccaaatgcggcagtcatgacaccatccattagacgtcgaccgagagagggtgctgccagcagaagagccacaggc

SEQ ID NO: 10731 - DNA, 132 bp, Emericella nidulans
agaggccgatcaagaaggaccggttcggatagatctagcggcatgcgcggaagccggcggcgggtcgggagctttttctgcataatgagtctcatgctagcaacggctggtgccgagtagtctcccgctgcg

SEQ ID NO: 10732 - DNA, 445 bp, Emericella nidulans
attggcccaattcggtaacggcctaatgttagaagagcgcgttgagggctatcattatgtgtagacagtcagcaaaaatctaagtcgaatactaaattttcatttttattcttatttccctcttcatttgtatttttatttttcttttttttttgataattaggagatttaagagtggatggggattatatggtggtatatggaggatagggaagttcgatgaagaaatgtggtttatgattggttgatatgttggagggttgaaatttaggaagatatgatgagtgatggtgtaaagggggtggcaagagtgaaaggaaattttaggaaatgagaaaatgaagagaatagaggttgaatgtttgtttatgagagaatgttgagagtgggaatgtgttttattgggtagatgtgagttaggtttttggctatggaaaatggagtg

SEQ ID NO: 10733 - DNA, 1036 bp, Emericella nidulans
acagcaatctcaagaaactgtacgttgacagactcggttacttgcacatcattcatctttccttttctggttcgaatttacggcctatagcatgagggccgtgcttgtgtgatacacctctgggtaacagcaggctaattgtcactctcatttaggatatataccctggaacaacaagcccatcgatcgaatgaacaagccactgacgccgagtctgctcctctgctcaacgatacgcaaaaccctgataagctatttcagcacgctcttgatgtagagttggataagatatgcgctttctaccggtcgaaagaaagagaaatctatgaagacgttgataatgttatgaaagatgcggaggaatacacggctaaggccgacggggccgagatgaatcccatgcaggacagcatgcacaaaggaaggagagtgagcactggatccattcaagaccattctgccgagtttggtctaggtaggcgccaaagcatgggaagcgaaccagctgccgacgacgacgaagatagcgatgacgagcatcctacgacacgccctacactaggccagtcacggagcgcctaccctggccctcctgatgataaccgtacagaggatatgaggagttcaatttggacagattctaggtatgctccaaacagccaggcggtcgttcggcgaggcaaccagaatgagcacctcaccgatcccgcgctcctggacctttacaactcggctgcttcccttaaaaaacggattatcgcagtctatgtcgctctctgcggacttaagtcctatgtccagcttaacaagactggattttccaaagctttgaagaagtacgacaagatcatcgaccgcaatctccgtcgagagtacataaactcaagtgtatccccagcttacccttttctgtcctcaactatggaaaatatcgagggttttattcgtcagatcgagactttatatgcggagttgaccacaaacggtgatctttctctggccagacgcgagcttcgtttgcatctgagagagcatg

SEQ ID NO: 10734 - DNA, 476 bp, Emericella nidulans
ttccggtcgcatgttcgctcccaccaaggtctggcgcaagtggcaccagaaggtcaacctcggccagagacgtttcgctaccgcctctgccctggctgcctcctccgttccttccctcctcttcgcccgcggccaccgcattgccaacgtccccgaggtccctctcgtcgttgactccaagaccttcgagaacgccgccgtgaccaagaccaaggccgccgttgcccttctccaggccctcggtgccggccctgagctcgtcaaggtttccaagtcccgcaagctccgcgctggtaagggtaagctccgtgaccgccgattccgccagcgccgcggtcctctcgtcgtctacaaccccgaggtggacggcaaggagcttgtccgcgccttccgcaacattcccggcattgagacctccccgtcttctcgctcaacctccttcaactcgccccctggtggtcacctcggtcgcttca

SEQ ID NO: 10735 - DNA, 467 bp, Emericella nidulans
ttcggtaactgcatcatcatttgcttgacagttagtattgaattcagcgctgtagaccccgagtggatacccttcgttgtaactcccagtaccggtgcactatacaccacgaaccttctcctgactaattaaccagtgtctaaaccgcagcgaagtgagttggtatgaagtatcttagcatgagtgtatatgctggtttagtaatcatggtcttctacactccgaagaaattctcccctatctgcacatatttgatcgtctgccgccagaacgtaaaagcaatatggattgagccatcctccccaacgaccatacttgggtatgacagctccctattcagcttctgctcgctattgttggttaaacaatatccatccccctcctccagcgtccggtgctgccacgtccttccctcgtcatcgctccaagcaacagaaagcggcgccctaggtgctccccaaaacgct

SEQ ID NO: 10736 - DNA, 2276 bp, Emericella nidulans
  unsure (1)..(2276): unsure at all n locations
gaaactatagtgaatattggtgagaaaggaagctaaatctactgcttatagagccactaacgtactatgtactaacctactaacgtatgttgacgagtatgcctgcaacaacatttagcagggtgtatattttatttggaaaattgtaacaacagtgtagaacctaaggccaatattctccagcaaggtacagaccccgtacatgcaacctggtcgagtgacctggggtggaaccccggcctcaggctgttctgtcatgccccgggtctggaccaaactatcgctgcctttgtcagtctttccctgttcacatgagctcccatgacctcccaccgagtctgccatcgtgagtataaagtctggcttcaaatcgctcgaggaatttcccatcatcaattccattcctcaatctctcttccacctcgagcttctcagcgttcgacctagcgcaacacctgcttgctattacttcagttcctctttatctactctattacctacatactttcacagccctcagagccatgtctgtctctattgaaaccacttcgactcccgtcgtgcctctcaagcaggaggcacccgcagttgctaccaccaatagactgcccgagttcagtctggccggaaaggtcgtttgcgtttccggtggtgctcgtggccttggattgacccaggcagaggctctgcttgaagccggtgcccgcgtctacgctcttgaccgtctcgaggagcctgtgtgtaccccaggtcccttggattgaaataaaagctaacatattgcctacaacagtctcccgatttctacactattcagaagcgtgccagagaggaactcggcactgagctccagtaccgccgcatcgatgttcgtgacacagagctcttgcacagcactatcgaagcaatcgccaacgccgagggtcgcatggatggcttggtggctgctgctggaattcagcaggagacccctgccctggagtacacagcccaagacgccaacaggatgttcgaagtcaatatcaccggtgtcatgatgaccgcgcatgcggttgctaaacagatgattcgctttggaaacggaggaagcattgcactgattgccagtatgagcggcactattgccaatcgcgtaagtccttcatatcttagccccctcacccgcacaccccgggtcactcccccgctttggcgccctatcactgcatgtctctagggatagttcactgacatttccacgtatagggtctcatctgctctgcctacaacgctagcaaagcggccgtcatccaactcgcccgcaaccttgcctccgagtggggccagtacaacatccgtgtcaacactatctctcccggttatatcgtcaccgctatggttgagcagctcttcgtccagtaccccgagcgccgcgacgagtggcccaagcacaacatgcttggacgtctgtcctctccgcaggagtaccgcggagcaactgtcttccttctcagcgatgctagcagtttcatgaccggaagcgacctgcgcatcgatggaggccacgccgcgtggtagttggcccgggcggccacttcatcgcatcgttcccgttcattttcgtttcggtctcttgagcttacgactaattgcacgccccggggtaatcattgcatggcgtttatggaagcaatagcggatcttttcctttttttcccacctacttaatcatctgactagcaaaagagttagcgatcatggtgttgacggcttgtgatgggctgcatagagcgtccgttttgtttcaggatcatgtaattacgtgcactttgcagcacaattaacgaggctccacatctttcgatttttttccaactttcctgacacaacttgaaggataaactgcgtgagtctctgcgctcgccaattatggtcggtcctgtgccacatgacccacttcggcggacttcccgggatcatacatagtcaccttcactgtccaagtacggtttcaatgggcggtctgttcctcgcataacgctgattagctccatcttaaagcgggctcacatatttacaataaaaattttgctaggagaggggtttctcattctaatatttttcgggtggggaaaattttaaaagctctcccttttttgttttttgtggaattttacccactctccttttctcctcttacatataatcttctgtttttttttgtctncttttgttatattagtttcgccgggcggggactcataatacataactagttttgggtgtgtcctcctccc

SEQ ID NO: 10737 - DNA, 217 bp, Emericella nidulans
gtgtgttgtactgtcttgtcttgtgtctttctatgtgtatattatgtatgtattactgctatgttgtaatgttctagttgtatgtgattcttcttatcttgtgtctgtctgctataatgctgttacttctgttctcttatctctttcttatgtcactgtttgtgttcgtcattattattctattcattttcccttatatgttccttcatattgttat

SEQ ID NO: 10738 - DNA, 388 bp, Emericella nidulans
gctgctgtcgttccccttgtcttcccggggcactaccaccagacagcccggtattcgcccagcgccacactgctgagaagcaggactacgcaagccgtgatgcatgcccacagaggcattccgcagcatcggccccgctgagttcgagtgcttgcctttctcctgactcaagtcctgtccttgttcctgcgaatctcattgctgaagtgtggacctcctccagacaacgggccaggaagaccgaccctctggtgtcgcagcacggttaggaaacgcaggcaagatgtccttaattgagccggacctgcgattcgcatctcctgatgtagttgttagctgaccctgaagggttggcatcaatgaaagctcggaacgtatttaccgaatg

SEQ ID NO: 10739 - DNA, 1493 bp, Emericella nidulans
gagtatgaaaaaataaatggagggtgatgttatttataaaaaagtggagagttttttcacgcccacaaatttagggggatatttaaagttcaatcattaaggagaagggaccccctttgtttttttcccgctcggaaccgcaaatttttttttttataccctccgcgggctgtattataaaacaatgttacccccccaccggggggtttagttccgggcgctccctatttgtgtgaaatggaagttaaacgggtatttaaccaaagcattaaatttaggtcgcctcagcggatgctttacgaccactcagcagataccaatcctctatgaagaggcctccctatacacaccggagtgcacatttgattcaattgtcgcaacaattccctaagtgtaaggctcttccacaaagtgctaaggtctaccgctaggtggcatcttcaaacatcagtcctccgaggccagacagcgttgctatcatcttaattaggggtggtccttccctcatctatatagcaagaacagtctagtcattctcaacgcacccgcccaagttgagccaataattagagctcacagcctacttccacccgtcacttcccactccgaaattggctaatcaggccaattggcagtagacctgggtcaacaacattgaagcctccaaacagctctacgatctccggtccatatagctgcgcaacccatttccaatacggggtcatcgagtaccaatcgcccttgataccggagagacctgactggtttctcagctgtccgaaacccgtcgccagaggacccgtcgggtcatattcaatgacctgctcggacggacggcggagaaggttgtcgtagacgttcaacagctggccggagaagccgtagtcaaggtattctcggtggcgggtgtattcctcgaaggatagaaattcgtttacatcgtcgggtctgaaacctttgttctttgcgatgacccggtctttgtctttgccggcgtaatggcgtttcagagcgtcataggtgtcctgctcagttcgaaagaaggcatccatgagtgagtcgggagtggtggttagcgcgtcgcggacgccgacgaggttgatgaaggggctagacaattcgagaccgccgagatcgatggggaggaagaagtatccatccgggatggaggtgtttccgaagcgagattggatcgtttcacgcaggtaggtgaccacgctttggtcgcctttggcgtcgtcgccggggccagacgagaagaccttgcgctggatacgctcgtgagtctggagcatcatgtcgacgtgttccttgccgaaacagtttgcgggcgcgccaaagttgtaggtgaagaacgttgacgcataagaattccaagcctgaatccagctaaagacgctaccttctttgtcttgaagctggcgtttcagttccgcgatgtggctgtcaaccatatcctgatcaatctcaaaacgcccggactgggggttgag

SEQ ID NO: 10740 - DNA, 104 bp, Emericella nidulans
gcttcgaggccttgcgtcttcgtcttcgagcgagtcacactaacaagtctagtacatgcgagacactgacaaggggtaagttcttctgaacgatctagctattc

SEQ ID NO: 10741 - DNA, 3247 bp, Emericella nidulans
aagtaaaccctccagaccggactcaagagtccaccgctgcctatcgctgaaaagggtttggttcccgcaatcaaccaccaagtctcctcttgacctcaattcctcacaaacggctcaccctccatcgatttggtgtcaatttctcaattgaggcaatccatcaggatggtccggccgttcttacacgcccctctgcgtttccgccgaataattgtcccagcagtcccaggcccttgtcgtcgaacccccgcgcaccaatcaatcaacacggtcaatgctgtctgtcaacgatccttcgccctttcgcagagatataaccaaggcgggtcgaattcgattgagaaggaaacagctgttcgttccggcgaggagaaggttaatgctgaaccggctggtggggcaacatcagcactagaaacaagcgcttccccgagcaaagagaagcttcgatctataccaaaacacaaggatgacaaggatgcatcatcagcggcgcccaaggcgagcttcggtagaccggcggtggtcctcgacgaacaaaagcttgtcctcaaactgccgtcgaaggacttggcgatatcctatatccaactgcgtgactcctgtagatgtccgctttgcgtcgatgtgcattctaagcagcggaactatcggctttctgacatccctccccatatcaaggccaagtcgcttgaatgggagaaggatgtcctgaaggtgacctgggaggacgatattcccgggttcgattcatctcatgtttccagatacacactgccacaactcaagctccgccatccattcccagtcacatctgcgactggcattcgaaggaagcgtatcgattggaacaaagagaaaatgacgaaactacagcactggatttcttatgacgattacatgcataatgacgagaagtttactattgccatgcgccatttagctactatggggttgatatttctaaaagatattcctgactcacgggaaatggtcgaaaagatcgccacacgcataggaccgttacggaacaccttttacggttcaacgtgggacgttcgaaaagtccccgaggccaagaacgtcgcttataccagccaatacctcggtttccacatggatcttatgtatatgaaggacccaccagcttttcagctcttacactgtcttcgcaattcatgcgatgggggcgaatcgctgttcgcggatacattcaatgtggccggctacctgtatagaaatcggcccgagatctttcaaattctggcgaagaccaaactcagatacgaataccaacataaggaccaaagctacagcaatgcatggcccgtcctcgaaaggggcccgcttgataagggtcatttcttagcacgtgttgcctactcacctcccttccaagctcctattttgaacgactcaaacgcggaccccgaatatatcgcgaaactacaaactcaactgggggcgttgaaatatttcgcgagctctctagaaagagaagataacatgttcgaattgaaactacaaccaggcgaatgtgtcatattcgagaaccgtcgtatagttcatgctcgccgccagttcaataccgctaccggcgagcgatggcttgccggggcgtatcttgacgaggatgttgtagcgtcgcgcttccgtgtgctccaagaatcccatcaggatgcttgggtgaacttcttggacatgagcgtaagccagaaagttaaacagattaaaggcaatcctgaagcagtggtaggctctatcccttatacgaagccttgaaataagaatgctactaacaaaacaggcaagcgactctgaaccctcgcgtggagacagtgaagacctgtcgtttttgtggactagaaacgcttcggcagctccagaaactcgagtagcctctccagctcaagaaactgctgaaggtcaataggtttgagaccaaggggaagcataatctgcagaacgccggctatttgctcgtcaaattgaagatatagaagcccttaacgaatcaactctaccttcggaagcaaaagctgctttgagccgctcaagtgctcaatggggaagaagcagacgcagatcgtatagatgcagcttttttggaaagtagtggtcattttgcacatacggaggctttgcgagtgtatatgccacgggtggatttactgcgcccacctatggagcaatgatagtacggttccgcatcccggttaattttgtttttatatatatcatactggctacgtagaacaaccaccctcaagcataagaaacgctgattcatcgttcatcgctcgagtcagtgagtctaagaacatgagaaggcgacaaggtcaaacaaatgtattgcccccctaaaagtcttttcttttcttttttttcattatttgttaatggagaagctgtccaggaaattgggatcattctcgagttcttccttgacctgtattaagtgtcaaacgccaatcagttagcatgaaccaatacgggacgtaagaagaagggggtacatacaatatctagcccaccaactaactccccgttaacccataactgggggaaagtaggccagtccgcaaactctttcaaaccctgtcgcacatcctcatcggcaagaatgttgaagaacccgtatttgacactccgttcacgcaggataccaaccaactgtcgactgaacccacactgcggtgcactcggtgtccccttcatgaatagcatgacgggcgcagccttcaccagctccgaaagtcgagcaaatagcgcctccttgctctgctcgggcgtcaaggccggtgcggcgccagcacccgaagcagcaccggccacaggtgcttgcgtagccgtcgttggcgtattcacattctttcttggcacagcagtcaatgcaggtggaattgcagatgcggcgccattggcgcttgcacctgctgagccagcaccgggataccgttcaacagcatttgcgcaccttttgcgcctttctgccgagattgttctgggactggccgttgcgatgggacaacctagggacgcgggtactcttatctttgagatgcaggggttttacggtgcactgttaagaacggtggaggtttggctggttttgaggcaggtcttacgaaattaattccctggctgtcttgtcttgtttgacatagtctcgttggcattgtcttttcttgagttattctcattttttgcggttttttatttattgtttcttatctttttattttct

SEQ ID NO: 10742 - DNA, 1259 bp, Emericella nidulans
atctctccgtcactaattcggctccttggctatctcactctcatatatctactgtataacaactcgaagcacttttttctgcccagattttttgagtttgtctgagtcccgatactctctcaagttactatatctactgcctagccgtactttatttcgagctcagcgcgagaacagcgtctagcaatcacttatatgaaggcgatatcgtgctttactttacaccaaactgcaagagttaatctctgcagaaggtagaagtattctgtacaggcaaacgctgacgaagaaggaacaggaaatgacaaaaaagcagccctctcaaaagctcgttcctgggaagttgccacggtcgcgaaaacgacatggtcactgtgcaggcgttcaagtcataacgatttgatattgattggatgcgcgcaaggaaagtcaatggcacttcgcaactcaatcaatcataggcgttatagcgcgaaatcccacgtcatcgcattttggcccggacccagccgtcgccatttgtctatttggccttaccaccgctgacctcggcgaggatagacttccaagcgagatctcccttgtcgtcggcgtggatggatgtaacgacgttgagagcgttcttcaaaacctctcgagtgctggcgtagatcatggaccactgttgttctttgtgagcagcctatatgataataatcagagtttagtaacaaaaacatacgttgatagaggtaccggaaggcacccaagagatgaaaatgatcttgctcctgcagaaacaaaggttgtcagtcaggcacattgtccagctcggggtactagtgataataccttgtgccttcaccaccacccaagtcatattcgacatcgtagacagcatagcggggagcgggcttgccgttggcatccttggcgtcaccgagtttgttgaggaaagtctcgtaatcagggtcgtcggaggtctcatcaacaacaacctgtttcttgtcgtccgagatcttgaagataatgaatttgggcttagatcccttctgaccaccggtcatgcggaggttgttgaatgcggtaatgcattcatcctgaacctggacactgagcgttcaacagcgttagaatcgtatataacgccgggtataatcaattcgaggccgacgctgggggcgacgagtaaacatacccagatgcgagctatgcaacgacaagctacagttaacagaacgaatttccaatgtatgcgattgtatcagttactcaccgac

SEQ ID NO: 10743 - DNA, 503 bp, Emericella nidulans
cgttgaccttgatcagttccttctttccgtcgacaacccagaaacaatcatccttggcgaccatgatatcacctgttttcagccacccatcgctgtcaaggctttccttggtcgctttgtcgttcctccagtatccgagacacacattgggacctcgaacatgcagctcccccggctctcccggtcgcaccggtctcccctcttcatctaagagcttacactcgcaattagggtcgagcatgccgacgctgccagactcgtcgtagagtcccccggggacatggatcgcgccgcaggtgactctcggtcatgccccagccttgtaccacgttggtcttgaagcggttctgaatcgtattctgtagctccctcgagagcggtgccgtccacaaagaatatttctgacgctgctgagattgtagcgcggcgtctccgacctcttgtcgagcatgattaggatcggcggacgacctggagatgagtaatgcgtaccttcgatagtg

SEQ ID NO: 10744 - DNA, 600 bp, Emericella nidulans
atgtatacacacatacgatttaggtgacactatagaatactaggatcatctgggtccagcggatcctggtgtcaactattgcagtggttgggattgaccgcgtgtttcgaccggcacatgcagatcatgatggctacattcaagtgcgaacgatgtgtagcggctcatagagagccagagtgatattgcgatatatggctgactgcaaccaagcactatgggcattcatagctggggtactcacgaccactagggttgtctcaactatgcgtgtaacatcatgatgcgagacctgttaagagggacttaaacctgtctgcttcaaaacctagagacccaaagctcgaattgaattgacctacggcctatcttgctcgcactgaagtggcgagccccttgcagtatatattgagtgtcttgactcgctgctatgcaatagtagatgatactgcattatagctgctgccttggctgtgctgatgtagcagttgtctggcctgcctccatcgacattcgtgccagatcaggagttatatattcccacattagggtggtgactgactgcgggggatatgctaggccggatcgatgtacatgatg

SEQ ID NO: 10745 - DNA, 132 bp, Emericella nidulans
tatcaagttctcccgttacggctcaaggtgcgatcagagttgccaatgctgatcatcaacgcactgtatcgcactatgaagtaatggaaatggatgaagagaagttggggaatcgaatctttgaaaaagtcg

SEQ ID NO: 10746 - DNA, 1595 bp, Emericella nidulans
taaccctctctccttatcttcgagggaagtctttatgcgccctcacacaacttgtcaacgtagtggccccaactctcacattctgctattcgtcgatgtgttattgtgctccaaatacgatattagggcttcccaggcgtctggcgaagaatgcgaatgccttaaactaagaagctttcttgcgaaagttggggtccgataaggaccattgcgcatatagggttgtcaagtttaagttcaaattgaagtagtgctttataattgccagagtggtgtcctcggatccggagtcgctgccattgcatgagcccgagggctttgaattgacgtatgtccggtaatataaatgcgatggatcttgcttgagcgagatgagacgaccgtaaaggacacagcgccattcgtcgttatcgggatctttgtgccatctgccaaattagcagcttgtaagtgaaaagtgagagtcaagtaccggaatgtctgcccgcatcgcagcgtggtatttatgcatagttcgctaagaccaattggcagcttgtgccattctgaaaaggcgcccaccgtcatgatggctcgaaagtatagagatgggacagtgaccagacgtagaattgaggaacaaaaagatgattctgccgtagttatctccaagatagggagcggtctgtcttccgcctaatcattgctaaccccatatagtctagtgccgatattgctcgcgccgatcgagactttggaagtgattctgcgagttttcgcccagagcagcttccatccagagattattcgccgacttctggaccttaattttcgagttatacccattgttttcagagtatatttcttttctgcagttccgcaggtctctcggtagcatttcgaccgcggcattgccacccgaaacgacaaagttcgaaaggagctcagaagtgaaatcgtgctcgtttcaggatgaacggcgatacttattcctctagaggtaagctgcttttatgctgactagctggcttgaattatgctaattcactcaggtgcagattctggtcgcccaagggaccactacgtgagtatttagttttgattcacagagctctattaacattcggatagcgcgacgagagacgcgaacgtggagatagaggggagagaagacggtcaagatcgccacattacggttccagaagctctcggcgcgaagccgaagctgattcatactcctctagtcgtgactaccgcgcaagggaacgggaggatcgctactcgagccgtagggatgatcgggattatgaccgggagcgaggcgatcgccgacgcagagactacgatgatcggccatcgcgtcgcgagagagatagagatttattcgaggatcggcctaggagagatcgcggcgaccgggagcgcggaggagacaggagagatcgaaagaggagcccctctccttcacgtaaaagggagccgacgcccgacttgaccgatgtgccgtccgtgttaacgcgcaaggccgtcctgacacagtgggacatcaagcctcctggatacgagaatgtcaccgcggacaggcaaagctatcaggtaaggattgcttctgcctt

SEQ ID NO: 10747 - DNA, 1126 bp, Emericella nidulans
gcatcagtaagagagaacgctctcgaccagatctctgcctcattccttttgagtgggattttgttgttgcatgcccagaaagctagggctgctgagtacgggacgggccagctggacctgcagcttggcttcgtatcccagaatagccaacatttatccggagactcgcacattgtatccccttgtggcgattcgagattttgagcttctttctatcagggtctaattcttactgcataatgcggggttgattgtcgtacgtactaaggtcaacatgcacacggcctacctgcaacctttcagcctacaagatgtaacccaagaaaacccagagtataaaaaagcgcaaataatataggctgacctcgactccatctcattcttcagcctaccatcttgctatttaggttaactccgcatcgcagagaaacgactcacccagaacggaaacgactatgcatgccgctctcgtcccaacctggtcctccccctgtcccatctataccgagattccagacccggggcctccgccaccagaacagctccaactgaaagtcttggccgttgggattccccgcgttgtacggctccgtgctcgagggatccacccgactgccaagtcagccagtctcccgtacgaccccagcattgacggcgtagggattgacgaacaaaccggcattatgtactacattcttccgctctcggcgtcttgtcttgcggagaaagtgaatgtggaccgggacaatctggtcccgctccagcccggggcacctaaacctcaacctcgaaatggacctgaaaatggatatggaattgcacttggcgatgctgctgaccatagagctgagacgctggaccccatcgcaattgcggggctcgtgaatcccgtgtcgagtagctggatggcgttgagaacaagggtggatggcgaaattacggggaaaacggtcctggttctgggggcaacgagtaagagtgggcgagccgcagtgctcgttgcaaggtttctgggagcaaataaagtgattggagtggcgaggagagaggaagggctaagaagtgtggaagggttggatggctgggttactcgggggatatgctcctggggagaccggggttaggt

SEQ ID NO: 10748 - DNA, 132 bp, Emericella nidulans
tgagcttgcggggacaggcggctgtggcggacacggccgttcacctgcatagcgtgcactgacatcagccggtgctgagcgagccggcgcccgacgtaatgcaagcgtccgacgaagggataacgcgtgccg

SEQ ID NO: 10749 - DNA, 1658 bp, Emericella nidulans
aagggctaggtgcgggagtcgaattgcgtgaggagcagtcgtcacatcgaggctgtgtggtgtcgcactcactaatggccggaaagaacagcaaggaggtcagttgtcactgtataataagcagcacgcaatgaatggacgttatgcaagacaggctaaggggatagaaataggaaaggtggagaaaggaagagacaaagcaaatcggggagcgagaaggagaaccttggaagagggggaggtggaacatacagcagccttcacggagccatggatgaccgatcagacaagccgtcaagacttaaggccgctataatggtggaaaacaggcgttaataatatagtagagaaaagagaaagctctggaagagttcaattggacgaagaagaggcgagaaggctgccaggagtccccagttccagcagtgcaagaatctggaacaaccgcccaattagagacagtactcgaagctgccctcgaagctgccccagcagagggagaaacagcaaggtagaccttataaaataagaaaaaggaaagtcttcagcgtgaggttgcaacgggctaatagtgtagttgtgcctgggaaaacaccggatggggcaacaaggagcaactgaagagtggtaacggagatgaaaacagcaagagggttagaagttgggggcagcacaaaggtttgttccgtagtactcgagtacatacactaaaaagcgattgtgatttgtgtcctcctgcttgttccgtggtttcgataaatgagtgaatcagttcctgggtcctgacgagctgacccaagatcccccgatcgctgatgatgtcaattgccaaccgtcaaccagagggctagcacgccgaaattatgacctgcaagcaaagctggcaaggcaatatcccgtcagcaagaacttctggagtcaaaaaggtcaaactccaggccggaacaggcgatgtggtcacgatcaatgcgaaatgcaataatgagtattcccgaatgcggatacgagcatccaccgcgtctgatatcgacccacgcgcaactccagccgacctggagttgattttaataacactctgtaatgccattgctgatcgccctcttgaaagcggtgattggcattgatattcggcattgctacaaatgaagcaatacctacgtcaggattctcttgctcctggcccgtttcattgacttcaatatctcaagttcttaactccacgtctacattctcagcatacatgcacaagctggattgattcgacgccgtcgttccagaatgtcgacttccagtcctttagtcttcagctagttgctgcataggctgcgcagagatccactttcaagctacctagatcgcctcattttcaggagcgcgactgcaagtctgcgactgagacaaactgagccaatactcgtccgggtgacgcgcgttctcagggaacccgatggcttgtacccaggtatggctgtcgttatgcattttctgttttctgacaacatgacaacagtgcttgttttctttctgacacccaaccaccttaatactgataggtggacggacaatgaatcggattaccgttggctctaccctgccgtccagcttccggatcccgtaaataacgatcgactaactactgccggaccctgaactttttg

SEQ ID NO: 10750 - DNA, 161 bp, Emericella nidulans
ggcaggcagtagcccggttggctggattagaaacagtgcgacagggacacgcgcggacgacctaatcgagcgaaccgggcaacacgggcaagacgccagtcaaggcgagcgggctttgactatcaagagaatccgcgacagcatcgtcaatccaggcagaa

SEQ ID NO: 10751 - DNA, 563 bp, Emericella nidulans
gtccgaacgagacagacaagcgaggtctcctggactgcctacttgcaggcaaacagatctatcttatatccctcatggagggcaccgattgcagcagcgactatttgaccttgagccaacattggatagatcaatctaacatacacactgcaaacaatgcactattgatctacataataatcgcacagagtttgaaggtcctgaattacatgaaccaaatgtcttacgcaatgacatacgtgataaaacatttataagatctattctacaatcagattgatcgcatataacagtgaacaggcgaaagatatacatgtacacacatctttagcagcagtatatgcaaagagccaatggaactgctgattatatcatacaatgatggcggcgcataattgtctaatattaacagaaagcgtgggcatatcgtggaatgtgcgcgatggatatatacagtaccaatatatatgtacgattgatcccatgtttcaacgccagactacttgcaaaataaaggtgacaacatttgtgttgatcgaatgtaaccttgaatactgctcgaa

SEQ ID NO: 10752 - DNA, 163 bp, Emericella nidulans
aagtatgttatccttaagtgctcatgatggccttactaacccaacttcagagaagacgatgtctcgcagacgctctaccaggctacgttgctagcactagacatgggagttgcaacgggaaccggttttaccacgacacgtgagtacggcatctcggttaacc

SEQ ID NO: 10753 - DNA, 104 bp, Emericella nidulans
gattgataaacagcaagtagaacggttgattatgcttaacagtagtcacaatactatcagcggtatagaatctatccgcctcggagtactcaaagaggactgca

SEQ ID NO: 10754 - DNA, 575 bp, Emericella nidulans
ttcaatttcacataaacaagcacagtctgtctaacgaaggacgcgacgccgacgcaggctgttttgttttaaaccaaggcggggccgacccacataaaaccccttggaccaagagagggaagtgctgattggggcaacgacatcaggatgggacaatacgccagaggcagaagccagaatcgcgaaagaatggacgagctgcagggcacgaccacaagacggaaacaggaaagcgctcgaacgagactagctagaaggcggaagaacgacacaaaagcacggggcaaagcggtagactgagaagccaggaaaggcacacgacgatgggcacaatcaacagagaagcgaagaggacaaacaaaggtgagctgaatagggccaccaatcacgagatagcaagtcaggaaatcgggagttgaaaggcgacacttgtcaaagacaccaggaaggatgtctaaaatagacacccaaaacagaaactcgacattgaccgggagagccaggagagagccggccactaacacaaacgacctaggaagcaccgtcatggacacggagtgctaactaaccaatca

SEQ ID NO: 10755 - DNA, 1278 bp, Emericella nidulans
gataaatgtttagagaaagtatgaggcaggaaattggaatgtaaaagacgcgaaatattaaataataatttgtggaaaataaaaggaaaaagaagaagtgtataattagagaaaagaagaaaaaaattagaatgagtcaacaaaaatcagaataaattagaagaatagatgaaaaggagagataaagagataaaagttgattattattaaatctaaaataaagatataatatagggtcgcgagtgtcttaaaaactcttcccccaagaaaccttaaaaaaattcagtaagatttatgttttaacaatcggttggagaaaggaaaacctgtttcaaaaaaaccccgccgctttttaaaaatttatttaaagggatgagttatccccgtgccccctgaaaggaccaagatccgggcgttgcctagttagagggaaaaattagctgggccttcccaaaggaatctgcccggacaggatggtttccgatacggcaaaataaaaccccgcgtctattgccactgttgtttacagcaaaacaagctccggggaatgccactcgctttcatcagatctcagatgattgactgtattttgccagtcttcccagtcactggaaaagttctaaaagtgattgttgaggagcacctgcacgttgcttcagtgtctcttgatacagatcagtgccagcggcgccagtaccccgccgcctttggtctgctcaattacacgtgcaagaagtcaaagagattcacagcattttagccaatatggcgccctcattcacagaaaccacgtcgacataccttgaggcgccatcaaaagcgccgccgaacctcgtcgcccccgagcctggtacgtctatctaatcacgctgtcatacgctcgtactaactattatcagaacactgtccaggtcccgaatccgaccaggcaggtcaaggcgatgcctgcgctggctgtcctaaccaatctatttgcgcttctgccccgaacggctgacccgtgacatccctctcataaccgcgcgccttgcctctgtccgacacaagatcctcgttttatcgggcaaaggtggcgttggaaagtccacattttcgtcgcttctcgcacacggtttcgcatccaatccagattccacagtgggaatcatggacacagatatttgtggacccagtatccctaagatgatgggcgtcgagtcagagacaattcacatcagtaacgctggttggagtcctgtctgggtatcgacaacttgggcgtcatgagcgtgcagttta

SEQ ID NO: 10756 - DNA, 1931 bp, Emericella nidulans
gctggtcattcagtgtttgctgcggggagataaggtgggagtgcaagttgactttgatgaccaagttctgtcctcatggcaggtggagcgtatctgctgccagctcgaacatctcatgggagtgctccgagccagtcccaacgtcaagatcggtgacctgagcttggtgagtcagaaagactatactcaaatcatgaactggaaccacaagcttcctgtcgtggaggagcgctgcgtacatgagatcatccgtggtcaggttttagcaacgcctgacgcaccggcgatctgctcctgggatggggatttcacctacgcggaagtggaccggctgtcgagtcgctttgctcgacatctggtgagcatgggtgtagggccagagacattggttccgcactgcttcagcaagtctgcctggacggtcattgccatgctggccattatcaaggccgggggtgcttgcgtggccctagatcctggacacccagtggatcgactgcaggcgatcatcaacgacgcggaggctgctttggtagtgactatgccagaacatagtcatttattcaacgggcttgttaacaaggttgttgctttaagtccacagtttttcgggtcggatgatgatctgcaatcttctgagactctacctccacgcgcaggacataagaacccagtcttcgtattatttacttctggaagtacaggaaagccgaaaggtatcgtcatcgagcacggcatgtttgcctccagtgccgccgctcacagcaaggcctttggcatcactgcccagtcgcgagtcttccaattcgctgcacacacattcgacgtcagtgtcggtgacattttcacctcgctgatgaagggtgcttgtatttgtatcccgtccgacctcgagcgcatgaacaatgtcgcctcagccattaaccgtatgaaggccaattacgccttcctaacaccaacggtggccaacttgcttcgccctgagcaggttcccacccttcgcacactgacgcttggtggagaggccccgacgagagagaatattcggacttgggcggatagtttgaacttgatactttgctacggacctgcagagtgttcagtttactgctcggcgaacccgccagcaacccagcagagcaaccccgctgtccttggacacgccatcggcggcctgatctggcttgttgacccagtcaatcatgataagctgactcctgtcggctgcgtgggtgaattagtcgttcaaggtgcaatagttgcccgcggatacctgaatgaaccggagaagacgcagtcagcattcattcaagatccagcctggatgcctcagacatttcccagggagtaccgacgcatttacaagaccggagacctagcgcgctttaatccagacgggtctctcagcttcgttgcgagaaaagacactcaggccaaggtccgaggtcagcgtgtggaattggcagagatcgaagtccacttgtccgaaagtccagagatccaacatgccatggttgctgtccctgcggcgggtccttataagagcagacttgtgtgcatcctgtctttacaggaacttgctcaacgcagcgatggcatctccagagatagcagcagggtcgcactgattcaagggagcagcgacagatctcacgctgctcagacagcttccgtggtagagaaccgactcgcagagaagcttccgccatatatgataccagctgtgtggattcccttaaagaagatgccgctgaacctttctgggaagattgatcggaagctgataaaagggtggctcgaggatgtggacgaagccacgtaccagtctgttgccgcgatggccgagcagaaggaaccagcttgcagcagcccacctcagacatagagaagaaggtgcaggccgctttcagcgcaacccttaacatccccgt

SEQ ID NO: 10757 - DNA, 707 bp, Emericella nidulans
tcaaggctggagtcagtggtacgaagattgttgtgccagtttaagggatcgtctacctggtccctctgcgtacaggagcacttttatgcagaatgcaatggacaaacttggtcgtcattagcttgcagctagtatctagaatacagtcaattcaatagctggattccgcacgaagaaataatcaacctatctcgttgtacagtagggcttctacaatttgcttattgagtcgatgaccggcgatatctactgtgtgcatagttagccttttgagatctccatcttggtgtgcagatatatcatcatggtctctctctctgttgtcaataaaacctccgatcatatagctttgggagatgtccgttccggcccatgctccactgagccttccctacgcgatgctactggtgctagtgatgctagtgatgctagtgatgctattgatatacggaattcatggtgtcgaaggccatgcatagatgggatagagacgcgacgaagcagttccatgcctggtactctatctgcaccgcgtctaccccaagaccctctaagatctacagcgccgtcgtaggtaaacaatggcctacgcactggcgttaaatacaatctcaataacagacatagcagtccccgcaggagtaaccatcggcttgaccgaatagcgcgaatccacccgcttgaccacgttgatccaatccttctca

SEQ ID NO: 10758 - DNA, 1681 bp, Emericella nidulans
gccggtgttccagagaacgtcccctaccattccaaggggtgtccttttgaatccactgacgggatataatcaaacagctccatctacgcgacaacaacattccgcctgtcccccacaatcctgcagcaggtccacgcgctctggcgctcctttaccagcatgcaaccccagtctagcgtgccggggctcgtctcctccctcacattccagaccctgcctcctgtaattcgctcctcgcgcaacagtctcggcttcccgccgaactcacatcccgaggaaaaccttgtccttgtgctcgtctcgaactactggcctggcggggcctactcaagagcactgcgtgacggtacgcgggcgctgttcgaggaaattgacgcgttggccaggagcgaagggctggacgagcggtttaggtatatgaattatgcggccgagtggcaggatgttgtttctggatatggcgaggaaagtgtagaagagctttggcgggtttcaaggaggtatgatccaaggggtatcttccaggagagggtgcctggggggtttaaattgcccaggtagattgacggttgggataatggctggagatggtaattacgggtcccttgaacgaaatgggtatggatggttgccgatgatcttttcgttatagaaaggatataaatttgtgagaaacgagactaaatcaccatgcccaagcccaagcccaagccaaatctaacgagccttgctgcttctcactaaagaaggccctggagacatacataccattgatagttgccgagcattcatcgcaagactttccatacctggaagatccacatcataccaaacctccatctactgacatatgcggcactagtcaacctagatgaccaaccgctcaattggacctgaaaggcctctttagaggcgtgagatcgctagcatcgttagtcatgctggtcgcaataacagggcgcgaaacaattgcaaggtccaagcgagcttgctgcaagtagacgtaggggccgtttttgtcctctgcgaggaggggcaggcgcagaacgttagggagggggcgttctttggcacgtcctttggcacacagataacgagctccgagcttccgcaattggggggtgtcctgcagaacaaagaccatgctagttatgtaggaggatgtggatatgaggttaaggggttattttgggaggtacgtcctcgttggcatccttcaactggcgctagtgggttgcggactggacgaggcggaagagttgctgggaaaagcgcctttaattgaggcgttgcgtgctgtgggagggcataaatatgaacgtgtaatcggaagctctgagaaggctacaatgtgaatggcaaaccaactagtagtttgcaaagatggcggaagggttagtggactgcgtgtagataatctggaattacggagttattgtgatgctgacgagagtcgacgggaatgtctgctaagtaattgacaaccagccacctatggtcccgactgctgctaggcacaaggaatggagaatatctgtgggttcatcccacaacttcaatacttctaaagagacaaactgcgtacaacaacgagtctgcgaggcgaatagggtttgcctgatgaatagagcagatctagcagcatttttctttgaccatcaacgctaggagtgctttttgt

SEQ ID NO: 10759 - DNA, 875 bp, Emericella nidulans
ggtctacctattacttatgcccaatatctaattcttgctgcaacctgttaccagctctaatgagagcgggtttgacaccaatggacttttatttggctctatacaaagagctgtgacagacgctgaccaagacggcgagacacaaacactacactgagacttaactaccgttgcataacgtaactgagctgacagatatacgtctggcagacgcttgcattagagaaaagctgcttgaccgaagcgcacgagccaacatgggcgcagatctaaaggtaaaggaaggatgagagaagccataatttaatcacagtatcgataaaacgatgcgagaagatgcaaccctttaagcacaaggccggaattcgcacaatgcaccttaaggcctaaccaaaacccagattgtgttgacagatggtgaatatgagacatgagtcttataataacaacgttttctgccacctcatgggtcgaaaaccgattaaaaggcgacaggccagaattaaaacccgagcgcttaattgatatgcgagcggttcctaccacttttttacacgaatgaaccccttttaaagttggggaaaaaaaaaaaaagggaaaaaaaaggggataaaatctggggtccaaaaccgggaaatacttaaattaagttaacaccctggggctttttttttaaaaaaaacgggaaattttgtaattagaaccacgttgtggcaaaattaatacccccctgtatggctttttatttgggacaaaaattgtttttaatcccggcatctttatcccaattaaaatttaaaatttcagataaaaaaaaatatatcaaatcttttattattctattatatttaatatatattttatatccatcctct

SEQ ID NO: 10760 - DNA, 1112 bp, Emericella nidulans
ccatctcctactcatttcttaataagaaaggctacaatagcatcttggaaggagaataccggcaatgcaacagagatactcgtcccatccagggcgaccatgagggtgaggaccgccaacgcgcagaagattagccggccggtggcagtgagtttgaacgcctggtagtcgggtgctgagtcgccatcgttagactggtcttcgacatcgcggacgccctcattctgtctgtctttctcctgcggattgtttttggatgagctggagtgcgatgctgtcggtgcctgaggctccgtgtttcgaaggccagaaagaaagtcttccctctcgtcagactcttcagggatggccattatggtgatttcggacgccattggtctgaccttgcttctttgagctagagcggtagtatgaggatgtaaaggcagattacagaggacgaatggagaacagtactgaactgagagtcggagtttgaagggaggaggacgacaagagaatacgtaggacgacgacaacggtttgtactatatcggaaaaacgggaaagatggtataaaaaacggatctaaatctgaaactggtggttccagcgcgagattagggatactgtacagatctgcactgtgaaacatacagcacaggtacaaagtacacgggacgggaacacacatctacccccgtctgtttcgatcggaacacgatgtagggcagagactctctgagatacgaccctggtggcaaacttggcctcactcgagcacaagcgcaaacacaagaatgggatcgaatgcagatacaggccacggacacgggccggaatgtacaaaagacacaaagcggccgctggtagccggcataagcaaccagtctcgtactagcagtccagcgcagcagctagtcaatcccaccacatccagaaccagggggcagagcaagaaacagggacaggatgtccgcgtcaactccaaccgtcaacggcaccaacgagccaatctccatcgccatcatcggcgccggcataatcggtaccgtgctcgcgctgggcctcacaagacgcaaagatgcctttcccctgccggtcaatgtaagagtctacgagcaatccgcaac

SEQ ID NO: 10761 - DNA, 212 bp, Emericella nidulans
gatccctacaactataattttgaaagttaaaacaatcatgcaatatgagctgctttcagtcaagatttacccaatctgtaacttacgtttggcgaccattgttaaggcaactcgagagtgtaacattccgtgccctggacatatgtcactgtgggtaatctcatgcgataagacaatcagttatgtagttcgtctagttcggcactttggtt

SEQ ID NO: 10762 - DNA, 493 bp, Emericella nidulans
ggccgtcccatctttcgtctaacagtaatcaattgcaaccagttgcacctcgctactcgctccctttcgaccagtttggacgtccaaaaatgaggtcgttcacgctatccacagtcttcgcgactgccgccctcctcgccagtagctcaccggctgccgctcaggaacaaacatatattggctgcttctccagctcgaagcccctggaggaccagggtagctacacctaccagagtaacggatactgcatgaacctctgttatggaaagaacaaggccgtctttggtttgtacaatgcaaaccactgtctctgtggcgatgagatcccgccaaatcgagcaaggaagatgatgattcatgcaacaagccatgtgctgcctggcctatcgtcatgtgtaagaccttctctgactacagtgatcaacaacagcagctaatttgtctcaggtggtggatcggatgcatactcggtttatctcacggctataaggac

SEQ ID NO: 10763 - DNA, 1162 bp, Emericella nidulans
agctggctagtcgggacggcctgcagcttcgaagacagctgcaagctgctctgaaagactgtcaaacatatacagcggagaacagagagctaaaagcacaaattgagaatcaccaaagggaggctggagccttggctgtccaacatgcagcccttaaggaccttctgggtgagcgcggttacacggatagtagacgctcccctcgaggggagtctcccggttcccggtttggcaccccagagcagaaccgactaagagaactggagcaacagctctcagctagcttgaaagctcacgatgagttgaaagcttcattcgagacaagagagcaagaaaccgaccgcgcctacaaggagaagctggaacagctcgaaaatgactaccaatccgccgttcactacgtcaagggaaccgagaagatgctgaagcggatgaaggatgagcttactcggtacaaaatgcaaaacgcgaagatccagtctgaacttgaagcggcccagagtcgagagggttcagtggcgccatctggatgggaagctgaacgctcccagcttcagcaatcactcaccgatcttcaacaagacacatcgcgttccattaccaacctggaggagcagatcacgagtctgaaggaaagcctagcttctgccgaggcagagaaggagaagtctgtcgctgaatacgagacaatgcggcaggaactcctcgctgtttctgagaagactagctctgaactggagcaacttaagcatgagaactcgctgcttgaagctcgtgcgatggatgccgagcagaaggtttctatgctcctggaccaggttgaggcttcagttgggcactaccggcgacagtcgcagcacggtcaaggtgtcaacggaatatcccgaactcacagcaacgcctctagcggtaccattggagctgggactcgacggtccagggccaacagtgcagtgtcacaggatgacacttttctcgataaccgtggctccatggccctcgactcgctagcaaatgaattggaagcctacgttcgcactgggagagtactaacagcaactaccgactgagtactcagtcggacttcgatcgcactccaacaaaggactccggacttagcgacagttagcagaatggagacgacgattggacgaagaagaag

SEQ ID NO: 10764 - DNA, 364 bp, Emericella nidulans
cagggggcgttttgcatcgcatgacttaatatatctctttcaggaacgtactaaaacgctaggtttcttacctgacggtatagactgtctaccatgcagtatatacattatagtatcaagcgctctatttttggatgtcactgatgatgcaagacactctagcatgccatcatggggcacgattaggatgggaccctgtgatatacagcccacgctggggtgcttatatgactgacggctctatatatggtcagctcgacgctaaccatcttatgcatatcccacaggcatgattagaacgcatgctgtgaacgattgacagttcattgttaatttgaattcttacccactgctacatgttcct

SEQ ID NO: 10765 - DNA, 342 bp, Emericella nidulans
tgatagccgcggctgcaggtatgccgcttttctaatcgatacctgacagtctgctcggcaagagcgaaatgtggacacttatcaccggagtgctgtctcagatagtcttcgagtagtgtgcggtactatgacctgagctcatcatgagaagttccaattgagggacgccttgccatacgcatattcatacgtttgtggtaagctcgggatccgtctcaacctgatttacgccaatacgctcatatatgtgcgtacatgcatccgacgggaattcttgactcgagatctcgcagccgaggtaacgccgaattgcagcacgagttatgccagtgcctttgctgg

SEQ ID NO: 10766 - DNA, 1104 bp, Emericella nidulans
gtcagggaacgaaaggcatcgaaattgaacagcgcccattgcacttgactgtctggttccagcccgggaaagcgaaactgtgtgggtcagtctccgctctgggcgtttaagcccagtagcccaccattacgtcgatattgatagatggtcgaactaacgtccgcaactacaagacatctaggggcagccgaaaccgaataatttttacccgtgcacgagtcagtgtcaagcagtgtaccccgttgccatgctgcatcaaaccccttgagaacatgccaatttggcagcctggcctctatgataagttcaggctctcgtgcaatggacctgaacaagacttttctaagaaggacctaaccacagcgtgatcaatgagcgattatgatattccttcgcctggcggctggaaataacatgtagtacttgtaatagtccttactagagttcatcggaatagccggtccttgctgacaggataagcatttgccctcggcgatcgactcggataaaccgactccaccggcaattccttacggaaatccctactcatacgctacagatctgcagtatggagtcgaatacactgaaccccatccccagacgtggagaggtggggtttaggtgatggtccagtttaagaactaccagattcaatttcccaaatgatttttcgtctttcaacccttgcaccatggccgagccaaagccctcgacgagctatatcgagtctgttggtgacgagaaagccatatcttatgacccaaaagagactgaagaatacgatccaaatgatcctcaggtatgtgattctatattagctattggcgcgggcaaatggcggatacaagtataggagtcacgctgaccgaagcagaattggtcgacggtctctagattgacgacgtacctcaccatctgcttctataccttcctcgccaatgtcaatagcagtaacttcacagtggctacaaaggccattgttcaggaattcggcgtctcccagacccaagccggcgagttggtgtgcttcaacgtcttcctgtttggtcagggaatatctctgggtccattgatgcgagtggtgtggaagcggcagtatactga

SEQ ID NO: 10767 - DNA, 888 bp, Emericella nidulans
  unsure (1)..(888): unsure at all n locations
tacccaagagtccgttcagctctcagtttagctctggtaatccaacccacgcccggcaggccaagccacttcaccgattcaccggtcgcaagaccggctaaagatagaactattggcggtctcatggggtatggtaccggcgaactttcaacgaccggcgctccaaccaaagaccctttgtactgtacattgctacagagccatgctccaccaggctatcgcttggaaggagcactgcacggaccagctgactaggcattcctcgatggcgtcctcgaatcatcaacgcacagaccacgagtctgctgaatgtcaggaattgtgcgggcaaggacgtagaatcgccggcggatcctagactaagcccgacattgccactgcgttgagtgtcagactcttattcgcaaaggcgaataggacgggcttactatgcttagaccgcttcgaggaagatgggaacactggaaacctctgtttcttgccacagatatttgagggctggcgtccaagctaacggtgaaattggacctggtttgcaggttataaagcttttggattccggcgcaaatgaaaaaagctagggaaggtaccctaggagatactagttgtttccattggtcaagatttcccttgccgtttggccacttagctttgggaaaaataccaaagaattctccaatttttaaagctaccggtnttgagaggtaacccatttttttttaaggggtctatttgccgggttttaagccttgtaaagggaaacttgttgcgacctttttttagaaggggtctattttggccccccccccttttattttttcaagagatattaacccaggtggtttcctttcctnncttatattttatatttattgttcatttgattta

SEQ ID NO: 10768 - DNA, 1078 bp, Emericella nidulans
ccaggccaaaacgactaagtcctcgcgtgctgcgtcgtcctaggcatggctgtaaaatccgtctcagtttagtttgcgagctctacttcttcggcacctcgggacttgtcaggtcttcaatgaacgagcagtcgtgcttcgttactagttcctgaatagccgcactcaccacgcgacgcggagccggaacgctgtcagtcttgtcgctgactcggagacttcaaaaagatcagccatggggtcttctaatggcaaggcagtggagtcgagtgacagggtcgtagtgacccccggaaggtcaaaaccaaggagcacaagtcgagtgcgatggactgtcgggctgttagttcggtaagagtattgcgcctgcttttgttgttatacgccgttgacccttgattttattataggctcaccatttggtactttctcttgacgccgttcttccgctgcccgtccaacgtagccgaattgacggactcttcgccccgtatttgcaagccatacttggtagccaggtcttatgtcgagcctcacgttattcctcactacaacgcccacgcggcgccttatgttgacgcggcgcgcccctatatccgtataatcaacgagaaagtttacaccccggcatcgaacattgcaaaacagggttacgaaacttatggtgccccagcgctggatcgggctcaggcttatggccagcagcaatgggacgcgaatattgtccctcatgtccaggttgcaaagggtaaggcaactgattggtatgaagctcaagtggcgccgcatgtggatcatgtcgtggcaattctgtctccgtactacaataaagttcaccgagcgtactggacagccgtggacgggtactttttaccgtttgccgcaaagtatcagccttacattggaaagacctacacgtcgggccaggagatcttgacgacgactattttgcctcacgctcacaatgcgtggtatttaacggttcatttcgtcaatcactcactatggcacaggatttacagcctgtactcggagaatgtggagcctcagcttgtagaatggccagagaatcgcgagt

SEQ ID NO: 10769 - DNA, 1356 bp, Emericella nidulans
ttcatctcactccaggtacttgtcactcgcgcttgctcttcagagataattatggtgtgtcacaaggagctattttgccttggctaataacctctggctgacctcactgttagtctctttgtcaagtttatcctgcgcccggtgtggaacagggcggtcaaagcaagatagagtattataccggaaagccacaattcccaataatatctgctaactttatcaagtattatcgcggtccatggtcttgattttgtggatgcagctggacgatgctcggtttcttcgtggccgaaccgtcaaacaggctgggagaagtctggtcaaatgccttctttcagcaacaaggcttgatggtgcggttattttcgtacgagtatgactcagttgacactttcagcactggtttcgggcgcgtctctggggaggcggatggcctattgaaccacatcagcactgtccggccaaaggctgtgagtgatgtttgagcttcctcaactgacgccacaactgacagctacaggatcggcacatgctgattatatttctgggtcaaggtctgggaggtattctggttaaacaggtacatcaaacggaaaggaaagtcatgatgataattattgacccacgcaggccttggtgaacgcgtctcaaaatggtcattatgctgaaatcaaatctgccacgtgagtccttgatggtcagcgaatgtagtaaatcgctaagtgtgtcaagaatgggccttcttttcttcgcgacacctcacaactgcagcataaaaaacccccaagtttaattgaaacaggaatctagcaggcagccgagagacaaaagttcacctaggctcaaatcatgaaagcttgtgttgtttcgctatcggttcagataactacaggaaagtcacaaggaatttgtaacaactatgtgtacgatagacttggttgggtaggaacttagactcccaaatatcaaggtatgtcaatctaagtctcaaccgcccactaaatagccatgaggtcaaacaaaatcacgggttcaacatgttaccgctttaaagttgtccaatttcttcccttactgccgtccttgcgatatttatgttcgtttttatccttgtttcctatgtagtctgtatctgcctgtttcattttaggttcacgctgcctcctccgtacaaggaaggtgacgtttgtagggcgaacgttacgagggtcaggatgaatggttagccagagaatatttgtgcccttaaccagatcactcactgaggttggcccctcgctggggagaatttcactctgcctgggccagtcaaggcttagggtgggctcttttgaagaggactctggatgatgatat

SEQ ID NO: 10770 - DNA, 440 bp, Emericella nidulans
ccaacctccagcaaacgtgggcctctacctcctatcatatgcagaggatccgcgataatgctgcctgcgcggatcaagaatacgccaatattctcgacgacaccgaccctggtctctcttggaacccaaccttcgaccccaaagaccgcgccctccccttcctcaccagcctcacctccatgtcccccttcgccaacaagccgcgcgtcgcgattctccgcgaacaaggtgttaacagccaagccgagatggccttcgcctttaacaccgctggcttcgccgccattgacgtccacatgacagacatcatctccggtcgcgtctccctctccagcttcgttggtctcgccgcctgcggtggtttctcctacggagacgtcctcggcgccggccaaggttgggccaaatcagtgctcctccacgataacacccgcgccgag

SEQ ID NO: 10771 - DNA, 2691 bp, Emericella nidulans
gtccgagtcaatgtacaagggcagctggccctcaatacttgctgtaaggtatgatgcggggtggtgtcatatctaatactatctcgcatagccaagttgaacccgcaagtgactacctcgtcctcaccaaggccagtttgtactggtggctgtgacaaaattgacaacaatcgaaacttcgccataagcggcgtcccagtcaaaatcaatagacctgttttcttctccaaaagcgcgcaccagccgctcggtttcttctgcgttggcatggattacggggcgcgcttcatccctggcatttagcgacggcaccttgaccccagatagtgtcaatgatagggtctaagaaggtgccaatatgtcggaaagtaagcgagatcctttgacctccgtaagcgcgctcctccaccgatttctcggactcttgccgcttatcggccttaatgccatgaacccaggctgcatttgtcctttcgcccaatacgaagagagactcgtggggcatcggtattcgttgtgtgactctagctgtgccttcctcgttcgtcgagcccttctgccggagtatcatgactcgttgggcgccaaggctgacattgcagatagaagaaccacggacaatgtcgagggtcttatctgaatgctcagagattcggtcttgcccgtcacgatagagttggatgaggacatgattcagagggtgtcctagaatacgttccacaaggacacgtacctggtcgacagtaggggaaaatggttcaagtggaggtgattcgtctgcaggatgacggtagatcggtatggaaccatccgacgagcgcttcccttgaacagcaacgagacggggtacctgtccggacatgtggtacatcttctgccaagccacttcgtcacggatgcgttcaaaagcattctctggcaaatcaagttcatagacaatccgggaatcaccctctccgataacatcccctgggcgacagacgttcgttgctggcttcaatctcctgactcggtgacgttcagttcgagaggagcgagactcgctttggtcgggtcgctttcggcgggtgtttctcgccgaattatctactgactctggtccatgagattgtccgtctcgctcaacgcgataagagcggacctgcccacgactcagttctgccagttcccggagatggccatgctcgtcatcagacatttcagccaagatatcttctagcctccgcgtctcaaaggaggctcagggctatcttctttggtgtttgtggtgttgagctttacgtccagatcctccagatcaccttcaatgccagccgggggtaaaggccgtgccaggcggggcgcactgcgtgcgatctgatcggtctcttcgcggtccagctgttctaggagctcctgagaggtaatgccgtttgctccaagaacatcggccatgcgtcgcatagtctcctcgtggcgagaaaaactccggtaacctagacagtcctcgattaagaaaagcgagaacccgtgacggacggcgtcaagcgcagtcgcgtagaccgaggcgttggagagggaacgcagagatagatttcggtcacaaaacgagtgcgcagggaaagaacaagcgccggagacaaagcagaatactctgatttctctattaggatatcggactcggaatcgatagccgcgagtagcggggcggggaattgggctccagcgctttgaggaagacagcactgaggagtttcggtcgaaagaaaggcctcttcatgaagagggcctttcagctcaaagtctgctgttcgttttttgaccgagtcctcggcgcggcttataactaccagatcttggccgtcagcgttgagcagcggttggcgtgactcatgatacgagcggccccagacaacatagcccgtgcgacggaatgcattggcaagtggtggaataatctcgataatatctgccgtattcggcacatgaagagctccatttggacgaacaaagtcgttttggaagtcgagaaggaggagtgcttgtcgggttggcagattcccgagggcggaaagaaaattcatcttagctgcacatggccagaggaagacacacacagagggaaatacgaataaagaatatactggtgagctagcccaagcggctcgagttgaggtggattagctgtcggaaaaagattgcgaggggagacaggcgaagctgcaaaatagtgaactcccaagacaaccgccagtagaacattctgtgagacgcaagctaatcgcgacacatacctgaaacgtacacttgaaggcgtacttttgacgccctgatcatgatatgcagagtaatacgcagtcccagagtactttatcgaatcgacaccttgaatctcaggcactagccacaggcattaaaagcacgcatcaggcatccacaacgcggggtgccgctagtcggagctcctacggagcgtccgctagcaacttgcttgtattagcacagggtgtctaaactttaaaacacacagaatgcggagcggccatggagagaaacatgcgaggttaatcctcactcgataaagaacatcgaggtccctggatctggtcctggcctgtgaataatgatgctccggcctcgtaggatgtggacgatgactccgaaaaggcggaccgacatcgggacgatcctaagctgggtctccatagtagt

SEQ ID NO: 10772 - DNA, 2207 bp, Emericella nidulans
cgtgtagtctgtatgagctaatggatgtaggcgcgaggatcctcgtaacaaactcggatcaaatgtgcgagaatatcattgtgggcggcctcttcgtgcaaataatcttcttcggtttctttgttacctgctcgttcatattccagcgtcgaatcagcagcaacgccaatgcgctcgggaacgccagcacaacaccatggctaaagcacttgtatgcgctatacggctccagcatcctgattttgattcggtccatcttccgcgtggtagagtatctccaagggtgggatggctatctgttgcggaatgaagcattcatatacgtgttcgatgcactgctgatgtggttggtgctagtgatcttcgtggtcatccacccgagcgaggtgaattgtcttctgggccgggggcgtgttatgataaccaaaggaggattgagtatcagcgaggttgcggtgtaaacgagcgtacagaccgtctagagtagatcaagacttctaattttcgttgaacggtcacttgttggctttatgggtgattgtcatctccccgtcccataatactgctccccaaatacctcttccatgcagccgtggatcaacggcctccagttgtcgtcaagggtgaaccaaacctcacgtaagactcgcgtgccccaatcggcgccaaaccacacatcgtgaagcctaaataatatcgcgcagaaatgcccaagaatcgttagagccagcggtcgacggtcccgtagtcgttctaagaatgccggtagcagtttaatcacccaccgacacgccagcgcgaatcccagccctgactgaatgccagccataaggtctgctaagtgttcaattgctgcctggtaaaggctcgagtcatgggaggatcggatcctgccgtgtgcaagcttcgttagctttgtgcagccgctctacaactgcttgggcctgtactgaaagaacaggatcatagtcgttcacgtgctgtaatggcgcccaagtacggtcttcaagaatagtgttcatcgactggttcaggatgtcctgcaccccacgagtaagcacaaacgcttgaactaggtcgccaaccgcagaactacccggctcaggagtgcgcgggaacccgaaggcatacaagacggtaatactggcaaaagcgaacatagccttgccattgctggtgttaatgtcggcgagttgttcgcggaaaagcgcgagcgcctggtcttgatgcgagatggcaacatggaggtagtcgctcttggcgtcacctggagctctcattgttcgggtgcatgcgatatgcaaagccgacagagcgaggatgccatgcatgaggaatggataagaaagggcttgttcagggacatgtttgcgccagatctcctcggtctgttgacctcgagtaaatatgcaataagtctcatttatccactgcagcattaattcgaggtcgcagatattcagcgcaggtaaggcggaatcgtaggaatttgtgctgttgctgcgaagctggcgcagcaggctaaagtcaggcgatggcggtgctgtttgtcggtcggaaagggaacgcggcgaacgcgatggctcgtccgtcatccatggaaaagggcttggggagtcatattcgcagtctgtctggcgcctagcgcagttggcgcagacggggtcgtgattcgtcgcactgaatcagaataagtacgatggaaaagaaccaaaggagtgtaatggagagggacaggagggactagggatggagcggggaagggtccgatcaggcgggattgtaccttgactcgtcgacgcttgcattccaggcagccatggcgagatttctggtgagaccttcgttgagccatgagaggctgttgcaggctcacgaagcttcaggagctggactagccgatgcctattttattttcttgctcatagatcagagctttgccaaggatcgggttagtgggagttaatatagccgaggctggggaccagactaggctgcatcatttcttagcgaactactcatctcatgcgaagcaccggcgcaacatagttcatttctagagattaaaagcattgatagaaccaccataagggtacagccaatgcaggaatagaaacaaaggaaaatcgtagacgttaaaaaaattctttcagcctccgccgccgccgccgcctcctcccccagccgtgccccggctgcacgagttt

SEQ ID NO: 10773 - DNA, 545 bp, Emericella nidulans
tccacggtacttgcttggcaccacccctctctatacttgcttgggaaggaatggtacatgagatgggaaggtcgactggctcgccacgaactcaagccaatcgagcaccaacaaagcaaccgccgacgataagtaagcatcgatggaagaaagaagaacaagcgaggcaagcagcaaaccaaacagagggcgcgaactactgcaatcagcgttgtgtgagtcacacacgcaggcggactgactagagacaagcaagcgacgatcactctcattttagttatatgcatactgactcgccgtactacatgaatatgtgactgactgccgaacgcatgtccgcttcatgaccgcacccaagaatgaggaacaaacgaactgttctttttatatcacgccactcatctatgggcctcctatctagaatgcattccgatatacctgaccagccagggagctagtctttcatgtatgtgctcgctccgtgcttcgacgcgaaacatatacatactatcatgtaactaacttacaactatcggttaggtcgg

SEQ ID NO: 10774 - DNA, 1924 bp, Emericella nidulans
gtccttcctgattgactgccaacactcctaacttcgtgccctcacatctctatattgtccgtccctttcacctcgacctgaaagagctcgccatgcaggtccttgacatagtaacactgcggccagaaatcagcatcagctatttaggcatgcagagcaaatgctatgagatccttgaaggcaagggcaatgagtacgatctggccgaaacagacgacattcacagtgagggctttgtcccaggtgccgagaattgggccgggtccgacacgaacgaggaagggtctgatgaagacgacgaaggagcgacgatggattcgcaatccgacttatcctcggaggatcatagatcgctggatgatgatgatgcttccgactatgattatggtcgaccgcgcgtgtcttttggcttgcgtgagattctgttctatgatgacaaaattgctatcttcaaagcccggcatggcgttctatgatcccggttttctgaatctatgtgcgcgaagcgagtgttgatatttgtctttcttgttggctgcaagataccacggagcgacctcccagcagtattgactggaacttgtgtatttacatcaatttgagcattattaagatagccactcacaactgtcccacttccaacctatttattgtagtaggagaccccttaattgtagcacggtatactgtacagatatcacgtgacctggcggtcagtaagcttttgctccgcaaccaagatgaaatgaacgacatgaaatcaacttgaagccaatcagccaccaagcaccgttgacggccgaattctaactcgcttcagaccggttctccccagaaacacgtcgaatctctccttttttgcgcgaagtcgcaatctttcaacaccatgaagctcgttcggtgcgtaaaatcccgtcgcagctccacgtcgaagctctgcttcattgctgcaagaacactactaacacgtcgaaaccaggttcttaatgaagtgcgccaatgagacggtaaccatcgagctgaagaatggtttgtcttctttcattctaattttacctctgcccatattaccgctaacattctcatccaggcacaatcctccacggaactatcacctccgtcagcccgcaaatgaacacctccctgcgaaccgtcaagatgacacccaagggtcgggacccaatttcgctggacacgatcaacatccgtggctccacgatccgctactatatcctgccggacagtctgccgcttgacactctgctcatcgacgacacgcccaagccgaagaacaaggcgcgtaaggaggccgatcgtggccggggtggtggtcgcggtggacccagagggcgtggcaggggccggggacggggccggggtcgtggtttctaagctatagtattgcgaggctatgctatgctatgatacaggagcatttcgtatttgggatcggatctctggatgcggagttattctttttttttttttttttttgttttgcttgatgccgtcgttgtcctggagctcggataaataactgatcgcggattcttgactgtcgggaaaagggactggggttgtttattaccttatttaccggtcagttaagagaggacggaaagagtggttcattctgtgcgggacatcgttactctagtagggatgagtgatgacaccaaggccgatacgaccatgtcttgcgactagaggaagcagcagtgtcctatatccggcgaactgggatatagagacgttgatttgtgcacggtgaacaaccatagactccctccacttttagagagtcggaaatcacaaatgatgaaaatacagggtctatctatatctataatctatctatcataacgtcgtcatcatcgtatactcttttgagcattattccttccaaatccttacaataaccaac

SEQ ID NO: 10775 - DNA, 1130 bp, Emericella nidulans
tacactctcgaggtattttcacattttcttgaaggtagtcttgctgactctagatctggaggatctaaaagctgcgccagcgaatcgtcatatgctttattcaaatcgtcgtcactggggaaatcgaggtgcactttgtttccggggcgcacgaagtaattcgtaggaataggtattccgccatttgcagtattttgctcttcggatacggacagtttgctatacatgaatgtggttatgttgataaagttcacgtgtgcgagtatgcagaggacatattggatactctgctccgcgtcagtcgaattggattgaggagagctttgaagacggaaacctactgctgcaaaaataatccaaggatcgaggaataacatggatgccaggagccgaatggcataaatagcaaccagcggaaggattgcaagggaaaagcgacgttcgtcaaaccattcacggaagtctgtgggattattgctgagaatgtgaaatgtaggccttgtcgtcttgaaaccaaccacaataatggcaataagtatgtatgctgcgagaagtatccaccccactgtgataacagtacgaataatacgtagcctgttagtatgcggctgataggtcaaaccacagagcacagataccatcaggagaaaggtgtacagcgtcaagaggcctgtctctgtggccgaactatgccggccgataatagaatctgaggcgaaatagtggttgatgaagaagaatatgagaaatgtgttgccctaaccctatattagcccgggctcgagtctgcagggatgatgacaagaacttacaatcgcaaaccaggaaacgacgagatttaggcatgaatatataagcagagcagcaaatttcagtttccggagccccccttctatgttctgcatggtactccacgaatccatcatgaaaactattcggtcctgcatataatgctgaaggtcgacaatgtatgcgtctatcgaaggaggggcttgaacatgggccctagccttgcgcacataatcaagacgatctcgattccaacggcgagagagaatatcgaacgcccagagccggcggtccgatatgtgactacccatgtaatggacttcggctcgtctcgaacagac

SEQ ID NO: 10776 - DNA, 580 bp, Emericella nidulans
  unsure (1)..(580): unsure at all n locations
ttaccactaagagccgccaaagcttgattttcctcgcccagcttgaacaccacctctaccgccagacttccacggtcaccgaaatccttgcttctttgaccaccgagctggtttactttgaggagttccaacagctgattcggtctaacagtaccttcttgtctgccagtgcatctgctgctcgtctgcattacttcctggtggcgaataaacgccagcacgtcgctgccgagataactaatgaattcattacctaccttttggccaacgagggcaagcgggttggattcaagtctacagaggaagttaaagtgttcgtcatgatggttttgagctacttcagcactcgtcactctaaggacattgttcgctcgatcggaattgccagcaacagccatgttcgcgaactcattaagttgaacaagttcgaagaggcatgtgagcttgctcttgcttccttcaagtatattgccgctcaatcgagttaccgccacccagccattgctcgcttcgtcctggcgctcagtataaacgtgtcggntcgcgggcttcacctcaacgagcaacccgcaggcgaatg

SEQ ID NO: 10777 - DNA, 1221 bp, Emericella nidulans
gctgatactccccatcacataagcgcatcctgaaggctagctaaagggccggcgctttaaccagttcccattcgcgagaacggtgtaggctttgcagtccttatgaggtagtctctgcgagattcgttgggcattcttcccgtcccactcggttccatgttcatctcctgctcttgatgcctttcatcgatacgctgctgaatctctttgagatcatttgcaagggccgtattacgttcttccaattttgcgagatcattttggagacgcacccgggctgatgtcccaatcggctgagccaggcgttggtgtaatctcagaatctgcgattcaagtttcctgagacggccagaataagcacatgctaggaacaagacagatgtgagaattactctttttcttggttcgtcttgtctagtctcttattatcgcgctcatcggcttgctccataagaagtctatcagcctgcaggcattgtcagcaatacacccatcaggggaataagagaaatacctgacgcgttatatctctctctagagcatcttgatcgcggatatcggcgtgaagctctttcaaacgggtcgcttcgtctgccggacccgagctagactgcacagatgtcgactcatccgcaggcggagatgtttttgaagcctcgagcccaacgccctgcatcttgttctccgaagcgggtgtaccaagggagtcatcttgctcaacttttacattttgattcatgatcgacggtcgtattcatgtgtgatcgccagtccagtactggatataccaggtgacgaggtgaatagacgggtaatatttgggctacaaaagggtggtgacaaggggagttaaaagtctcaaagaatgagtattgggtgtttaagggtacgggcagtgtatcaccgcagtataagcacttcacagtctgccgcttgcagtaaattttgggggatcattctgccaagatagcctgctatgactcttgaactgaaaactttcgatgttctttctctattcgaatcgtcaccgttaggtgaccatccagaccgctggactgtagcctggtgcccgacgccttccgcgtctggtagaatcgttttagtccatgctccacgcgtccaccagcctcccacgtcacagtccacacccacacatctgttctccgaggggcagcaagttgcggccaagggtgtatacccacgatagtcgatgaggttctc

SEQ ID NO: 10778 - DNA, 461 bp, Emericella nidulans
  unsure (1)..(461): unsure at all n locations
agtaaaatatcttaatctataataattctaaaataattaacaagatttctagttctctgctactgctataatctctactaaaacttaataaattttacttaagagtaacataaaaaatatactagagttagtactagaaaataagatttatatatatatatatatatatcagtgggggataatttaaaaccctttagatttaatctcctgctactaagatttaggttaatttatataaaagagagaaaattatattctaaggattaatacataagtattgttttgtgaatagataggaggaatgaatactcacaactaagatttattaactaggaaagacaaaccgatatctagtaaatcttatattattaaattatatagacttagcccatctcnngntgatngntatattcttnatatatatctagtatttatagtctagaaaaaaattattagagaag

SEQ ID NO: 10779 - DNA, 457 bp, Emericella nidulans
aagaagataaagatgaaaatggcgacgagctaatgctatccacaccacgagcacaggtgcagagagaaaagcaggaacaaagagagataatccagatacccaatgaagacgatgaagaaacgacacccacgcagaaccagatcgttcaacgtacagaggcacaaatgaatgggaacgagaacagggcgccctcgccaacgcagatggttcttagcagccctacgtacaagtcgactgcacaggcaggccaatttgatgatgatcggccacttgcgcgcgaggcaactgcggcgacgtcgccctcttcatcggtgagaggccaggggcgtggtgatggcgatgcggtggatggattgctcaagttgatggggaccccaacacggagcacgggcaagggcatgggcagaccgcgggtgcgagcgtatgagtacatgtaatctagctgtgagcgttggga

SEQ ID NO: 10780 - DNA, 2154 bp, Emericella nidulans
atctttcttctatccctacaatcgggacagcgccaacggtatggctgaccttgaaacgctagctgcgttgatgacagatattcaaagcaacgctgctactgagccagattacgtcttgcctaaagcccagtcgcctgcacggttttatgacccgttattaccaaacgcagtgcttgatactgaattggccggttcccctgccgcaggtccaggttcttcagaatgggaattcgtaaatactgctcatagtactcatcacgattcgtcactggaccccatattgtccacttttcaagccgaagtctccgattcgatctccgacaacaatcctaacacagtgcaagcagcacccatacaaagaccgtcagaccgtcgcgtgctgtgtcatgcgtgtggtcaagtatggagatctggtctgccgcctcgattagattgtccgtactgttattcagattttacagagatagtccgtaacttcgacccttagcccgtactttatgctgattagcccagatcatcaccccccaggaggaggaatctccagaactcaacgagcttgaaaacatcaatactctcgcagaccatgctcagtccatgtctcttggggctgcgggcgttgaccctgggtccgcaccagacgcaaccggcgctcgtaatagtaacaatattcccactacgaccgacgatgatctatttacacgtgctgtctctaaatatcgagatgcatttttagagcagcactctcaccttgcggaggatgaaaggcttcggttatgggcccagcaactccctcaatttattgatggaacctccaatgttccaaatttgatcccgtatgtacagacaggtcgttgtcatttctatgaccacgaatgctctgctgacaatacttgaagaactctatctggcagaaagcgtcgaggttctggcttctctgagccaccagccgagcgcattgagatggaggacactctgggatttcagagtgcccctaccatccaatttattgatgaagctaatactgaacgcacaggaacaatgaacagggtagctcgcgagacctacgtcactaacctggatgctgaaaccgccgactgtgctaacactgtggccagtcccggttgcgagcatagggatgaaatactcaaacgttaacgttgcgaagccggcgccgtcgaggaccccaataaatggccacgttcctcagcatactagtgattggtaacttctcacattgttcattgtttaatagaaggctcgtgtcaagcggtattcttaggatatcgaagactgtgcatagctagaatacacggttagaacatgcatcaagccaacaccgagaaaatgcactactacacccccgagagccataggttgggccgataccagggaaccatatatacgaactcgttaagatctttgagaggctttgtgcactctcttctctcccgggcaaccaggtccacgcagttgacatagtacctggttccagcatagtatatccgaaagaatttttcgccgggcgtatctaaggtggatatttccggctcgtcgcaacctcaatttcgcgcgcagggactgcaagtatgttattgaactatcatgggagtggtaaaggagtagggttaagtgtttggcagtgacggcttgccccagcttcctatagctttacttctcccttcctcacaaacagattcttggaatcaaagatacgcctgttcataacaaattgtcccgctagatccttacgacggcgtttgtcgcactatcttcctgcttcataatatccaacgccgcattcaatccctccaacccaccttagcgaccttcaccttgggactagaagccaccgtcctcttctcaaggccagacttcagccaccgctgaaacacctctctgaaataccctgcttgagctgttagctccatcagcagcattacaaacttgacctcgacggccgccaaaacgggcacggggagcagaggcggacggtgtctgatgcgagcaggtccaccccaactgtctccctcagtacatccagtacaggctgaagggagtttctcgcaagaatttgcgcgtctgccaatatcacctcatcttctctagccgcggccacgatttgagatgcgacatccgcgtctctttaagcgaatg

SEQ ID NO: 10781 - DNA, 1752 bp, Emericella nidulans
cagggcatgaagatctgcaacaacaagggcgagaagtgctcatggatttccaacctcgctaccgccatggagaacgcctacagcaaggccgaggagggtgttgacggcattggtggcaaccaggctcctggcgccgtccgtctcgttgtcgacattgactacactcacagttcatagaccatccgccttgcctttccttgctctccgttcgtgtcgggtactccacatcgaaacttttttttctataagatcctgctagcttagagcaagctctctgagcagtgatccctttgtcttctttgtgtaaatagaatataccactgctgcatttctagtcaatatttatgtgatgatctactcccactcgtaatctctcctgtaaaatctctcattctctgaattctgcgaggtcccatagaattaactgagaaatcggctacattaatttcatttgtcattcacctcatttgttctctcaactatcaccctttatctgtctagtctagagctgttattcgaaccttaccatattcagatgtactatagccgttattttctagccgagctttccataatatagcgccgaggttcatattcctacaatacgtatctaaaaaatattctaacagggccacttttgtgctgtacttcttctcgtcagctcagctcagattccctgtttcaggtacatgacacagaagccgtattttgtacatattgctgaccgtcagcctcagccacagtcgcgaagtcactgagatggaatgcctatttatagcatcatttgtaagcaaggacttactgtatgtgcaaacaaaatctaggtaacaccggctcctccgattgcaatacttgtagcctataatttcttcatggatatgtacattatgccagacttggtacatatattccctttcatcaatcttttccaggtcttaaatggcgtcgatctcacttagccagccggcccgagaaacttcagcagctaggggtagaatgataggggcgggacgtggctgtttcatcctcaaacctacgttgcatacggggtataagggtcaaaggctagaaaatcaaggaaaggttactggacaggagagtgagaggtttttggtacctcggaatgcagaggtccagcccgctgatctgacgggctggccggggccagagtcggctagatagagactctagggagcagatcagcgacgcggcgcttacttgagacgggaagaagtggctagcttgagcctcaaagtcatggcaatatatcgagactaagtaaagacgaataatcgtatctaccgtagtcgaggatcaaatgacctcgttcttcagagtaggcagtccaagaccaagattgagtggcggaagtggtttgtctttagtgtataaacttaagggctggtgtaggatgactctcgctgtgccagtgctccatcaatggttccaacgaggcgacaagggacccttatcaccagaaaagggtctggattcggttgcagctcacgacatgccgttgagaacgactgtttgttgcgctaaatcctaccagctaacgaaaatcgggatgccctagcattttttacaaacctgaggtaacgccaataataatacattctccagcaaagcgatatgcgcatagctgtgtttcttaaatcccaagaaagtcattggcgctgatagattttggtaactccacctgatactcttcgggctcctccttctcctcctcttgcggcgctgaaaatacgc

SEQ ID NO: 10782 - DNA, 1443 bp, Emericella nidulans
ccagcaaaaaaaagtcgagtagtcgggtagtaacaccaggtaccctcgaactgtgctgaaactgctaagactctcgggagcacaaagacacaaaggaagaaagaactcgaatatacgtacaatccgaagcgaacagggcttcaaagaaaacaaagtcttcaccaatccaatccgggggtaagatcactctgaaggcagagcgcaggattcctcttggtctgcggagttcaaatacaggtagagaatgggatggacagtgcgaagaatatgaaacttgggaggcaattccagcggagtgactggcccaagaacaggttcgatcaaagctcttcactgagagcacatgcgataaaggggcaagataaaaacaggacacaagccgtctgtagtatcagtagaatacccggatacctgttcccaggagttccgtctaaccggtatttcctgaacgatgcgcgccgttgttgagcaaaaggtggttacaaggacctgaaggactattcacgggagatagacccttgcaagacgtgtctgaaggagaaaggttgcggtggagcgcggcgcgaggcgagaagggacgatgatgagcttcaagcgtgaaggagcttcggcgccttagcctcgaccagccacagctgacaccggcatgcaaaaacaataatccgttaccgcccaatagcctagtgtctaattgggcgatctactggaggatttgcataaccttcaggtctgcaaaaacaatcattcctaaatactcttgggaacaataaacgcggcaatgacccaagatctgggttataatccgtctacatcggtgtccagtgtatatagatggtacactttgacaatcacagggacgcctcgttgagtgcatgctcatactcccaagcgcgcatatccagtgctttctcgctcagattagtggcgtttagttgagcgtcgtaactatccccgtacgaaaacttcgggccgcactcatcctgatcagcgccattgttccaagagtgtatcgtgcaagtgcccgtcgagctgccccaaccattccaagatgttgctttgtaaagtcagatcacgccgtcgcatcacagaaaggaaaaggtgttgatggcttaccggccagaactggagcattgggatgccagctggcatcgcgcacgcatgtcttccattgatttccgtcagctctactcatgtacatatgaccttgaaaacgacgactgcgaggacgggaaaagtgtgtcgctttctgaacatcaactgttcccgccaaggtagcgtctagattccacacgtataccttcccgtcctcgctgccactatacacgtatcgagagtcagagctccctggaggtgagaagtgacccctgccccgggttcgaagaacactgtggcaacggaatatgacgacagagcagtcgtgcgggtgcgggctatagcggtcat

SEQ ID NO: 10783 - DNA, 1292 bp, Emericella nidulans
tataaaaaatctcgagtggatgcaatggttgtgcagatgactgtaatctgatatcgttaatagttacgcatgggttagggctggaaacatggccttcaatctatcattctcatcgcagcaaaaagggggaaaatgtggtttcgtatacgcaatatatcaaactacatctgacgaatgaaacgactagcagttctaccattcactccgccaggtattgacaaattttctaatcaaaccactctcgataagttccacgcctcccttcaaagacggactagcggcctcggacttctctgtctcaaagacaagctccgatcgacccgggttatcattgtcatacttctcggtaaagaagtctaacagcttaacagcggggttcctcttcggatcttgttcgccttcacgtagacgctgaacccactccctctttggcagaacctcaaagtcaagaccagcttcttttagagccggcaggagctctttcgtccagctgaaggtccttgggttctgcacgtggtagatggtgttcggatcatacgagaattgtcgtaggacggcggaaaccgaggcggaagtcttattgagaccactcaagtctagaactgcatctgcgacaatatcaacaggaagccaagacggcgtttcgtcaagttctggtagagcctttagcgtgagggctgtctgaagcatgagaggaattgcttcggtggtgttccatctcccattgaccgtgtcgcctacaatttgacccaccctgagaactttagcaaccatgccagttttttctgctgcagcttgaacaatccgttccgcgaccagcttggatcttgcatagcccatgctctgagcgtgcgccagctcagggacaggggattcggcgatagtggcagggaggggtgtcccagcagctgcagacacagacgaacagaagtagaattccgccggcgagggccgttggctggcgagacatagattgatcagattgtgcacgcctcgaatgtgctgcgcttcgaaactgcatacgccaagtgtgaaattcacggcccaggccgaatgtatgactttggtcatagaagtacgaatgtcgctaaggaatgaaggggacagtccaagatcttcagaaccgagctgggaaggcagagcacgaattttccagacatttaccatcggtaacgatcgcgaacgtaaattggaaagaactcgatctagagcattgttgggactggacgctcgaacaaggcagtagacttttctgacattctccttctgcatcaagcgggagaggatataaa

SEQ ID NO: 10784 - DNA, 457 bp, Emericella nidulans
ttgggatggttgctaagcgccacggtcttgtgtctaaagccgaaaagatgagcaccaagtaacactttctagaagaagaggcgatgaaaatgaacattaggcaaaggttattggctgttggcacgtaggaatcatctggggcaccataaccgtggcatgactgaaaggcacagacggtccccaagactggagtctcatcaccctgatggaataccctgacgagggctatagcaagcctgaaccagccgcattattagacttgttttgcaccattactccagtgctcatagcatgatactgtatagcatacgaggttgctcgtataattccaatccaaattctggactgccatgacactgaaacgtcgcaatggcttctgcctatccacaggtggtcacctgacttcatatatactggtcatcatggcactatctacacaactaacttgttcaagatt

SEQ ID NO: 10785 - DNA, 522 bp, Emericella nidulans
agcttgggccgggcgccccctctcgctcgtcaacagtgaatcgcaacctgtgtttttaaaaaggtcatcaatggagcatggaacggaatgaactggctggaacatgagcaccatccgtgtacacagactacgcatagcggtgctctgcccaaccttgactcttctaccgccgacgaaaggagagcccaccatctcacaggactcttcacatacgaggcaaatctaggacgtcggctgttggttctatacctgagaaagcccgcgaatataaggaggggcctctttgtgtgccaggtctgccattacgttatgagaagcgatcataatggccggcccataatgttgcacggaacatgcttgcacggcatgaactatgctaaatgtgggagctgacgcattgtttgtgatcacaactactcgtacaacccatgctgaataaagaattttggaaggggatctgtactgcgaagaggcataaatgacaggggatctggtaagcatttattgtcacgagaagatttt

SEQ ID NO: 10786 - DNA, 2215 bp, Emericella nidulans
ctagaagtacctatgtagagataccggtacgccaaagtcgtaagtagagtgaggttatggaggtagacgaatattgctcctgcggggagatcagccgaggtccagctggagatgccgtcactgttgatatcccgggcttggctgcattaagcccaatccgagcaaacgtcgattcatgcatgtaagataatctgatgtagttgactccaatgagtatatgcagatattccccgtaggggttttgttagcgattgtggctttacaatttggtctcgtacgatacatatacgtggttcgagttgtttcatagatatcaatgggagacaccagcaatggatatatataattcgttccatagtcccttacagcaaactaatggccacagccaagccacgttcacctttccacgcaacgtgaccactctcgactgcaagatgagtctaattatatgcagagtatgcagagtatgcaagagtaggtaccaggtactactacggggtcggtggacgataaccccggtctgtaaacggacttaccctatggagtcttccaagccattctcaccatgtcagcgggtcattcgttctttcccagctggtctcaatcgaaagggaattatttcatctaccgggtgcggtcctcgttctctttgctttacccaaggcgtgcccttaggaatgtttacccagccatcgagaatgctgcatgtttagccggagaagtatacattcctctcgccatttcatttataacacaatcgttcagctatttacctttaccataacgattccatccgctttgcagctcacgccatcatgggagccatgtctcgctggctcactgtagccgggcttaccctcctagtcacgggcagccatgcacagctcctcagccgtgacgacattcagaccactctggcgccccaactctctgctaacgcgggcatctacttaccccatgaagaagtatttcaattggcgacggagagatggtcgtattaccacccgcccaacttcacggtcgttgttgaggttgctgaagagcaggatgtggcgacgactgtgagtcgctcgcgaataactcacgatgaattagtcgaacacagctgacaagacgtagatcaagtacgccaatgcaaataacctgccgttccttgctgtcaacggtggacacggttcgatctcgtcgctgtcgaatatcgatcacggcatccagatttggatgcataaactcaacttcgtccagatcgctgaggatggcaaaacggccacagttggaggcggcatcaaatccgctgagttgattccagctctcttcgcgcagggaaagcacactggtgagcagctgatccggtggattagaaactcggctaacgtctgcagttcatggcgtctgtgagtgcgtaagctatcttggaccagccctgggtggtggccacggcacgttgcaaggcaaatacggtatggcttccgaccaattcgtgtcattacggattgccacagcagatggcgagatcgtaaccgtttcggagaacgaaggagatagggatctgtggtgggcgatgcgaggcgcaggccacaactttggaattgtaacttcggtcacctcgaagatttacgacgtaccggagcaaggaaagtgggcgtatgagcagctattattcaccggcaaccagtccgaggagttgttcgctgcattcaacgagctcgccgatatccagccacccggtttcatggtttggacatacctcgtgcgcattccacccttgcatccaacagaggtaagtccactcatctactctgtcaagcccggctaacacctcagcctatttacctggccaacttcatgcgtgaggctcttgacgaaatcgagccggagcttattgaccctttccggaagatttctcaaaggcctgcgcttgccaaaaccgtcgggctctataccgacattcccacttggatcaacacggctgtcaactcgagaggctgcgcaggtgaggccaacaaggtgcggttccccattggtttcccgcggtacgaccccaaggcacaacagaggctctttgacgttttcgcaaacggcaccgccgggggttcaccattcaacacttctatgatcctccttgagcagtactccgcgcagggcgtcgagtcttatcctcaaaactcatcggcgtttcctcatcgatacgacgatttgctgatctcgccccgta

SEQ ID NO: 10787 - DNA, 838 bp, Emericella nidulans
tgttctctatgatcagacccgtgctgcaaacgctgagcctctactggccgcgccgccattgctcgtcccgttcgtcacctccagccaacaggtcaaccactggatctcaaataggaccgccggcggggtagagcaagtccggaaacgtctgtcctccacgccgagagacgtgattgtcatctcgcgcgggatcagcgctactgtcagagcgctggaaacgagcacaagcccgtactcacagctcgcaacacccgaggcgctcgattcactggacgagtacggcaccgtcgccgtctcgccctgcatatctacatctgtaccaccttcccattcgcatccgatgtaccccatcatcaagtcaacgagccaacctgcctttgcaaagctgcaggatcgtataagcctcgccctggtatatgacccaggcaaccgttctctcgctacctgcgccgacgctttcaaagtcctgtcgaccctccggacgggcgtcttccctcaagaccagtctagtccaccccttctccttccaccctcgatgacacagatgcctacccttcctcaggtagccccttggctggtatcgttcacagcccgcccttcgacgccttcaccgacagaccacatgacacgtccgttgctgagcttccttgtccacgcaccacaggcatacctcgatttcgtcctgccgctgctggatcagcgtctcgaggggccggcgccaagcgagacaggcagcgcggataaagcccaggcggggctggagctgaacgttgagcaagccctggccctcgacatctacgcacattggtcggtgctcatgtttctagtgagcgaagag

SEQ ID NO: 10788 - DNA, 852 bp, Emericella nidulans
tctatgtcggtacctctatcatcgccagtgtctggtggattatttgggcagtcacggccgactcggcagcgactgcatgacggggagtgggagatgttggtgtgtccggtttgtcctgtacatagcgaatgagcatgagcgatctgcattttatgttacattagtatagttcatataggcgttattcatcggtgtgaccgactgtcttgctagtttgatcacggaggatacctaaggatctcatctccgaaccctactcttcagcgcttagatgggaaggtatctgccccgggacgaaggtcgagactcatctggactgaggatcatcgttggactggacagcgacaatggctacgagcagaaacaccggtgccggggtaggtcaaggaaaagggtatagtcacgacgcccagggacgatcagcagacccaatcaggcactgcagccgcctcccgtcgtgaccgaggactcgagtcaaagcttgactcccttctcttcctccttctcatctccttcatcgccaatcaattctgactagacttcatcttttccaatcacactccctgatcgcggaatctcaaatcacctgcttttcctcacgttacatgtgaactcgagcgaacccctgcggatgtgagtccttcagactacatgaccctgcacgagtttcggcttcgacattcagaaaaatgcggaggatgtgtggaagcgctaaatgatacttggtgagtgtgatgccacgacactctaatctgaaacgtgctctctatactgacacctgagtctagtacctgggtcctgatagtaggcctggttcgcgcgctttatcccgactttccgcatgagacaagg

SEQ ID NO: 10789 - DNA, 2178 bp, Emericella nidulans
gagaggagagtccaatagaagatggaaaagcaaaagaaagcaagtaaaaggagaccagagacggatcaaaaacgaaagggatgcggacgtcaaacaaagaggcaaacaggcgagaatgttatgtccaacgtaagcagtaaacatggatgaaccaacagtaaaaacggaaagtccagccgggtggaccaaaagagtcataaccgaatgattgactgccagaggaaagtccctcaaaagcaagaaaagctcgacgccaatctccatcaattttggccatcacagattgccatcgctggcaggcctggccagacagaaacagaagcagaatatactgtcggcgaacctcctcgagtgaaatgggtacgcattcgtcgacaaggatgagcccgagtcccgatctgaattcgacgacctccggatcctaggcaccagcgacacaacgcctaaccctttcgaaatcaaacaaaaccgccgtcgggaagatctccatcaccgcatggtagaccgcgtagcccggacaaagcgtgctgagaaggccgccaaaaccactaagacgccgctcacagatacgccgcgcttcgccagcagtcccaggctggacttcgggctccgcacccctggttcggcaacacccggcttgggtggtgtgaataaggcgctcacgccggcggcgcagaagttgctgtccaaaatgggtacacctaggcgggagatgtcaacttcatcttcttcatcgtcagtgctgaagaatatgtggactccaaggtcgaggaaacagaaataaagtcctattcttatgtctatattttgttcagcaatttagcgtgtagttgtccttatttgtactatgaccaaaggtcaatgtttggcttcatgagcgttacatacagctagtactttattataccacagatatgatgcaatgcgtgcaacctacagtatctcggtggcgtctatagagcacgacccttgcgtttgttgtgcagagtatcctgcttaggcacattatcgacatgtagttcaaggcaacggacaattgtttccacggaacttcgatagccaccttgcacatcaaagtcataaactcttagatgagtattcatcccagggtgatccatgaattgtatctatacgaacagaaagggtatatgtagagtaaatcgaacttccatgcatagggcgtagcgcgtaacagattggaagacgagtttgaaaaggactaaaacaccatcacaattgtaaaataaaccattataacagcccacaaaggatttgatattcgtccacttggagcagcgctggtatcataagaataagtcaggtactttccgcttggacatgagaacccaagtgacataggacagcttcgcacgaggttatggcagaaactgacattgggaagcacttccttatatggaccggggttgatttccgtatcaatcagcccgctgtttctaggacgattggtgatcgggctatcgcggagggtctggtttgtgatctcggtgccattagggaaaggttgcgccgcattacgcaccatgacagcagtcctattggatgtgctggagtagtcgtcgcagcgaggaatggtgacggcgcagagccaggatttgtaagcggccgcgcagtcgtcgcagctgactgccattgagtaaattgtttcgttggaggtattacattggatttgttgaagggagaaattgaagtttctgtaaagatttgcggcatagttgtcatatttggcgcgaacctcggacatgttcattgaagggttagagggtactgagtgagcgacatctgagcaaaagtcaaggtcgtagatcacgtcgcagttgccgtctttttcctgttagctgaatacttataaatcgccatagaagtggatatctacctgatttcgttgagaacttcttcgccttccaaacttttcctcctccaccgactattccgttcccgaactcagtcgtgttgcccatcgctaatatgcccacatatgttgagctgcggttcaagccggtgacatagaactgctcttggaatgtactgtcatcactcttgcgccttgacatacttgcttcgacattatggccattactagcctgcgaatgttgggcaagggcgcaataggaacgggacaagccagatccaatggtgctattcgcgttattaacaaat

SEQ ID NO: 10790 - DNA, 1389 bp, Emericella nidulans
ttaggtaatgcccgtgtgagaatgcatacactaatcgccgcaaaccaccaacgagcgccacatacttctgtgaagccggaactttttttcccagttaacgaaagtttccgttacatagaccttgttaccaccagctgtccattcgatggttgtaggcacggctctacccacgccgctagtagcgtacggctgaagctcatctacagtatcgtcgtcttctatcgttgcgaggtcgggtttggcagctgtcgttttatcacccagtctttcttcagtcgcgagcggactggtgtcatccgggccgcttatgggcgagcctggtatagctgtagcatctccaatcggcagaggcatccgcggtggacgctggagatgatgtgatgcactatagtacatcttgggaggcggggccgatagagcgacagattcgtacggatcgcgtcgagctgcagcagtgcgggaactcgggacctggacaggatcggacggatcgggcgcagatatcgccttcgagcgaggtgaatctgtcttcgaaaaccccggccgatctacagtccgtgtaggtgagcccttgacattgcgggtctgtaggcgttgttgaacagaagtttgatgttgggacgacgattgacctgttgcagtttctctggaactagcgacgtcggccacaggcgccttggcggcattggaggggccgtgagcagatggcccgcgagccgctctcttatcactcgtcgaagccgtcaggcctgtattgcccgaaaccaccggactcgggccgtctccgacagggcccttggaaggattattgcccatcttgaatcgcagtgtggctgtaagaatatgaaaagatggatagaggaactgcgggcggagagcgttgaggctatcgagattcaggacacgcgttgggactcaaaagattcgagtgaatcaagacatccgtattaagccgtcgacctcggaggggcacaaggccaaaggatcaacgtgagcggacggaggttgctcggtgagtcaagggagggaatgcggggagagaaggaaataaatagtctatcatgtataagcagggtacacatagggtaagaggcccgagaaaccggggagaagcgagcactggagtcgacagtgacggtgtctggagatgatgtcgataactctttcgagtcttgatagcctttccccgagtcaaccccagagtcttctcaaacgggtattagggcttcatgtagggcttttcctctcggcggagggtcctccgccgctatattattcaaatctggaatagagactacgatcttgagaccgttggacttagcatactccagtcttctttatcttgccggcatcttcgtatctcatggtacacaggcacagagcgtacct

SEQ ID NO: 10791 - DNA, 652 bp, Emericella nidulans
cggatggggtcgagcacgagcgtcatggagatgccgtacgccttttcccgcgagcgggccagatacacgtcgttggtggtcgtaccggtttcgacgatgcatgttggtgaagcccagtgctctgcctccttggctgtgtggtgaagagcgtacgaagcgtgcgatagggctggaaactcaacgccaatgacggggtggacaaggcgcgtccggtaccaggccgcatggtggcggcggcggagttgcgcattggtcagagaagtctcaatggtcgactgtacagtaagttgaaacttttcaagtagttcattagaccggtgcttgaatatgggggatgcagttggatgggctcacgtttccatcgcagtagtgctcagaatgcttcaccagcagctcggcgccgcgaaggggtcgcaccaggtttcttcctgatagcttccattctgagactggctcagggagagtcgtctcatagggctgctgaattggggatgccatgatggaggtgctgcttgagaaccttcacccgtagaccacgcagtgtactctgctggagaaatggcagcaacgaggagaactaatacagccattgactacagggtagatacgcaaccgatcggcgaccttagcctgcaatagcggcgaagactat

SEQ ID NO: 10792 - DNA, 1660 bp, Emericella nidulans
gctctctatccacccatcaaagaactcccggaagctctctgttcctctgatacccaatgggcaaactgccggtatcggcacaccccttggcattcaagcattgctgtcggcgcggatggttcatattgcgctacgcatgccgaccaggttcgcaacactcatgacctcatcttcaaggatgggcgtccatactgcttccgcgaacgctcagagctatttgattggggttccgatggccttgaagttacattcgagcacctgtatccgtgcggccttattattcgtcctgtagtcactgacgatcaagacccgccttcaatccgcctcatcccaatgcgcaaggtccgtaagctctccgccaacctgtcacccgtcattctccgaggttttggtgacacccacatggaggaagtattcatcgaaacagccaccaaactaggccgcatcaccacctggagcgaaaacatcatcgttaaagtccgcgactccggaaggcaggacaagcaaaacaacaatgttaagtccaacgaggccatgcccatgcatttcgacggaatgttccgtttcaagcacgagattgaccctgttacaggcgaagaagtccgagtgcaggatatccctcgatatcagttcttcacgtgccaagctgcggcggccgaagacgatgggttcacgctcttcgctagctcgcgcctcttcatgcggtatcttcctgagccctggaccgttgagcgactggagaaaataacctggagcatggagaatgacggcttctgggacgcgaaggtgtataatcttccgcttgtcattaagcatcctgatactggcctcccgtcactgcgatggcaccagccttggggatcgaaggataccaagttcagtacctgcgacgtcaccattgataacgatgatgtgagactcgtcgccctggttgataagctgacgtacgattatcgcgtctgcaagcgcttttcgtggcaagttggcgacgcgcttgttagtgataacatctccatgctgcatacaaggactgcgtttgagagtggttgcaatcgagagctttggcggattcattgcgactagttttataaattagcccttcatgtgcggattggacgtgatgcgtgttgggtgggctataaaacaatatgtgagatatacatggctgctttttcttcaacagagaggcgaattgaagcaagacagaggacaactggatgagacttattctttttgttgtttacagttccttccgcaccgtcgggttatttgctaatttctcttgattaagtctgtggtgcgcggatttgacccttcgtccggcacattccgcggctcgtagagttccctgtcaagaccgccgtagccgccgtctcaaattcctcgtatgcgtatgcttgagagtcgtgagtgaagagccggtcgggttgcggctgggctagaacctgcttgttccttgccactccctcccagtccgttctcagccacacgttgcgcgtattaatgcccatcatctggccgatcttgcaaagctggtatctcattttcttcaacgtccccagggcgagcggcgcctgctccttcaaaaaagccttagcgtgacaccgatggtggccgcgtccgcaatggcctgagtcgcaccctgagcccagggcagtct

SEQ ID NO: 10793 - DNA, 452 bp, Emericella nidulans
cgggcctcttttcgggccacagacggagatctgagagaactgcatgtatagagcatgaccagcatcagcaacgccaaaagacggatgctgttacagccaacgcctgcagcttcccataaagtgatgcctcctcgcagttttccgccagtgggtgctccgactgcaggctcgtggtgcgggcgagaatatatggaaaccgaaagggcgagaatcaccatctcgaggggcgcggccactagccatggcacgaactgagcaaacgttggtgaagggtctgtatctagcagggataccaggataatggcatagtcgaagaaggaccccacgacgtatatctggaaagcattagctatactatcagcttctccgcgcagtgatttatacgccacgcacgcagcaaaggtgcgaagagagcatgagtccataccactacagcctgaccacaccaccac

SEQ ID NO: 10794 - DNA, 588 bp, Emericella nidulans
tgatcaaacaattccttgcacgtatctatttcagtaaagcagttaagcatggagagaataaagcacccgttacgaatcaaaaacctgctattggtattcagaagaaccataggagaaatgaatcttcaagtatctaatgatacatagcgagcaagtctatacgagaacacagattgctccatggaaaatgaagccctttatgcagtagacatcctcctggagctgttcccaagacggaactgaatccgaacgaccgtatgattacttgtgaagaccccttcagtaaactgaacatgcacgatgccgcattccttgggcattaagtaataccttgccacgagggccgccatgtatcaaagctcgcgaaacgagtggaagaatactcgactcgtggatgagccaggtgcccaggtttatagctcagtagcataggcaggtcgcgtgagacaagtaaggcatatagccggtagcgagaacctcaccctgtctatacacacttaccctactcccaaccgagtcaacgtaactgtaaagcggtctcaccgctatatattgtcctatatctacgacagatatgaattttatagc

SEQ ID NO: 10795 - DNA, 2750 bp, Emericella nidulans
taaagtgactggaggctgttccgggcattcagtgtaagtggatcttctgaagtgctagttgaagacgaagaactagttataggtggcttcgtcggtggtccatcctgcagtggccagtcacgtcgcgcgtctgcaaagggagatgaattagaagggcatccttaccgtgcagtcgcaatcatcggggcccaaggtcagcccaaggcccaaggttgccccaaggtccagctctccagctcccaaggacgccccaacgccgacggttgccccaaggtccaagtcgccaatgcccacatttgccccgacaccgacagaagcatcaagacccaaaggagttacgaggctctcagaagtctcggaggtcagagaagcctccgagcctgtctcagcggcggtggttgcccccggggcagcaacgctcgaggcgccataatcaagctgcgcccaaacagaaccggcgaacgagggcgctgccacgaggaccaaagagcgcaagcgcataattgcgattccccaaaatgtgaccggcaggatcgagatgcgatgcgattgctatcagcgcggaagtctgaacaagtgcgatgcgctgcgctacgcaatagttatcatgcaatgcattcaggaagtgtcagatggggaaagttcagaagctaagttgaaaagatctgatcggggatcgagctatgcgacaaggccaggcaaggcaagaaacgggggtttaccggttgccagggtcgcagtggggaaggaggagaacaaagagcaggcggcctttatctcgactcttttagcagtagcttgggcaccggaaaaacaggcacagtttaaatcagccggccgcgggcggatgggaggctctggggtggggaactgagacatggccagggcaactacgtggctgctgcacttcggatgaccttctgcaaggctacggaatgaaggcagtcagcttggatggcccagacggactagtggaggagcccagcaggggtgcagtgatgcgggtcgttagtgtgcagaaagttcgtattcaggttatcccgtttatagactcatcgtcatagcggcagaagcaagtatggttggacgcctgatgcggtcctatagggctggaccagaacgtccaaataggcgagcatttttgaagctttctcttcgaaccttaagaacggcagagttattctaatgaggctgagtgtgttgtgagactctgaaaacttgagactacagctcgagatccagaggatcaacgtaaagagcaaggtgctttgacccatgtcggcctagcgctgctttggttgcattgcagacttcgacggactgcgaatggctccacgcggctgcaagggtggcagagtgtcaatcgagtgcccagacgctcgtgtcagcaaccccgcctctgttcgtgttcttggagctgttaatggcttgatccctcccgcgtctctggacggaggctcggtcagactggcgtggcgggtactgaccgaacaacggagaacttcccaaatccatgaatcgctgcgcctctttgagccaattgctattgtaaaaaaataattctccgaaagcgaacgagcccacccttgacgtgaggtcgccttctttgtcctccacgagcagtctgtcgcacagagttgcccgcgtccaacaaaagaaaacgagcgactggccgcaaacgaataagggcgaccagcgacacggctattattatgctgatctgaaatgaagttctctctatagttcagttaccatgccactcgattctgggtccttggccgcgctggccgtgctggccgcggtcgcgacgcttgtcgggcgatcgcaggcgcagctggacgtcctgaatcagatcaacagctcgatatgcacctggggccagctcagagcggccgttattcgcgataccgtctatctggacggcgggaacctggtttatcagaggtgaggctcgcatatcagatggtgacaggagggtttgatcaaactgaccccgcgcagaggcttctccaacggacaggtccaagtagacaacaacgacaatgccgaaggtctcctttacaccctcgatctctcccaatccttcaacaccgagaacgacaatctcactgcgctcttcgatactttcgaaaaggcgggcggcattgcgggcaacatcgcgcctacctaccacgatgggttcatgttcgccaacgacaacttgttctatctctatgggtaagcgagtctctggaccctccggcaatcgatcgctgatttttgtaggggtcttcttgataacactgacgatttcgatgaccctgccgagaatactgccctggcctaccaggcgtaccagtacggaggccaacggcccgggtgggagccccggttcatcagcataaatctgcccgacggggtcactcgctatatcaccaacggtgcaggcgtgaacgcgccgagcgagaatatgggttggtacatcagcgggatgcgcgccccgggttggggtcctatgtgggacaacgagactgcgaccaacgtgtcgcagcgcatgatcacggtggacatgtcggatatggagaaacctgtgtttgagaatgtttccttgcacagtgatgatgtaccgggacgggctaatgctgaagccgtatgcgtccccgtggcggagtccggggtcattgtgctcataggaggcgtcaccgagccagacaccatctttgccgccggactgagcgatgagcagatggaaaagagtgagcctgagagtc

SEQ ID NO: 10796 - DNA, 415 bp, Emericella nidulans
gccgagacgggacatgatgcggtccactggggttaggcgggcggacctgcagggtagataacaaccgacttgcgccatgattactgcaacacaagtctggatcggttagacggataagtatgggtagatgacaggtgcttaccatgcgaagtagagttgactttccggctgcgttggctccagtgagtaggtcaatattggggccactgccgcccagttgtatatcgttgggaataaagtcatcaacagaggagataaggcaaggatgtcgaagctcctcaaactctaaaacactgcgttcatcctcaacgaatgtagggcgacacttgggttcgcctagactggacgatgcttggctaaactaataaggcagtctagctgtgagacaaccctgacagcagagagccagtggaat

SEQ ID NO: 10797 - DNA, 1435 bp, Emericella nidulans
aggctgctgaggagatggagaggcagaaaaagttagaattggaagaaaaggagcgcaacagaaggaacgcgcggaggaggaaaagaaaaagcgcgaggcgggaatcaagaaggctgaagaggaagctgcacgactgaaggaagaagaagcagctcagaagcagctcgcaaatagtcaaaaacaactcggtggtggccgattgtcggaggaggagattaaaactcaccaacgctacgtggaactacaccagcacctgaaaaagttccgtcaatacctcagagaccaaggcaaattgaatcccatcatcaagcagaacatgggggatatgcgccgctcgatcaagaaatgcgttggccaactgcgtgaagggaagggcgtaaacaagaaccaggtaattgaagcccctcgatccctatatagacgcgatctaaatatatcctcggtccagacccaggaaatccgcacgaccctcgaaagagctgcctcaatagctgaaccctccgtcgacattcgccaatttatcgccttcccacccgaaaacatcgccaaatctgatgacaacaaagtcccagctctccttatctacggcctcaacattctcgccaagtccctcatttcttcgcttatcaccgaagcttccatcaatcaaggtcacgctgaaccgatcggcatcgttgccgcccagatattctccacagaagccttcctctacaagggcgtccacatggtcgacattctctgggctaaataccgcgttgtttgccccgcgctttggggcttctacgggaatgagaagactgaagctggtagacgcgcgttgggatggtggcgcgatggcggctccgatgggccatttgttagcgagcaagcgcatgcagaccggatgaccgcgttaggagctggatttgcggccctaacactgcggaacttcggcaggacgcagcgcaagaaccctttcccgaacacactttactggttctccatgcataaaatcttaaatatcccggttgcggaaattcaggagacgcacgtcacgctcctatcagccatgctgaggtcctcagctgagagaatcgtcggtttttttgggcatatcggattggcattgatgaggaaggcaattgttgaattaccggccaaccttccgcgtcagagtatggcggttaatcagctgaagcttctgaaggacctttatcagcgggagaagaacatcatcatttgatggatataaattcacacccacaccaaaggcggcagtggtgaaaaggcagacgttgacaacttcgtgcttaggaactttgccaggcatataacaatggggccgaccaaaacaaagaatagggacggctttttcgccccttttgataaataataatgccggaaaactggtccccgctaatttggggggcgcctccttctttattggtttttttca

SEQ ID NO: 10798 - DNA, 1265 bp, Emericella nidulans
aagttttcatgtttggtttcgggttgcacgcggggtagctcagggtatgatactggtcctgacgaccagaccagcaacagcaggaattgacttggtaggccgcgatggctgcattttccccagcatgctaattttttcatgtaatctctgagtagatgacttgttgtgaagtttgctcgcctttacgtcttcatctgcttccacatgcgcagtttccttgggatcgtcaacatccatcctatccgcttgagtcaatcggtgtccggtttgtcgaccaagatagtttgaggctgtgtttgacttgatagattcaagatggctagttctagatagcctagagctgccaattgatttaggcgcaagaggctctctggcaggaagagacgcaaaactgaggctactcttgcgaatcgggggtcgttctggcgaatccttttccgacggtgaaccaatatcgtccaggtcatcaagaaccatctcatctttttcgggctcgttgggctcttggggtgatgaaggttggggtatggtagttttgaccggtgtcgactcagcatcttgccccgatacattcctggcatttggcgccgtcacggctccacgattgtcaggcttatcctccataacctcgtccgcttccgattcggcctccttcgatggttcgggaacaggcgcatattctttgcgcgtttgcttcggcgagtcaaggttcatgggttccgcggtgcctccgcggtggcgtacttcctcaggagccgagtggaatgaggcatctgtcgtgcggcgatcaacggacgaacgacgcgcctcacggaatgaagtaggttcagggtccaactgctgtgtggactgagactccggcgccacctgtgtaaggacgacttcatcgtcatcgtctggcattccatggtaaccagaatctgtgttgtactgtgagaaagagttgatgtcctgcgtcaagtcggggtattggggttcggtcggggttggcgctctgtttttggctttgtctgaagaagtcgtggcttttgcaggagtggcagctgtttgagcactagcagacggagcaggagcgccttgagttacgaccggcggggtaggtgccggtggagcagttatagctttcgtgggcgagcgctgggcaacgggactagtggagaatgtgggatcgggtcggttcttctgtacggaggagaatatctcactcagaggctatcgtggtcagcgatgggcacgaaacaagggggattcacaaacacacggtt

SEQ ID NO: 10799 - DNA, 1835 bp, Emericella nidulans
cctgggaaaggtcgttatctcagactaagtaattgcgatggcaggggtaaggagcatcataagtttaggtcgcgtggacctcgagagttttgttttgaacatgaactggataagagaagcaagaaaccttgctgttattgtacccttataacagaagggcaccgagataagcaaggaggaaggtagctagcgatcatagcccatgcaagtgaatggcgctgtcaatcgtgacagagacagcaagacctctttgcatcatgagcacgttcttcgcgagtcatctcccaaggagaaatctatacgggagtgcatacccagcttgaactgcgtgtattagctgggctccagtgtagatgattttggactactgctggtacttgggtgatattttcattctcatgtcctcgcaatataggcgagcaatcgcacaagtactcctggacttcgtattgttctcggccacaattttcccgctgaatgctctatttcgagtaattgacagacgttatgtaggacaggcacacatggagtctcgggtgttgaataagggttatactttaggcatttcgagctgatatgcccggagcagcgccgcaagagaaagcgaagtaatggccttcataactaggacaccaaacgttctcccaagagaatttacagaggcactgggcgcaatttcaacaagccagagcgtctaatgtgataggcaacttactggctttctgacacggacggacaacttggtcaaccacttcatctatttcgctgatgcgcattttcaagagaaaagacccgctgggttccctccatctggatcgaccggaagtgggcaacacttcaatccacagcgattccgtatcgtatttcagggccagcataagaccccaacgcagtgagctgtagataagtttagggatttcaattcttaacgctcagcccatgcatctggcttataaagagcttcaaagcctgtacggcgggaagtaatggactaatccatcaactatatgtataggtaatgaaccacgcgcgacgtttcatgggcagcgctcacaagtaaacggtgtcgaggctgttccgggcattgcccgttctattttctttgggtctaagacaggctctagatattcccgcacgcaatagacgagctgcgtagccgaagtgattaccgtgctttgcaattacctgccaggacgatgtcgatgtcttcccctctcaagcaagagagagccgaggaggagcttgaaaaaggctgtattggatgccggccagcggatacagccgtcgagtccgcaacatagataacgagcagtgccgccaaccttaaaacattgaaccagtgctctttataggctctggttgtagaatacagacattgatcaaggttcgtgcaaggaaggatatagattgagtctggcccccagcgtcttctaacgcaggagatttgccgtccgccacctgtctcataatgaaacagggttttcttcctgtcaaactctcaggaatgctgatccttgcgaagacaatttgtccataacaaaccattcgtctatactccaatccaatgtctgaaaggaagcgcatgatgtgtgatggatagtcaaatatccgctccctgaacccgacagtaaccgtcgttgcgcgtcctcgcactatgcaattgtccacaaagtcaattgcaacctggtagatccctaccctgatgacagccattgagggcatatagtgcagccttcccttgttcgggccgggataagcactgagtccttagccatttcacaaccatgcagaatagcgtaccggcggaattaaccatgatgtattttttattttat

SEQ ID NO: 10800 - DNA, 1071 bp, Emericella nidulans
ttgatccagagcatcatctctgatcccaccccttcgcgcgttcactcgtttgagtggtccgccctttcgatgggctggtacgaatcgttgctttgggggttcatcttttctgctgagatggttgtcggttcggcatctggcgctacacctggcacggtgggtgtttggaacggcacctcaatcaagctattcaaggtgcaggaggcggcggcacagggtccaacgctactggcgcccaagggcgcggtggatgcggttggaagtaacctggtacagcggatcggaaacttaggcctccgacggagtagcacgcagccggagactcaaagtaactcgggatctccgtcagttcgagaggtttgatagagccatggttatatattctagttgttctttatagatacctagcttgtgtcttcaatggagcatataatgaaagcgaacccatcagctcaacagcaaccctcatcgatttcattgttctccacgttctcgcatatctggtcgatgacagcgaaattagtgcgacggcccgcgtggcccattccaagccccgagatgacaatattagaggcgcaggtgggcaaatacttgcttctttctggctgctgatatgccaagtccaccggggaaatgggccatctgcagccaatcgattttgcatgctctcaaccccaacaaataatataaattcggggaagctcattccatccatctctttcctttatcacgggcatcatatccagcacactaacgctcaggaagtgtcatctataaagaaaaatggctctcttccgatttttggttaccgcagcctcggccgatgttcttcgcgggttccgactgaagcgctcgagggaacatcagagctgcagagtatcctgaagaacactcaccgaagctcagatataagtatcccactgattttacaggggtaaataactgtgaagttccctgaacgaaaacgtttcgtggtcgaacaccgggtaagaccgcttacccagattttcatcatagatcccggttactttataaggagatgcttcattgaaacagagccagaactgatgc

SEQ ID NO: 10801 - DNA, 1711 bp, Emericella nidulans
taagctcttgccgacaaaatgagaagggatccaaggaggagagccgtctggggggtaattgacctgcagatccggaggcaggctttgcagccagtctgcaaaaagcgggttgttttcgacgaatttggagttggagccccagtccttttgtcgtttgattttgtggtaaacgtctgtaagtatgcgtatatgatgagcgttccgaacaaaataggcatactgcctagatcgatcaatttcgaactggtccatgttttcgacatcaagctcgggttgcatgtcgaccgtctgtggatctacgccatagtccgaacgtcctgcagatgtcagcacacgacaacgccatagggcaaatcgacataccttgcggggcgcctatcattacctcgacaactaagagggcctgccacactctagtttgaactaaacattcaacggggctcaggttgcaggttttttcctcaagatgcgtgctgtagtgttcatgaatatccagatctttggccatagatattatcgtcttgaccgtctgccaagaccgataataatagccttttttgggtaatgactctcgagctttcaagagaaggagaagcgcctggattgtgctcaggcgcggaacatccatgaagctagactcatgtccttgggtcaaattagtatggcggcgaagtagatgtagaaggacttactggttgccagtgccaaccactgagccccttgagcgggatcatccgataaccttcctgcacatgcaaatagagcttcaaggaggagaggcgatattgaatttcggtcatgctgccactgatgatacaggtgcgcccggtgaacaacaggaacgtaaggatgaatgtcatcaaaatagatcttgaaataattcatgacttcgtcgtctgatggcatgagttctggaggaatgcggattttggagccggacccagtgcgcaggggaggcaaacattcctctacttcatcctggataggaatttccggctcggtcctgtctgtcctttgttgtcggatatatggtgctttccaccagttagtttcgtcgattattgggaacaatctacttaccaattccggtctcatcaattctcaattcacccagtacttcactgagattttcggcggtggagtgctcatggtcgccatattctataccatcgtttggccctatggagcgtgcttgagaaacagaaaacaactgatgcgcttgatatgagtcttgcgagacagcttcaagaggcgatcttatcccataaagactcgactgcgtcgacacggcaccaggcgcatactgagaaaatgagcctactccgtcattatattgattagcagcctgtccatgaggtgcaacgccgtcgcggtaggtttggaatgcagtcagatgcgaagattctggcacattgagggtattaatcgtgttgatggaatatggttcaacgctcggtcctgaagagaaatcgctctcttgtccaatggttggaggcacgcaaactagcttcagtcgattgcaggcagaacaaggccagatgtttgttgtagcagcatcgcatttgatttttcgcttcctacagccattgcatgcgcgcatgactggaagaggtattcagcaaggaaaccaaaatcaccaaagaaaggcacttacccttgagccttttgtgtctattgtgctcatcaacgaaaacatagtctgatataagaa

SEQ ID NO: 10802 - DNA, 3302 bp, Emericella nidulans
  unsure (1)..(3302): unsure at all n locations
ggcattatatgtttatcctctgcttggtgctacagcatgtgcatcggccgtgtcttacatagagtcgtttttaataatgttcggtttcctctcaaggggaaagtgttagttttctcgccattggtttcactgtgcgaatgtggttcctattgtatctttcgaaaccatatctccttctctgacttaggtcatcctcatgttcaacttctaatgggtcatttctggcgcagtgaaaggcttgcgggacaaaagatgtcctatacggaaccagggcctcgtgtgttctcttatttctcattttattctctttttcacgagaagacctagggccttcttcgccgagtactggtttcttcacatcacgtctacaaaacagtggtacacgaaatcatgacggatgggtgatagaaagaagggattctttgcattatatctggcgttagcttgctgctgttccaccaaaatctacaggtgtcttgtggaggctgacattgaacggaatctctctgatgttttgatcattactcggatccgtggaggctgctgggagcttcttcgctggcactattcgtggttgaatggcgtaatttatcattgcatgtcagtcgcgatttgccgaagacggcttgctatggaactgggtttcgagaaggagctagtcgcaatttacaaaaaagtttgacgtttgacgagttgtctttgaatgctgtagtatgtactgtatgtagcgcagatcatacgcagggagtaagtaaaagcctcttgtgaattggctgaggatccgtgcacgaaaatttactgtatctcggcgtactagccgtaaaattcgcatggcgttgatgtaccataatgaatttggagcggctgtacgggactttttgagtaaaggagagtcgcgttccaacgactcacgcagcaatcctagctcacgctccaagctcttcttcactctccattacccctttcacccatctcctttcatctcgttccgccatctttttctctctttcccttttcttcatccctgattggcctttaccgccattatcctcctcgctcattcgtccatcgatttaatctactccatccgctttatagcaattccgatttctgccctgcccgttgacctagtccaggacgtgtggttgaaaacgtcgctagaaagcatcatacgttaacttttaacgaaatattcaatccttcttacatcaacgcctccgccgctcaatacgtaatggctgatgtcgaaagcgcaggcgtggacgattcgtttgcgcaatccgaacctcacgatgagcaacaaattcacaacatgactgtcggcacgagacgtcaaccgaatgggacgataggttcagtctactctgggaacaaaatcaggcatttaaaaaaggaggacggtatccctctgtggcgcaaagatatccagtatcagtttcttaagctcgtctttgaagacaagacgccggtcttcactcgttggccagatggacagaaaaatatggattttgcagatatttacatcgatgctatggctaggagcagcaagacgagcaagattctcaaggacaagcttcagagcgataagcaggcggcgatcaatatggccatggtttgcctgttggtcaattttggacggatgaatacgaccctcaactgtatgttgccgatgtctactgcttaattattgattatttggcatgggacttaccttgttcgatgtcagtctttccgaaatgcgtgctcagctgcgaacctaccactcattccttcgtttacaagcgcatcaggacccgaacgcgtacaagcagttacaagacgccccccgccttaagtccatcctcaagggtgcgtctgaggatgtggatcaaccaaatactctggataagataaagcgcgaaaacgttccccgtaccaatccggtaaacctgatattcgtcctcgcacaatatgcgcctaaagtgtctgagatgcatttcttcccgccccgtgatttctttgatctcgtcatgcgatcaaccttaagcagcaaatctcgggcgaaggccttcctttggctcatgtggtggtatctggagagtgacttctcccgcgaggctgccctcaataatcccttcggtccagggttggagggcgagggaaccggaggtctaccgatcaaggttccctcttttgaaatcctcaccgaagagcaggcgaatgaggagaatgttgacactcaatccgagatcgaatacggggaagagaagcgcttggaacgcaaaagtaagccaacatctcaccgtgtgtctccacaacgtagctgacattgtatctagggattctagaggaagaagagccaacccctagagcacccaaacgtcccaaaaagagtatgtttctgccgattcatcaagagctcatactaacggtatatctagtgccgtattgggagttccaatatttgaaacagatggagcctggtatgttgcgcttcgtcaatccacatacatgccatgctgcgtcactaacatatttaggtactaaaatcccttctcgtcaattcagcaacaaaggggatgcatacagggcagcggcggactccgatgatctcatcgagtttcgaaatcctgatggatctatccgctccactctgaagatgcctagggacgaagattacgcctaccaaagtggcagtcttgatggcccatcgccgcgtattgtattgaggacaaaggcagaaaacacccccgatgccgcgtccccagcacctccaggttcaggctatcctattttgaaccggttcgttacagaagcttccccacatcaccaaggttcaagccgacgaccccgcccactcacccaacaccagttggctgtcgaacgaaaccgaagacaacgcattgagtacatattggccaagcggaaaggggaagcgtatcgcttacttcgtgcgaagagactaactgaaataccttttgcacgctacgggcgcttgctgcagaacttacctgatggttatgacacggacgatgataagtcctggggaaagggaggtctgttgcctaatccagaggaagaagaggattttggcgagtgtgcgaattatttcttgtcggtcatccgcaaggcatctaggcgactagaccggtgggactatgaacatgccaacggaccagagaagggaccgcaaacaagaacgagaagaacgccagaaggcaagagaggaagcaatggactttgacggcgatgtagacggaaaggtgtcatctcgaagcagcagaccncgagcccagcgtaacgctaagcgcaacgtcgctcgg

SEQ ID NO: 10803 - DNA, 2181 bp, Emericella nidulans
  unsure (1)..(2181): unsure at all n locations
ttggcacgtcgaggtccacttcaatgctctctacttcgatcatgtcgccaacgacacggggccagaactacggcactgtgaagcaatccaaatctgcccagaacctcggttcgcgctacgccggggtgcgaaagccttctgcgcacgctcacctttgaacctgtcgacattcgccgaggccggtgtgctgagctccgcaaagacggagttgtcgaccatgctgcagccagtcacgacaaactccctagctccgcccactccattgacccccgaggatctgcatcacctgcttcccaccaccccttccaccgatggctactgcctgtccgcgcagccaaccgcccacctcttccccacgacgcaaccaatgcagatcaacatcgcctcgcctcccgctacacctctagggatggatataatgtcctcatacccatatcacagcgtcgcgccgcccatgtccgccccggccaacttcacatcctttccagactacagctgtgacggcagtttccagggaagaaactgggaagccacttcgatgccatctccggaagtccccttccagagccaatgccaccaaatgaatttctcatcgatcccgtacgatcacgccctagaccaaagccagtctgagaacgggccctctcagtctccatttggcgacgcagatatacaagcgcctggtgatgccagcaaggccaccgaatttcatctgtatgagttcccagaccaagaagaagcgcaccggttcgtggcccagcagctacccaaccagaagcccaaagcgtacactttcgccgacaaccggacccccaccaatttcggctaagggactctgtctcttatattttatctttgtacactttcataaaaggctttgtcatatatactcttggattaggcatcgttggattcaagcattctctggtgtggttattggtcattggtgttgggttggtttcatttctgcatgttttgaagcgttgggttggacatactaagattttttacgtatatttaccatactatactaatacataatctaaacgacttactggactacttcatctcttttcggagcttctactactttgacaaagctagtagtggacttaatctatcgagcaggccttggcctcccacgtggtgagccacacccgcctgtatggcttcgtctcgggactattccaagcctaccgtctagctcaggcaccagcaaccttcaatcaggatcaacggcaaaacatactaaaaaagcactaggtataaatcaagcatcgtgcgcacccctcagcttccatctcctccttcaacaccagggtaggcataatcctaggagcaatatttattatcgagatgaagctctcaactctcaccacaacactggcgataagcgccgcatcagcatcaacatctgtagccgccaaattcatcaactacaccaccgtcccgggctacttcatccaagatgacccttccaccgacccctctacgttcgactacgtacgtcctagactgattcttccaacaaaacccttcaaccctacttcgcaccccatacgtactgacaaggaaaataacagacatcccacaacttcggcctcctcgaccgcccctatgacgccgacaccatgttccattcttcaaaaacgcaaaaccaaacccagtggcagcgcttccacgctcaactccagtacctaaacgctcaggcccccgcacatgtgcaatataagcttctctttctcggccgacacggccagggctggcataacgccgcagaggactactacggcacgcctgcttggaatgtacgcacaaccctaattctcatgcccttttctctttcccatcccttgtccacgaaccctgcgcctccggtggaagaagagaagctaatatgcaaggcacctatgtatagtgctactggtcccttctccgcggcaacggcacgaacacctggttcgacgcggacctcacaccgacggggatcgcacaagcccaggttgcacgggactactggcttgcacagtacaaagagcagaaaatccacttcccagatgtgtattatagcagtccaatgacgcgcgcgctgaagncagcaaacntaactttcggtgcgctgcaattgtcacagattcatgcaacgccattcgtgcgctcgtgtatagagagaaaccgcga

SEQ ID NO: 10804 - DNA, 922 bp, Emericella nidulans
gagaaagcagaaatccagtgccatctggtcaacttgttcttttgtttgcagctcaggaagcttggccaaaagcgcatccacctgggctccaacggtcttgctcgcaatcgccatagactgatcatcagcttcggtagtcctttcctccgaaatctggctctgaggctcggttttctcactggactcgtggccagcttcactttccttcttcttggtcggttcgccggtctcggtcttcttcttctttccgtcatccagcaaaacagctgggactttgccttttaagtcgacaagattctcgtagaagcgtctctcctcttcatcctcccaaattccaggcccttctccttgaccccggaggtactccgaggtcttgacgagaccaataccgccgcttgctgccggatctgaagcttcttgtgtagctaaagcaggcatctctacacccaggatctcgcaaaggacttgcgtattcgcaaccaacttctccagcgacttggtctgcctctcaaaatttgcctgccgatcttcgaaaatctcaccactctttacgtaggcttccgcattgcgcctgctctgtgcagtgagcgccttttgatcgcgcatgacatgcgccttaacatcttccaggtatcggttcagaatacttttgaaacgaacctggatcttctccggggcaagcggtgtgtcatcttcggccgtagcctcgtcaccattttgagtttcagcaggcatagctgtcgctccgtcagcctcaacagttttccttccctcttcagcggccttcgcgccaagaacatcccagctgaagctcttcgcgaacaataaagccagcggcagattggaatggtcgcgatcatggccgagaagatccttcaagacctccaaagggaacggttctggctccttgtcagccggtcat

SEQ ID NO: 10805 - DNA, 2466 bp, Emericella nidulans
  unsure (1)..(2466): unsure at all n locations
ctctgtagtccagtcagccaatgccgcacaggagaccttgagtgaagccttgtttagtgcctggtccgattccgatcttaagagattcctcgacgagcacggtattcatcttccacagggctccaaacgcaatgagctcattgccttggcacgaaagcantgcgctgctctcgttgaccaagcctcttccgcttcctcttccgtgtcctcaacggcttccgaatacatcggcgctgctacatccagagctggcaacgagtacgcacgtgctactgataacgcaagcttgaagtctcaggaagctttcgatactgccatcaactcctggtctgattcacgcctcaaggccttccttgatgccagaggcgttcccgttccccagaagaacaagcgcgatgagctcctcgctcaagtcagactcaacaagcataaggctgccactggctggtccgcttggacctttgacacctgggacactgaacacctgaagtatgtcactctattttaaaaattggacatgatactaacacaacataggaagtacctctcttctgtaaactcgaaagtcgctcatcgcgccggggttacccgcgacgaactcgttaaggaagcccaagacacgtacgaaaaggccaccaaagccggaggctctcagctcgcttccgcaacttcctacctcaaacaagccaccgccagcgcaaaggacgctacatttgacacctggagtgactcagatcttaagcagtatctcgattcctacggcgtcccagtctaccagggcactgagctgaacgagctccgcgctgcggctcggcgcaacgcccattggttcagatacggcacttccacaccccagggagcactgtacgccaaattcaccggcgctgcacaatggttgttagaccagttgaagattggtgcagcgagcggcagagctcagggccgggaggctgctgagaagttgcaggacaaagcggaaaagaaggcggaggaggttcgatctgaactctgaaggtgatgaagtgaaagctggttgcgtatgattgaacgagcgtcctttttttgtgtacagagggtcttacggcatataattattttcgtgatgttcattccataaccccaattaatggtacagttaaagattgtgcagttttatgacctgttctatgaagatatatcttgatcctgaagtgttaaacaaagtaaccctggaaagttaacgtggaatataattctccaggcatataaatcgttgctcgtaaacttcgctttttataaacggaacgaacacttagaagtatagcaatccaatagcccaagatagcccgttaccttgccagctattatatagatcaccgacttactagcctccacaatgctctgcgtctgtttgcacctaaacccatctttagacttgctgaacccgtcaacgtttcaaaggtccacatacagctaccgcagaaaatatcttcttcaatttatgacttgggcgcctcaggatccccctcggcgagcaactttccaacaacaaggtacttctccaggaacctctcttcccaactttgcagattctccagctggtccgcattcaaatccttaagatcatccaatggacccgacaaatcctccgttaacatctctttatcaaagctctgaaaggccaaaccgcgcgatgcgtcccggccagcaaaattctcgtagggtccaccctacccacgaccacgtcagttctgtacctcgaaaataacgctcatttgctggcggtggagtccaagtaacataccggtccgtaaaagttccttcctggtgtaacatcgaagacgcgtccccgtaccgcgaggtagacgggcttgtcattctcgccgttgaaggggagtagtgtcttgggcgtgaatgtgcggaagacaacgggggcaggggccttagggagcacggcaggtggcttagggcggaattgcgtgtagacgaggaaggcgaaggcagagaagaggatgaggttgatcggggtggcgattgaagccctatataattgaaatgcatatgttaggattggcttgtgatggtgggatggtgccgaggaggtactgacacctctgcttgcggagctgttccctctaatgggccggttagtatacgtcggtctatttcgtgaggaagtgtgggggccgtacctgcggacatgatgggttaagtagtaaagaactgtgatgaactagataacggagaccagatactggaggagagaagatcggaggaagatacgagtttgatggtgtttgcttctcaccgggactatcgcatgtcagtcgccggccgtagcctcgtcggtaatctatgacggcaatgatatcacgtgatgtatactaaagcattctctccaatcaggcaaccgatagatggaatagctcttaatacactagggctcaataatcacaaacttagagctggttaaacaagtcttagctg

SEQ ID NO: 10806 - DNA, 493 bp, Emericella nidulans
agtcacatgtcacgcggtgcgcgggtgagattgccgagcaggccacgaatatcttcggcggaccggtctgacacagacgggcatgggacgcgtcattgagatgttcaaccgcacgtacaagttcgattcgattcttggtgggacggaggagatcctggctgatctaggtgttcgccaggcctacaagtcgttcccaaaggctatgctatgatcctcgacgtattgtaaacgcattgtctgtatataatactttattgtctcacgaataaacctagatatggaatagcagggtagcggaaagtgctttagaaccacccagccaccattgtaggcaaagccatttaaaccacttgcaacctcacttcaactccaatctcaaagcatcatactgcacgtacacgctcgtcggcaacaccgcactctcgtaattcgtccattagtcggcaagctcagcctcagtaaattacttccctcctttaaccaactagctggg

SEQ ID NO: 10807 - DNA, 1540 bp, Emericella nidulans
ccaactcatcgcgtctatatgggttctctacggttcgagcacacccacaccaaaggctctcattctcagccttcctggcatgaccgaggaacgggtagcaagcactgaagctgccctcgtgcgctccacatccgcccgccaacaacgcgctttagttcttgacctcttggagggactaagaggtgtcagcattgccgaacaaggcaaaatattgggatcacgcgaagagcgccgcaaggcgcgcagtgctctccaggaaagatatatgagcaatgaaatggagggtcaacaaacccacaaggtcgatataaatgatgggcctgatctttccggtgttgcggacatgtttggttaagcatggctgcattgcttttgtatattattcattctcagcgtattgtcgcatataatgatctgaagaatagataaacctcctaggactagaaataatttatgcctccattgtgctcataacctcgtctggtctccgatacgcatataccctgatctgagggagacttgcaaacactctcgcaaacgtgcagtacagagtttactgaaagaaaaacaaaataacaaatgttgtgaactagtctgtctttttttgcagacggtatatctacagtgtacattgcttcctgaaccttcaaccttaccatacgattcagtatcgtccgtgtcctccgagaagcgccttctctagtcctcacataatacaactctgaaccttacaccagtgccatgactctcggtcccttagttaatagccttcgccggcgtgtacgcaaatgtaggacgaacgaatctaacagccaccattagcctccgccgcttccatcaacaatattcatctcaacaagcaatgatgatgaagaaattacgcacctgtcagagttgtagaccttcgtctcagagcccaacagctgctgctcacgcgccttgtcagcgtagtaccgacggacctggtcgcggtcttcctcagcctggaggaggggaaggatgtgtagacggccccagatcttctcacgggcgagttcgctggcgcagtttatcagtttctctattctctctgctgtggtaagagtcgaggtatgcatacttttgttctcggataccgtagaagagcttgtagtaaccgtaggccatgaataggtgcatgccaacgagataagtgatgggtcggaagccgcgagcgggaatgttgcgctattcacattgtttgttaacctctcttccccagtctatcgtggaatgtctacggtagaaccgggttcatctcgcgacaagtgggctgcccgtagggaggaaattcatcgggttggcgtaccttgtactgcacttgccggtagcccccggctgggggcatatcctgaggcattttggcgactgacggtatcggcagcggcctacaatcgacgtggaaaggggagggatctcgtaagacagttatgtatgcggtgatgatggagttggcggagaagttgggattatggtcacgtgaagtagttacacctggtaattggtgcatcgggagtttggt

SEQ ID NO: 10808 - DNA, 2845 bp, Emericella nidulans
aacgccgttgcctctccctcccgcaaggaggcttttaatgttatattcagcctcgcaacgatggccgttgcagtcccctacgcctgctcctttgggtctgagctcgcaatcaactcgatcctgggcgactattatgacaagaacttcccgtacatgggccaaacgcagaccggcaagtgggccgctatgttcgggttccttaatattgtctgtcgtccggcaggtggatttctggcggatttcctttaccggaaaacgaacacgccctgggctaagaaactcctcctctcgtttttaggtgttgtcatgggtgcattcatgattgcaatgggtttctcagatccaaagtccgaagcgactatgtttggtcttactgccgggttggccttctttcttgagtcttgcaatggggcaatattttcgcttgtaccacatgttcatccttatgctaatggtgtgtttttcccactttgcgctcaactttgaaaggacattcaactaacagttacagggatcgtctccggcatggtgggtggattcgggaacctcggcggtatcatcttcgccatcatcttccgctatagtcatcacgactacgcgcgcggcatctggattctaggtgttatttccatggccgtgtttatctctgtctcctgggttcggcctgtgccgaaaagtcagatgagggagtagttgaccgtgtgattgggttctcaagaggcgtttgggttcggttttgttctgttttgtttagcgatatgataccatgatatactatagacttgagtgatgattgtgaatgcattttggccatacctgatgtccaccttcatacccgtactctcttttctattatgatatagtttgccgttggaggaactgcataaattccaggcttaactacccactccttcgggctaatactccccgaactgaggggcaacatctaggtctgaggtaacatacatcttcgccctcccttggaccttcactcaaaatatcttcaagccagtttacaaaaaaactttcagtgatcaaccgttaagcgaattaaaagagcaagaaaatggcccgtcgcatcgcccaaattgtgcacctcaagccttccgccgtcgccgcatacaaggaatgccatgcaaatgtttggccagaggtcctgcagcagatcaaggagtgtaatatccgtgattgtgcgtatcctatccattagtttctcgttcgacgggaaacgaggaaatgaatagtgtttgggctaattgttcgatgggacgcggcagattcaatattctttgacaatgagcgcacgctctttgcgacgttcaagtacgtcggggatgactatgagggcgacatggaaaagatgcgtgcaaatccaatggtgcgggagtggtgggctatgacggatgggatgcaggagagtcctatttctggagctgtgagtagtgcggaggggccggggtggtggaaagtcttagaggaggtgttctacacggagtaatagcagaaagaaagctgatcatgtattgtacatagtattgttggtattcttctcaaaggagtttttgaccatggatggtcggaaatatgacagttcagaaggcgtttagtctcgcaatgttctggtcttcaggatgaccggcacctaaagccctcgaaatcatgacagacgtaaaccttcagcagcagtatcgagattaggcaaagtacacgcaagtcatgcaaagatgggtatccttcacgagcgaactgctaaaccgagaaaatgagtacccaaaacgccgtcccgcaatggaaaacaaatgtgtgtcgaaaatcatcataactcatacagtatcagcagcgtgcgctacatcactcagagcctcccggaacatccttcagaatctcccagccgtactcttcctctggcttctcgggctccatgccaagggcattgcggtaggcgcggacctcgttctgtaggccggcaacgatacggatgggaagttcgtcttcctcacagcggaggcgataagcggtgcgaatcatctcggcgcacttcagagtttgcgcatgccagtggtcacggtccaaacggctttccagatgagcatcacgctccgcctggagaagattattgtagtggcgtttttgagccaggtagtgcatattgttgttgtggcagtagttgcgaatctgctccaccataataccgacagccgcctcatactccccaatcagtttggtgttctcgatctgctcatttttcaagatttctaccaaacgtctttccttggcgagcgcgcgttcaagctcggcaatgcgagcacctagttgtgttaatagctgcttccccttatttaaggccagagactcactagagatttccccgttcacctgctgaatattagggctagttccctccgacgcagaacgtttctagaattgtcagcatagctcaatcgaagcagaaaagcgagtaacaaaccataatctcctccgcgctagagacgatactcttagtcatatcacggttgttcttcagcacgtcgctcagttctagtaccatgtcgaataaatggcgcagatccatctgatgtcctgcattcatcggcactccgccgttcatcccagccataccgccgccattgacttgtgggggtggagtagccatgggtgaaggtataggctggcggggaacaccaggtatgttggacggtccagaatttgaattatcgtaactcgagtacattcccgagccagagttgctgccactactactgctcatagacatacttgctgcgtaaaaagcacggttcagttctgccaattgcgactcgtattccttagtatgctggttgaacgc

SEQ ID NO: 10809 - DNA, 471 bp, Emericella nidulans
cgggatattcatctctaactgggaaatagatcgagcttggtactgcctgcggtcgtctctaccgctgctccaccatgaccgttctggatgctggtgactccgacatcctctccagccagtaagcggagggttgggatcgttatgtctgaatgatgaatgttggcggatctgccagatttcatgagattttagatatgacaatataaaaattcaaagccccagcatctgtatacctttaggcaccagtaaaatcagtttagcagcttaagtaaatacagcagaaagcttgcgagtaattatcgacgcatgctgcattgtatcttgaaactctccgacggcctttgtagccttacaaatccgctggatgcgtcatatccgttgcgggcggtgattggcggatattggagaggctagggcttacctagggctttgcacatcgttagcgggagttgattggaaatcaagccaaag

SEQ ID NO: 10810 - DNA, 543 bp, Emericella nidulans
acctcgtgtctgccatggggtatacttccacctaggtttcgactgtgggagctattctactctcatcgtgactactttattcgtttggggctttgcgttcccaagggagatttgtcaggggggtgacggattattacctctaacctggaatgctaatgagacatgattggtaattatatatgcttttgatggccaggcgtaatttatcatatcgaggttagcaccagttcaatataataaacgagcaaatgacttggaataatctcccggaactgagtctaggtataggttagaccttgagattcaggcgcacgaatcttacgtcaacgtcccgttcggtgggttgctgataatctaatatattacatcccgttatgtaagagagatgacagacaaaacggaaaacgctaacccatcagatgaaagcagcacttgaggttgatatatcaaccagtgacatagatacgatgtataagaggagagatatcgatgcagaaatctcggacaagatgagaaggtataaacaggacaagaagaaaggaa

SEQ ID NO: 10811 - DNA, 759 bp, Emericella nidulans
gtactggcccgtgggaactctgtttgccggcatttgagtatgcggtttatgcttttgcccatacgctttggcgcacgcgacagtgatgtattccgtggtcatagttcggagtcggcggagctcaattgcggttgctatggagtcattacatacaggcgggctggtaagaataaaacgtgattttgtagacaagatgccgactgggctgtctaagttcccgaggcctgtttaaccacaaaataacatgagttccccataccgagcggacggtcatattatccccaatctagggtcaaaaacagtggcgattgctcaaccaacgagatccacaaaaaagggctccctatccttttcctccttgttcttcttctcgtcttcgtatttgattatcggcttagcgtccttctctgaatcctccttttcctcatcgtcatgatcgacaaagcaatatggtctctttactcttgatatcgaagtccccacggatgtagtctgcttggaaacctttggggtgtattcggagtgatgaacacgagctttcttagggctactggcagggataccggcatccctacggagtttgcaaatgtgctggcgcagcgcgataacagagcactctgtcgtgggatcagtaaggttagtaaggtactttgatgctcgtcgatggtagtgccataccagggcccatatgggttgctagagctttgtaatcgagaacacctctcacttgggccagaataccgagaagcagctttgaga

SEQ ID NO: 10812 - DNA, 667 bp, Emericella nidulans
ttttctaggatttcatactccttaagagaagtgacatctagcaaagtcgagccatctttctttccgaagaggaaatccgaaatgacatactctgcaaatgatgatgcggaactttccgtggaaaacttccatgttcgtctttgacgatcaatgcattcgcgcaagtacttcatgtccaagtccttgttcatagcatcctttaggacttcgaagaaccgcttctcaacttgagccagcttcttcgtctccacactggtcaaagtgaagcgaatctcgagactaggacggtcttctgtagcgtaataaacagcgcttgcaagctgctccttctcgacaagaatattatccaaaagagacgcagacgaacctgccaggtaaagtagggtaacattaaccgcaccggctatggagctgtcagataacttgcttggagcattgcaaaactttcgaggacttactttgtacagggtcggtgcaatctggacccagaaaccgaatctctagttcgccataagactcgtcctcttctggaaactctaccgttttgaccactgactgtgataaaggaggagcttgctttgaatcgacccaaggccgcttgaagggcgaatccggactgggaatgacatcaagaatggtgtcttcgaatcgatccagcgtttccagc

SEQ ID NO: 10813 - DNA, 2136 bp, Emericella nidulans
catcgccgataagccattttacaaaatcaggtcagcacgtatctcacgtttgagagccgttgcgagaataccattgatggatgggcgttcgtcagtagacgcgggcaagtccgtggacggtgagactggacaggttcacgctggctgggttccaggctgggaggggagggaaacaacgtgactggcggagaggatgggcaattaatcaactggcgagctattttaggaaggagcgaaaatcattggcagtctttaggtctcggaaccgctgcgaatacactgtggcaagttggcaactggctcagccatcgaacaacacataaactatccatcgagaaactgagacaccggtagaacaaatcagaaaagcgatctggctgcgctgatggctttgttattgctcaactgtctaaactgtctaacattgcgtggttgttgctgaacgcgcacacacccgtccaaatctgttcagcgcccatggccacggtctctagatcgctctccgcattcgctacagtatccgtattccgtacggagtaccgtaacaatggatttgacttgaagccaccattaatatttggatttgggaagtgggaatggggcctgaagcccactcgtgctcgtcgcggtcgccccctcccccccaccgacttacgctttttgggattccccggccgtctttctgcggtaggccacaccctgctcgctctaacccattttgttcgcggtattgggcaatggagcacagcatccgatggcaacggccagctggagttatgttgtgcacaattcagtgggcgagaggcaggactctgccaatccaggctgcaagcccgatctcgtcgttccattggactggtatcctgggaactgggcgggtgcatgaggacgagcatcaatcaaaatttcgacatggccgctgtctccagagagagaagagatctgaacagataacatcgcaggaaggcatgttaggcgttatggtttatgacaccatcccgccgaatcagcagatggctggtgtgatggtttgggaaaataaaaaattatttctgtaataataataatataatttatcaggttgagctaaaagtacggctccagtccgagcaatttgtagcacaggcagatcacactcttttatccacagcccgtccatcacctccaccaaccttccactcggcctctctctcatttccctcccccgcgacttcatcttctcttcctatccttatttcagtttgcctttcctttccctttttagacttctgacttccctcgtctttcgtttcctttccttttctactctctgtatttcctcgttcgcttcttctctcatcagtcttccggtgcctcactacaaaggtccctgtccttccttcatacgtctgagagacgagagagactaagcttgaaacaccgtcacgactcgcttccagacttctcaagtgttgtctgatcctcctgcctcaatcattctttacctgagcgcaagagcatccgactaatacattcattgcaccatcctcaatctatatcaacttacgcttactatatctaataatacctgggtcgagagcagcttctgctcttcttacctttcgaccatcatctaatgtgagtgcttctgccagggtccatgtcgggtcaatactaatgcagtacagaatcagtctaggacaatggacgcatacacaatggctcccaacagccaggcacaattcgcatactaccctgccgactcacaaccgaggcctcaatactccagtcatcccgagatgcaatactatggccaggtctcgcccttcacgcatgctcagcagcaatcccaacagccgcactgcattcccgagcactatgctccgacggtcatcaacatgcaccagatggccacggccaacgcattccgcggagctatgaacatgaccccgatcgcctctcctcagccgtcaaacctcaaggcctcgcttgctgtgcaaggttcgcctgctctgatgcccttggacaccaggttcgtcagcaacgactactatgcattcccctccacgcctcctctttccacctccggtagctccgtgagcagcccgccatcgaccaacggtactcttcacaccgcaatgcaagaaaacttttttg

SEQ ID NO: 10814 - DNA, 2412 bp, Emericella nidulans
  unsure (1)..(2412): unsure at all n locations
aaatgacacagcaaggaatattcgttgggagtgtgaaaaagctgacgagttctctttcatgatctaggtcgagccccaggagaagaagaagctccccaagggtcgcgccatgaagcgtctcaagtacactcgtcgtttcgtcacggttaccatgactggtggcaagcgaaaggtacgccgattctgatactctgatactcggtgaaggaagagaagactctggaaacagcctcttggccagttcctctagatttttcattcttctttcctcgaacgacaccactgggaacaacaggcttacacatattttccgttagatgaaccccaaccccggtaactagacataccctagcggaggaacgaaactggtaatcgcggcgggttaaaatgacgatgacgaccacgaaagaagagaaaagcacaatcataaacggcctggacggttattatccgccctttacctagtcagaaaagagttcaatcaatcgacaaacgccgagcacgcgaagacgagagatttcgatccggaaaaggagtggtacggagacggtttgcggtttgcggttggttcttttcattgcatggctagttacttacgggtctcgtatcttcatcatcaaatgggaacttcaacttcgttactgggaattcatattcggccatggtcttctccacaaacagcttcatggctttcatcttccagcagtacatatctagacccggcggcgccatattcggtcttggcggcttgggtatctgtttcgtccttgctctgcctgtgtagttacatgtttcaagccctccatagcgcctgctgctgtaccgcaagacgatccccgacctacttggggtaaatgcgccaagtactcagtcgatggattctgtggctggtatagatgatgtatggttggttccccaataacactcatttgagcaagggtaacctaaccagattgaaagtgtatgtggaatgcctttcatctatgtgtatttctatcccttagcagcgaacactgccagtaagtcttgacatccacaagcctttgagcgccagcagacacgtccggtcacggtcctggaacatggaaaaagcatgaacctagcgccatcgcattgattatcgatatccctaataatagtgagccatttcaagtccggccctcttgaatccacatttcaagtagaacccttcattcgcctcggagcagtcaagaatagtctaagcggacgaacgagttagtagctaaccgaccacgcttccgaaaggaaggactaaccttataacacccaaccttttctgcaacgaaatccaacgcctgaattaccctcaatcccagtttcttcccctgttgtcccttctctacagcaatatcctcaatgtgtcctaccatccccaacgagtgtataaacttgcgctcgacaatcagactccccgtagccacgatcttgtcctgtccgtccacgataacaaggaggtagtattcgtcgttacgggccgagatccagtcataccgcttgttccaggctgcttcatcgatgtcgccgactgtcgtcagaacgcgcagtacgtcgagatacccgcggctgaaatcggagcgctgcacggggcgaatcttgtatccctctgggagagcggaggagacggcaggggagattagggacgtggagaagagaggtgtatcttgagaatgtgaggttgagacggtcattttgactgtagcaggaaatatggtggcttgttgatgagtatatgtgtttcgatattgaggggatgagtcgaggtggcggtgaggaagattgagtttcagactaagtatgtgaacaatgtcaccatacggagtcgtcaggttgaatcgagagtggaagaaaagttactcgggctgtcaacaaagaaggctgaggcggggagatatagggagtctttggccaggaacctgaaaatcaaaggaaggagctgaaccatggtcccacttgagacaccgtggcgcaacttcaagattcaaatttgggatgtagtcgattcagagttatttatttatagatctgatttaaggaggcccagtgtggtaaaaaggcgttcttatagtatactggatctgcaggggaaaaataaaaataaaaaattaaagtgtctatggtttttttttttttttttcgctttggttaattttgaagggattctggagcagtgatgttcttcaggagatggtctaggttaatttccaaaaataactaaggcaaacctaggcttaggaggcaattagaacccaaggaaaaagtcctttctttatacaagtgtgaaatagctaaactcgctacaatgttttataccactttattacgacacctcccaaatctccgcatgctcgncatgcttgtctatttcttctccttagggctcagcatcagctc

SEQ ID NO: 10815 - DNA, 391 bp, Emericella nidulans
ttactaactgatttcggtagcaaaacctgacctgacctaaagtaattttgacaaaacctaccctgagctgacaagagaatgagcataattttaattaccctacttgatgtaattatttatgtttctcttcagaaattcgaaagtatatgattcctgggagatgttcaagatcttgctggggatgttatgaggaacacatggtttggggttcagattaccttcctacaatcagaaaaatctgaattcacaaacatatctagccccaagagtcttggatacgggattctggatctatgaaaaataaagtgaagacactgactttcactacccaagaatgagaaagaataaaggagccacaagattcaagaacattcaatgggtgtttagacta

SEQ ID NO: 10816 - DNA, 519 bp, Emericella nidulans
atatcaaagagcctcgtacgctctatgctcttagagcagcacgtttcctgagtctgacgttgagttgggcattttgtgggcgacgttggaggttggacgagaaatgaagcgggggcatcgtattatcatcggacttggccctgtgttcgactcatgctgccatatgcattcgtatctgcttcctattctctaggacactagccctttgggctatcatggtgggacatgcctacgcctttactgtcttgcccattgatccctcatgtatgacagcaattgtcccctgtccttggatgctactctccatgttggctcacgcgctaaccttacctgcgctgttctgataactgactgcaactgcccattgtgttcgatccttgattggatcacccccttacgtgtctatgtacttcgaagtttttcttcctggtggctattcctgtttatgcctatccgcccttttcgttcctctgggtacttgtcgctttcccaccctctctttgcttcttcttgcaccag

SEQ ID NO: 10817 - DNA, 2198 bp, Emericella nidulans
tcgagatagcgaggtgcgtttagtgtagaacgctaaagaagttgattggcaagaagagttattcaagttaaaaggtagttttctaaaggagcgtcttcatcctgcagtagacctggtgacgtattggatgaatggtgttgacggtccttcgtttagccagcggaaactgtcgtaaccaagtcgcccataaggcgatgaaacaatggcttcagcagtaatggtttatggatgtggcaaatctcggatgttcagctgaataatgctagtagtagtattgccatatcacgctaagggtcgtcgcccatgatgagcgtagtgggcgtggggggtttatgagatctttaaactgggcaactcacaacaagtcgaactttgaagactgcagaatagtggagatggactggctgtccagagaggttagcaaagcagataagctacatatttacaatctagcattgtccttaaggcgcgcagtggtacagagtcatgatcaatccttcgcaagcacgcatatcatcttgaagcattgaaagcccaagtatccatactggtgttgtcagaaggcatgggggtgagactgaacagtgcttgtgggatgtacagtatgttgaaagaaccagtgagaaagagctagatgcccaggaatacagccagctcacacgaagaggtgataattcgcagttcgagtacagtagttcaagatacgcatgtggaagaaaagtgggtttgtgattcacagacttcagctacgggccactgggggctcagtgccagcagcaggcccattattgagttcctgaaggttcgtctcacgtagactcttagaggaaagagaagaactttcactaatcccatcaggcccaagttactctatattcgagagcacgttagctgttgctgatacctatttcctgaggtaaaaaaggataacaacgcaacaagtataaatgatggtggccctgccctcactcagtgtaagcagataatacaaacatatgcatatttaacacatcattgatcctgagctgaacctgaaaggataaagaagagacctagaacgttttaggcctgacatagttgaactactcttttctacttgtactgctatgacttcccttgctgattagtagaatgcccttggagtttgtgcttgaccaatctcaatcagtatagaggccatcccacattgaacccaaggctgacattagtatgattgtaagatttgtgtccgtaactcataaggcattagtcaacatttgttgcatcgcaggcgtgttcgagtcctctctgcggaaaacataagctctaacatcctgtatgctcagtccagcctcagtgctagtcactccggggcctcgagctgaggttgccccgggattgctgctggtttttccactggaagaacctccaggtccgcgcatcctctcccgcagagcctccggcccaataacgaaaaggctcccaacttcaagtagcacgtcgagcatcccactcggagcccgtatctgttcatctatctcccatgacttaagcaggttggcatactgcgtcatgtcctttgtaaccatgagtccaccaggaccattgacaacaaaccgcttgaaatgctcaagaagaaggctgcgagttccaagggcgatttctgagagaagctgcggcaggttggcgccgctagctggtagagagctcacagcaacatcgtgaacccgcgctaggaatgcacatagtgacgcacatgtctttccctcagttagcatagtttccttgtcaggtccagaaaagcggagaacgaaccggtgtctgtaacttctctaaccaagccgtactgtcgccctccttcggccggaaatcatttttcttctgactggacagcagtttgttcacccacatcaatgtaatgtcaatgactttctgctctatcgtgtttattttttcttctatacgaacagttgccaggttggtcttcttttccatctctcgacgaacggtaacgctccctgctgctagaggaataagcagtgtatttatgcacattaccattaagtttgcgatactgatcgagtcacgaaccgcacgtaggaaagcgaaatcaggttcagtccttccggattcttgggttgcggctgcttccaaagcagcatcaagacaaacctctaggtaaccttctcccatgatggataagagaagattcaagaatg

SEQ ID NO: 10818 - DNA, 1219 bp, Emericella nidulans
gtgttggatccataatttgccatctataacccaaacgtctcctaggacccataattcatacccaggttcaatccaggccattagaagggcccgttgttggcaggaggcgatgcaaccccgggaagaaatgcctggcaagccaacaatgatacatttcggagttccaggcgggaacctcgccttgccccccgtattaaccacagagacgttcctcccatcatacctcccatctgtatcatttgccgcctcaagcatggcagccgccagatccaggtacgagatgaacgactcctgctcgtcaaagtcgagtttgtgaccacgctgaatgtcgacgctcaagccggcaggcttgatgaaaatgcttgtgacccaggactcgttcgctcgcagcatctcctctgccttgatcaggtcggcgtagacgttactcgcagctgttttcataatcggtaagaaccacgagggcattttgcggcttaggtgcggatctatcgtcgcggaggagagaaggaccagtttcggcacaactgcattcggttccgctgtacgaatctgcttgagtgcctcgagaaccgtctgcaccgagtcctgactcagtcggcaaccgggaatattgtcgtttgaagtgacggtcaagaagaccgcacgtgtgttgcgtatgcatgcggtgatgagggataagtcggtgatggagccttcaaagatagtcacatttttcgtgtcgttgagttcgggcaagaggtttaagagtttgggcttgtttcgacagtaggcgtttatgtgcatttctgaagatggtggcgagagcagattctggatcagagccgtgccagtattgccggttgcgcccagaacggcgtaagtggccagaggcatttcgattgatgatattcagaatttagtatttcgtaaccaatacggtgccgtgaggattatggttgatggtggttgggtgtttataaagcactcgtatagagagctatggcagtcgggtaccgtagcctaaaccgtcgttttcagacttcaatgtctcaaatatctcaagatacgaactataccgtgctagatgctggatatcaagatctgcagtgcaacctcaacccccggcccccgaaatctcgcagttcatcgagcgtatcgcagtcgcaaaccaaagggttccggttcgacggagtagatataatcaccgacagcccacacccacccgcattatcatatc

SEQ ID NO: 10819 - DNA, 463 bp, Emericella nidulans
gtagatgaactggggagaaaggactttttaggaaaggtgagccggtcataagacaggggatcatggcaaaaacacgatccgggctttggtacattcaattgtccaagcataccagagaccgattcatacacatccctgacggaacgactttgtgctacagaccgtggtataaccccaaacctcagagccgacatctgtgaacgtagacaaggcgcaacacactaaaatatgaccacttaaagctagaccaaaaatactccggctgccccatcaggagcattttgaacgatgacgacgaacccaagactgtagcagtataaccgtatacggactcggatacatatgggcagggaagggaaacactggattgacgcggtaggtgcctgagcggtacgaactggctccctacgtaactttgtcatacctctaccggaaggccaaggccatggacgtttctacaaat

SEQ ID NO: 10820 - DNA, 476 bp, Emericella nidulans
atgagcgctgcccctgactattttttttattggactaccctggctaccaaccagggggacaatagcacctgcttggggtgcttaaagtactacactctatccttgtcggttacctgatatacctactgaagcttcgtctagagcgcagacctctcacgagcatagatggtgtttatccatcacacaatcgcaggaacacaccagactgtgtgctgatcggtgactacggaattaatgcattgacaatccaggcacgttggctgtcatgccgcaagtccacacgccacgatctgtcggaagtaatccattggatgctcggtgaccttgagatgaaacacggagctgctgataatggccttaagggctcgtgaacagccgacaactattatgaccatatactcttgataacagccatggtaggcgcgggcccaaatcaccgatacttcggatagctgagcagcgacttgctggtgcac

SEQ ID NO: 10821 - DNA, 573 bp, Emericella nidulans
tcgtccctcaggtcccttaaaatccaccttattcttatccccgtcgccatgaccatactccccatcatccggactacctccccctctatatttccataaccgcgacaaatcccccaacggcctctgcactatccctccatccattggcaaatcaatcaacttatccatgaacccggattcttcgctaaacatcgtgtctagataatgcatgttcaacaagtgtcccgaaccctcacggatgaagaccggcccatggaagtgattgaaggggggattctggtggctatgctggttgtgaatgtagttcgtcgtcatgtgtgaagacccagacgaattgcttgacctggatgtaaaatgcaagacccctaatctcgacaccaaatcctttgtgttggcgtagtgctccacataccccagagccctacctttctttccctccttcttactcccattcttcgttcgtgatggattcctcaacaccctgccggcacttgcaaacgtataaacctctagttttcttagctcctcatccccaagttcagcatgcaaccaatcgagtatagcagaggcgat

SEQ ID NO: 10822 - DNA, 1950 bp, Emericella nidulans
aagttattcaccgaaaagggttacagcctgagcctgaacaagacttcgctcgaatctgtgtccaacgaggacagggcccttggagttttctctctctctaacttgcccacttggcttgaccgcaatgtgtaccaggacaatctcaaggagctggccaatcatcccgatggctcgggacgtgatgccgaggatcttcctggactcaaggatatgaccgtcaaggccatcgacattctggacacccgtcacagcaaagagggctggttcttgatggctgaagccgccagcattgacaagcagatgcacagtctcgattacgaccgctcacttggtgagctccttgagcttgacgacacagtccgcgctaccatcgaaaggctggacaagctcggtattcttgaagacaccctcgtccttgtcactgctgaccacggccatggatttgatgtcactggctccgtcgacaccgtctaccttgagcaacaggaggatgaccgtgataagcgccgggccgtcggtgtctaccagaattccggcctttcgcagtacactattggtggttctaatgctcttcgatactcagaaggcgttcacttccccgcccgctgggatccccgctacgctatccacgcaggcaccgtcgctttccccgaccaccgcgagaactacaaggtgcacaaggacggccctcgcactcccgcggaggagggcggtgacggcactgtttacgccagctacaaggacgccgtcagcggcttcctgattaacggaacgcttgctctcgatgccgaccagggcgttcactccttgaccgacgtccccgtttatgctcgtggcccttgccaggagctcttcggcggtaccatcaactctatcgacatcttcttcaacatcgccgaatgcctgggcctggctgagaccaagcgtggaaagagcaacggcggcgggggtcaccgcaattccaagcaatagcgactggtttcatgactatgcttcattcaccgcattacttctggcagactgtcgggactgtacattatcttcaatatacatattggtaacaatcaaacgttcatattgtctcacctcgttctccttttcgaacagccatcggataacaaatgtttcggacaactgcatgctcagatagcgaagtaacatcctacactatcaataaaggacgtaacgtaagcaccttgttgcaccttcatagcttgtcaaaagagatactcgatcataacacaaccgtcgcccacaacccgccgcaacccggccgcaacccgccaagaagcccagcattccagagcggacgaaaccttgggccagcatcaagctgtcgagggacttccacgcaaggcggtacggggatgagcacaatctttcaaggtggaaaaatgtagcgacaatcccctggattgggcttgggcgatgccgatcgatggctgggctggactgggctgggccaaatgacgggagcctggcagcacaggcgatggcagagggtggcacaagaatcaggatacgtaactgtcgctgatatctcaggatgccatgtttgcgtcaatgggtgctcgcattcctgcctgcttatctatatacaaacgtacctgaattgatggggggtgatatcatcgtgagaggaatgtacctgggcagagctgacgtagtcacatagccaggccagcaccgggagtcccaggggtatgggactctgggtgtgcctagtattctgcaagagtaaggtaagctgcagggaacgttcaaggacagagtctaaaaaccgtcttcagaaatatgtagtttactagtaactaactcaagttaactcaagttaacccaagttaaaactgccactgacattactaatcacgaggcaatccgcatcccaaacgaacactactcagaggactccgtcctggccactgcttcttgtgtcagtcttcaaacggc

SEQ ID NO: 10823 - DNA, 1119 bp, Emericella nidulans
gaatttaatcatgccatcagctacgttaataagatcaaggtttgttctgccaccattatactgaggtgcatgaagattaacactttaacttcttcctagaatcgattctccagccggccagagatatacaagcagttcctcgagatattacaaacgtatcagcgcgaatcaaagccgattggagatgtatacactcaggtcacccagcttttcaattccgcaccagatttacttgaggatttcaagcaattccttcccgagtctgcagctcatgcgaaacagcaggctgctttgcgtcagcaggcggaggaaaacgcgcccatgagtaatctccgcggtgatcccaattatgcacctggttcccttacttcgcaaacaccgaaccgtgatgtgaagatgcctccgcttggtaacttcaacgtcaaggactcggcgaaggagggcaaaaagcgtagaactgggcctggcgcaccaactctcggtggctcaagcgttggccctgctgggggtgtggatgctgcacggatggtcgactcgcaggcgggacgagggcaagttctgccagcaggcaatgcaaataaggttagttctgcaacattcctttcatatctaagcatctatatggataagacttcgctttcgttctctttctggctgttccattgtcgcggtttgataccgggacgttttacagtggtcaggtctaacacaacctacacctcttccgtttactccgttcgctctgtatcacttttaaatgatctatggagcatgctgattttatccagagagccaaggttcatcacacaaagccttcacaggcagaagctccggtcgtttctcctactcttgtccctgctctccctgagcctgtccagcctacattctctttgacgccgacacaggaagagtttgcctttttcgatcgcgtcaagaagtacattgggaataaacagactttcagcgagttcctcaagttatgcaacctttactcaaccgaccttatcgaccgacatgtgttagttaaacgggccgctggatacattggttcgaatccagaactcatggcctggttcaagcgattcatgcacgttgaggagccggagataagattgttga

SEQ ID NO: 10824 - DNA, 2309 bp, Emericella nidulans
agagaacgttgcatatacgctcatagagctgcaggagcgggtaagcagcatttgtttatttgcgcaaggttcgctgcaaagattagtcaatttgctaagaaatattctcagaacaagcaggctaatgcaatacagcttcgtgccgccaatgccaatggcatctccgaaataggtacagatccttcatctcgcattgcacaaatacgacgagcgacgaaggcttacaactcgcttctgaaatcggagtcaaacctgccgacgccagaatcgccactaccatccctaattgcacttgaggagacatcgcgcataatcgatgaaagtaaagtctcggttttagcaacagcggagaatcttgcgagtgtgcgacaacgtttgaagaccgaggaaaagaacttacacgatgcgcaagcgataagtgatgggttacgaagaagaatagacaatatacggaaagacaagtcagcgagccatgagaaactgccctctgaagttgcgcgagaatgtctggaagaacgacgacggaagaaagacgacctcgacaaagacacggtgcgcatcagggctgcactacatagtttctgtgatgaaacccttgcgtcgctagtagcagcggaagatttgggaggcccggcagttggagatgtagctgaggtttctgaagctacattggccgctgggtacacacgccatggtaaaccgaaaaaaccgaaagccgcagaagaggacaatcatgacaacagtcagcatcggattgatgatatgcttcgtcgccagaccggacagcagagcaaccagccatcaagtaggaaagaagttgcagcgactgaaatacacgaactactcgatgctctactagaggcaggttcgtcctatacatatttaccgcgtgattcagccgcgtccaggtttttagttagggccaaggttgctcaatttcacccacgcgacgctagacggttaaggttgattgatttcgggcgttcattgagtgactaaatcgaatagactattgagggctacagcaagacctccgggataccagcggaggccgccgaaaggatctaagattagtatatttgcatctaactaacctgcaacgccctatataatacctgattggatatcatgttcatgaacgagattcgagccgagcaaaacgcctaaacatgcaatgtgaccaataacagaaacggaagctactcatccgccagtgacatagaattcatcataataagcaatagacgaaagggaaaaccaacaattgttaaatcggcatcatacctatctggcctgtaggttgcttttgtcttcccttggtctcttttcgcgaattggagcggccttgcgagcggctactcgtcttgggtttgcgtgtacccttcgccctttgctttgcaccgccgctctttcgacgaggaggtcgtttgctagtgttcttctgtttctgtgacttggaaatgctagattttggtgaggggtggtactcatcacccgaatcatcctggaatggttgctgagattttgagaaatattcgctggtaatgattgtgtcatcaggctgcaagatatcgtcttcatacataaagacatcatcggcatcgctgaattcatcatcgctaatgttaaccacgttgtgatggttgggatcagggacaacgccatcgacatcatcccccgcctgcttcagttcagacaaacgttgtttggtgtcccgaagtaatttgagtatcttgtcaccgtatcggtgaaacttgtctgggtctatgttgggaatctgaagcatctcccctttatttgcgtctgtattagcaactgttgcaagtttcatccaactcaaccagtctacttttacctgtggggaagaccatgaccatctcacgaagaattgtgtcactgaaaggctggttcctaagccctttatccataaccacctagcggcaggaattagcaacgcctcgacagataacagtgagaaggggaagccgcacctcttggcaatagtttttggcatagaccatgaaatcttccgcaacagctctgtgaagatggtccagttggtcaaaacggtcgccttgggtgatcgcaggtccgggaatgatttttttctttcgctagtctctaccagcaatgcgaaccttctcaaatccatcgctatccacatcggtgtcagactcgtttgctgcagaatctacgtgccggtaacgttccaatccacgtcgatttgctgaccgaactggtgactagacgatggtagattgcggtaagtaattccgcccaacatcaccccgtggtcggcccctaactca

SEQ ID NO: 10825 - DNA, 1324 bp, Emericella nidulans
cctctcccttatattctttatgcattgtcttcatcggtatccctccatactggatgtgcgacccttcgcctagtttcagaccattgagttcgccacatagtgacttcaaaaaggttgaacagccactacctggtcgtcctaggacaatcaagagttcaccgctaccgatcagaccgttgaaatcgtgcagaatgtgtctttcaggagctcgcttgaaaaggagctcgtggaggcgcaatggcgcagtcaacagagagaccacggtatcctggtactgtaaagctgaccccgagccgaatacattgagattttgaaaagtgatcccggtcgacggaggtcgaggggcaccttcctcgtccatgagtttcataatcttacgggcccacttgtaatgattgaactgatcgcttgtgggatcaaatgccggatcctcaagggtcatctcgtcgacagtgtccattcgctcaatgcccttcccggtagtagtggatgccgctgtagaggtccgcctggcaaagttcgaggcaatacgagtcaactcagcccttcctccagggttgatttcgtcaaagaatgtggtgtcatcttgatctatcctcgaattctgtcggctgcgggtctggtactgcacttcctggatcttctcgctctcgtcctggcctgggcgggagctgctgctgagtctcttgctttcagccattgcggtaacagattcggcagcagactgctagaaagtagcgtctatgaataggaccatggatgggaaggacacaatgggtcgttggactctaagctgagctgcgagtgtaggataaaataatcctgagagcaagcaagggcgggactggattaattggatggctgattatcaactgttaggaagaggggtttatatagtatcaataatgcgagagttgtgacaccgggctactgacagctaatccgagggaagctccgtgaaccgtggaagacccgttagatctcagggcactatttgccgatagcacattgtgatgtcacctcagaataacaataaatagaagaagaacacatgccggagggctgcggcggtatagtgtgggctgcgagagaggggccaggatcagagccgatggcatttccggatgcggttcagagcataactctctattcggttgtgctcactgtcacgccccctgaggcaccatggtcaagtacagccccagacacgagagtccagccttatcgcttcgttcatgtacaggggaaaggatcccgattggaatgcaattcacgatgagcctcgaggccaattacagagttacccatcaccaagagctttcat

SEQ ID NO: 10826 - DNA, 1798 bp, Emericella nidulans
gttgtatacaaccaggaggttgacaagcattttgcccatctcacagtggggcaaaccctagagttcgccgccgcagcaaggactccagagcatcgacttcggggcgccagtcggcagcaatctgcgaaatatgttacccaggtagccatggcgatattcggtctctcgcatacatataacaccaagggtaatttgtccgtgcaagcgtatgccttcattttctgatagtcggacagttggcgatgactacatacgaggtgtctcaggcggcgaaaggaaacgagtcaggttggtactcctcaccgagtaataaaataaacactaatcactgatagtcttgcggaaatggcctgtgagtcctcatctccaaccacaattgtaggcctaacactcgaaatttagtgtcaagagcacctatcgcggcttgggacaatagcactagaggtctggactctgcgagtgccctagaattcgtcaagggtaaggcttatatgcagagcgcatacctttctagactcagttgaagctcaccattactatgctagccttgcgaatcgccgcgaacgtgggaggcagttgccatgccgtggcaatttatcaagcctcgcaagcgatctacgacatcttcgataaggccgtcgtcttatacgaagggcgcgagatctactttggaccttgcgataaagcaagggagtattttgttgaaatgggttactattgtccaccacgccagacgacgggtgactttttgacttcggtaacaaacccccaagaacgcaaagcacgagagggcatggagaagcgagtaccgcgaacgcctgaagaatttgagaagtactggaaaaacagtccctacttcgctgagctccagcgagagattgccgaacatttggagcagttccccgtgggaggggaggttgagcaaacctttggccaggcgaagcggtatatacaggcgaagcatgttcgcccaaaaagtccatatgtcatatcgatacctatgcaggtcaagctttgcactattcgagcatatcagaggtatttctcgttcatcggttaatatacatgtcctaacaatctcaggatatggaacgataaaccgtctacgctgacaactgttattgggcgaatcgtcatgtctctcattattggctctatatactatgggtaatatctgtcgctacatgggcaacacactctgactctattaggacccctgacgcttcagccgggtttcaaagcaaaggggcctctctctttttcgcttgtctgtacgtgctcacccttaggaaaggagactatgtctaactttgcctagcatgaatgcactgatcagtatcacggagatcaattcactatacgatcagcggccaatcatcgagaagcaagcctcgtatgcatttgttcatcctttcgccgaggcgttcggtggaatcgtgtcggatattcctgtcaaattcgtggctgctgttgtcttcaacgttatttattactttctggctggattggtaggttcctgcaaaattctaataagagcaaagctaatgagcacagcgctatgaaccttcacagttcttcatcttcttcctctttacatttctaagcacactcgctatgtcagccattttccgcacgttggcagcatcgacaaagactttgtctcaagcaatgtccatggccggagtaatggtattggctattgtgatctacactggcttcgtgattcccacgccccagatgtctgatatcccgtggtttagctggatcagatggattaatccggtttattacacattcg

SEQ ID NO: 10827 - DNA, 1481 bp, Emericella nidulans
ctcgatacacgttcgcttgttgcgcaggtctgatttcagcccaacgaggataattggggtcgtagggcattaatgcaacacctcgggataccactgtcctggttagataatcctagcgcgaaggtcgggggtctaaccttatccataacgttctcaagagatgcaggacaatcaatagcaaaacaaacaaagagaaggtcggtctcgggatatgagagagggcgcaatcggtcgtattcctcctggccagcagtatcccagagcgccaactccacagttttcccagaccttctatgaagcgtttgtgtgatatagttttcaaataccgtcgggacatatttctgcatccgtcagtatcccataattagctcaaaggacgatacgtacttctggaaagtaaccctgcgaataactaatcaacagacaggtcttcccacaacctccgtctcccaccaccacgaacttcttggaataggctggcggctgggtgatatttgtcgcttccgataccctcccactggacatgctgttatctgtactgactgtgccgttgctcactctaacactctggctgcgcattcggttctgccgcggagccactgacggcggaggagtgacgagagaatggcggcgcgacgtcgcataatattggtcatcgtacattgagccagacatgatggcggacggagatttctctggaatgtgccacccaggcgaacggattcgtcaaataatcggcgaaaatacgatgggaagtattgcccgaggctccacagccagcacgttcaagctgcaataattgagaatgcgatacggcgtgttgacgagaaggaggaaaagggttccgacgtcctgaggaatagaaaaaatccaaatgcgacttcaaaacaaagacaagaaagaagcaaagggatggttggcctgctcgctatcttgaataataaggtatggcgactttacgaggagtgaggctgggctggggtctggtctgaaacccccaatagctgtttacaggcggacggctgccatggcaaccttcaacgccgcggctccaaacatgggcgcatttgcgacaatgacctcaattctcagctcccgcctgttacgcctctcagtctagtccaatcgcaataagcgttcctcgatctgctcactatttttagcagattcatcatactttgccgccccggttggctgaggccccttggtcgagtcgtttcgtgagacgcgtatgaattcctggccctcggtctcgcccatctcgagccgccatgatctcatcaccaccccatcacgcccacttgattgcggcatatcttggtcgtccgtgcctgaattcgctccgattctcggttcgatctggggattaagccttccgcgaaccctcactgagtacgcaatcctcaacaagggacctcaaggggccgttttttccttgttttgccgcaaagaggtagagttatacttgaaattggaactga

SEQ ID NO: 10828 - DNA, 125 bp, Emericella nidulans
cacatgcttattacaatcatgctgtgcgtaacatggttcttttaggttgattgggttgggtttgaattgtttgatatacccataggcggtttacagttctggctacccaccccctcaaccgcgtg

SEQ ID NO: 10829 - DNA, 133 bp, Emericella nidulans
cgtgtgctcttgtgctcctcattccaaagcaccggaggttgactctccgcgtcgaccgtcgaccgtactcagttcatgtactcagtgctatcagcgtgtcccctacacgtctctcctgccatccctgcttgca

SEQ ID NO: 10830 - DNA, 1548 bp, Emericella nidulans
agcgcgagtcgcgagaagcagaggtataattacattacccagtaaatcgcatacgtgaggctgacaaccatgacagctcttcagcgcgctatcagagacactcaacaaccacttgaagcttgtggacgagtaagtgttactgtgaaaagagaactgctgcgtcgccctaaccaaattacttacagcgagaaaaatgcgatgacagaagaagcgcataaactcatcaatgcgattcaacaaatggaggagtccctggttgacgagaaagccaatggccagtacagtctcgacaacgatgatcttcaggttacttatcccctcaatcgctgcgtcgccttcctccgagaacaacacagcgcaatcggcaaactacataggcagcgctttgaacaagtgaagagtacgcggttccctaatgctccgttattaaagttgctaacaacatacagaactggtcgaagccctcgagtcatattcgtcccacctcgaaccctccttcgttacactcgagcttcctcccacagctcctggatcttcggttgctccgagcttcgatctctctccaacgtacgtcacggccctcgataacgagtttactagagtgtacgaagaataccaccgccgtcttgagctcgtgaccacaacatgcgaagaaatcatcaagctctgggccgagcttgggacacctcaggcacaaactgattccagtattgttcagcactatcgcgagtcgcccgaacaactaggacttcatgaatcggacttggcaaacttgctcgcgcgtagggagaaactgctggatgaaaagagagggcgcgagcgcaagttgaaagatctcaaacacgccgttgaagggctttgggaacgctttggcgtcgaggaatgtgacagaaaggctttcctcgctgcgaaccgtggctgcggccttcgtactatcaatgagtttgaagaggaactttcccgtctaaacgagttgaagaggcagaacctacaccttttcgtggaggacgcacggtgccggctgcaggagctgtgggacgggttgtattattcggaagaagagatgttggactttacacccgccttctctgatgtttacagcgatgcactcttggaggctcatgaggcggagattgcacgcctagaagctttgaaagaacagcgcgctccgattctgaatttaatcgacaaacatcgaagccttcttgcagaacgagaggctttggctgtttccagccaggacgcgtctcggttgatggctcgcggaaacaagggagaacggcgtgatcccggaaagctactcagagaggagaagatgagaaaaagaatcgccaaggagttgccgaggttgagaccgacccttagaaggaattggagaattccaggacgagtacggacggccgttcctggttcagggagaaagatatctcgatgacctcaccaaagtagctgcgaagcccttcgcacgttccaagacaccttggtcgtcagtacaacaaacgcaacgttcccagtttgtcttgcagtgcattaacgtcccggagcttt

SEQ ID NO: 10831 - DNA, 1843 bp, Emericella nidulans
tctatggttctgatgcactcttgagacgctgtcggtaggatatagaaaggttagtccactacttgtttatcagaagtcagctaatgttatcgaggctaggatgggatcgtcttgtagcattattgcattaaaatattattgagattctcctctgaggaaaatcgatccagaagtctcagctcttagtacacaatatcttgcatatgtgccttgcccgtactgttccatgttcctagagcctcagtcaacaccgcatctatggcacaaatgatgatcggtatgcaggtgtcaatctctaacaaaatcacaccgcgacacaaagtaaacgaccgcagtaactcctgagagtggtctcgaagacttcaattcacttctactcaccacgggaggcacaggcgcgaatccagatgaactaactgcgtaccccccaaggtacccgtaatccctaaaaataagaattcggtctagcctgttaatctattgcgccaacagaacgggaagcacggcctcgtcgatcttgcgctcagcagaaatggcagtagtcaagactgctgtcttcgcaggcagcttgcaacccgaccaacacccctcggaccacctccgagctcccaaaaatgagacattatcccggaggattcaggacaagaggatcaacgtcaatggaatcggagcccttgctagcgtacgccaaaaggagtaatactttcatgaagcctggtagtacagtttacaatagtgcagagtagaagggattgggtggtcaatggtggacccaaatggctgggcccgggacaggtacaatgggattgatacatagtaagcgagccgcgtaatagtgtatcctgtgcatatgctgtgtccgaccgcgatggtaagtccgttcattagacctcgggttgaaattcggatccagacgtgttgatagcgtggttcttgagttggccggccaggaccatcgattccatatagatgggtttatagatgtgtgaatgggtgtgtatggacggatgtgatggatggatgtgatagatgggggttggaattgcctatacagtcggcgtgcattagggttccaatggctcgtgcaacttgggtttgactattgaagctaaggttgaggctgacaaaatgccagtctgacatgatagacgggatcacgttcagctcaaagccgtgctcggggtgcacacgaggcttattcggacaacaaagagtaagggaccgggcgataggggaaccccagagtataagactgctgcagtctgattgatagctgtatgcaagcttatcatcttatcagattggcacgataaggtgtgaggggatgataggtgtcatttgtgcgaggaaatgctgctgcgtatatatttgcatgcacttcgcagtctttatctagagggtatcttacccttctgatataaccaccatttattgaccatggagtgtgttcctggataagtaaaccagcgccgtttacaaggacgggaccgtccttccgagaacgtctgccagagtgttccgtactgtgcctcctgcaaagaatagtataatgattaccgtgagaactgcacgagttgaagacaggcggtagaggatttagctgactcctaaatcctcaacccagcgtttggtatctgaatgatattggaccccttgataacgcctgtatctccgcggagtgccgatcgggcagcaatacgatgactcgggcgttgctggcctctctggaagccgagattggtggcggcggcggaccgatgaagctcgaaatcgcagtccctctcaatggaagcgatcatctaagcctgaataatgaggggcaataagggcagagcttggtttt

SEQ ID NO: 10832 - DNA, 329 bp, Emericella nidulans
gtgtgctcttgtggttcaaagtcatccgttttcgtatcccgctcctctaccccggtttcctattttgtgtccacctcgtgtcttaggcctcggctgagcatgattgactgatacaggcaagagcttgcggctggagtacagtcgcagcccctccagccacactggcgtctccgcatccttcgctgctagcgccgccttctcctcctcatgccttcacgctgcgttctcgaatgtcgatagcctcccctggacccatacgaatacctcagtcgtccttaaatcctgttagtgattgcgtgtgttcggttttggccccgcccccagtggcg

SEQ ID NO: 10833 - DNA, 438 bp, Emericella nidulans
atataaaaagagaatataaactgagggccaacatcttatccacttgcgccacagcagttaccggacgccggatagctgcgctttcggcggtaaggaactgccgaagcttctgtaagctcttagaatacgacgaatcgctgagtgcgtaaagcaaccaggctgatatgagctgacttagcaagtcaaggaaagcattcaatggaatgcaagcttcattaatcctattatctgtgatgtggttgtaggagagctcgaatagcctcggcagccgtggagagctggcggtcttggcattctggaaatttctcgcgactccagatcggatcttcttccccagctcgccggcttcgcggtatttcgtcttcttagcgtccacgtccttatcctcctatgcatccacaactgctaccgttaatctcctagaccgttcgctgtgtt

SEQ ID NO: 10834 - DNA, 488 bp, Emericella nidulans
atgaccacccaccctgactccccctttttttggaccaccctcactaccaaccacccggggggtttccccatatcctccgggggggaaaacaacactctaaccatgcctatttccttatatgcctacagaagcttccaccactcacctatatctcatacacgcacataaagagtctatacactaatcatcgcaggatcacaccccactgtgccatcaactttcactctagaaattattcatctatactccaatcatgtttgacgtcatcccgcatgtactccagccacaaaacttctgaactaatccatttaacggcggacaaacaataagattaaaaactatgctgctgtatacacccctgctgactcgtgaaccaccgaacaaaccttagtgacctcaactactctgaatacgcctctactaagtcggggcgccaatcatatggctatattagtgctatgcttagcacgcgacatacctgctaacat

SEQ ID NO: 10835 - DNA, 2427 bp, Emericella nidulans
ggacttcccattagtcacgcataaatgccttttgaataccctttgcttgtaagctggttactgcgtatgtctggacgaaagtccacgccgtttccgggctcagagcaacttgcactccgtcctaaactagcgcttctggcgcctcttctagcagaaggtgaccaccctttctgccttgtctctgtgggccccttaaaatagtgcaatatatacttgcacggcgcataatcagcggtctcctgccgccgtccaactggcttgcattcctaccacggcatcaactaacaccctcagtccggaccttcgagctctgccctgtaaacttgctctctttcgggttattttgcgaatctaaatgctacgcaacaaagtctgctaagccacgtgaacagcggaatctgccaagagggcggaaacggaataaacacgtgtctcttcctatgtaaattcgacgtcgctgctagagtacaactcctagtggttactccgtaaggttataagcactgtccgacgccgatgccgtgtccgagcccgagtccttccaggcatcacctgtcaagggagtgtcggcacccttgcaaggcctgtttctaggacatcttgttcggctcggtcaatccgcgaacggatatttttggactttggacttcaggaaacccacagtctcagccttagtcttcatgtcagatctggagtgagagctcgaacacccctgacggctggccccaactgccagtccaaaaacagcaccatcgtactcgtatccgtctacaatgtcgatcaatcgtcccacaatcactaggcacctacttagcaattccaactgtactctgtattgccagcttgaattccctaaacagcaagaaaagagaacacgagaacgaactcgagcagaggttaccgatttgacacaaaagttggcaataagaaaaaaaatgacagagaaaaataagaaagggaaaaaaaaaaagggtcaaactcatcttaccacacaccaatcatagccgtccatcatcaaaaacgaatacgaaaggccccaatctggctgacttggcgttcttactgcgtctagcctacgaagagccttccggctttgcttgacaggttcgtctgacttgcacaagcacaggcgcacaggccgacaggcagaagcataagcacacgagggaccggagatacgactcggtcggacggtggttcggtgggacagccggtctatccttcttgtcctaggctgcgatggtgggtttttggcgtggactcgattggggacacacgtaggaggaatataagtactggctgaccccattggtttgctcgtaaggctgacctaccgcagcgaactgggcccattccatcgatagccgttttactttgtttgcccgtacagtagtagctgggtctgactgggctgtgctgcgcccaggtacttgatgtcgacgtcgacaattatacttattagtcttacttttcctcctttataccaatctcattttattacatttcactttcttctccctatttccaattcaagtggctcagatatcgccataaatgagcagatcaaaagacagccttgactcgacctcgaggtaccaccctctcccattcgaccctccttagccatacctcccttgctgcaacatggatattaatcaggtgctatccagtcgaatctcgaagagccagctcttcccgctcgcccaccctccgccgaaatccaagtccgcaccgaacaagtcgccgcgtctccgtctttcctcacggctggtcttgcagatccagcaatcgtcccaatcccgtgcgatcccgattctggagctctaccagccgtccacatttgggaaatcgattgcgctgccagatgggagcaggaaggtgcatgggcgggatatgtatgtgactcagagcgagatgtatacgcacctcaaacggccaagaaagagagatgcggtggatgggtacggaactgggtatggacatgggtatggaaatgcgtatgggcatacgacgaaaccgcgctcggggtctggagggtcacgctcagtgtctgggtcagcgtatagctcggcagccagcagtcgtcccaagtcgagatccagcggggccagttcaggcgatgagggtcagggcgagtgcaaggccaagttcagggctagacggaagagcggaaacgatgccgacggcgaacaagacgatgtcgtcgcgatgatacatacctcacccaagtcaacggccgcagacgcacaactcttctttccccagaacaaccagacctgggaaacgacctcgtccaggcccgggtattatcgattccagagcgatgggagctcggtagtattcgaatgggagaaacgccctccctcgcgctcgcatccttctagtgccgcggagaatgatgacggtgagaggtttgtcctcagtgtg

SEQ ID NO: 10836 - DNA, 394 bp, Emericella nidulans
cgttcaatctccgcagaaatccaggagcatggtatagagccaagaacgctcaaacctcatttttgccttggtcgcttcgtccccagcgtcgtagcgtttcagagcagccctccatgcttttctgagatttggtgcattcgcgagaacgctctctcttgcctcatcactatggaggttatgccagatggatatggaaacaaggggagcgcattccttccgaatcagagtgttctcaagcgattgaaaagcgctaatcataaacgacaatatcgacaggcgggaaaaggtagggagcgattgatcaatgctcatcgaaaggatccggtggaagaggttggagaaatcatcgggacggtctgagaagatttctggagtctgtcagctttggtactgt

SEQ ID NO: 10837 - DNA, 2069 bp, Emericella nidulans
tcgagacttatactcctgcttgataaggtggtggatcgctggccttattctccatcgctatgacttggtctggctggttccgttcttgctctatctcgtcatcacccttcgactcatcttcctctacgtaccaatctcgatctttacacggccggtgcattgggcgtggaagagcactgccagtcgtctcgtcagcatgatcccggagcatttccgcatcccgcttggtgctttagtaactattgctaccattttagtcggctcctttgcgtcagcggaagcccccggtaacaccagggctgaccgtgctgtcagcttattcgggcttctggtatgcatcttctgcctttggctcacctccaggaatcgcagaaaggtcaattggcacactgtcgttgtgggcatgctggtgcaattcatcgttgctttgttcgtgctgcgcacacaggttggttacgatatcttcgatttcatctccatgttggccagagagcttttgggcttcgctcaggaaggtgttgacttcctaacgacaactgattttgagtctggccacccctacttcttagttacggtcatcccggccatcatcttcttcgtctccctcgtccagctcctctactataccggtgtcttgcagtgggccatccgtaagctcgccgtcttctttttctggtccatgcgcgtctctggcgcagaggccgtggtagcagccgcctccccatttatcggacaaggtgaatctgctatgctgatcaagcccttcatcgcgcactgcacgatggccgaaatccaccagatcatgtgctccggctacgcaaccatcgcaggttccgtcctggtctcctacctttccatgggcgtcaacgcgcaggcccttatctcatcctgcgtgatgagtatccctgcatccctcgcgtgttccaaactgcgctggcctgaagaagaagaaaccctaacggccggccgtgtcatcattcccgaagaaaccgaagacagaccagctaacctcctcgacgccttttccaaaggcgcttggctgggtatcaagattgctggcatgattgccgccacactcctttgcatcatctccctcatcggtctcatcgatggactactcacctggtggggccggtacctgaatatcaacaacccaaccctaacgctcgacctgatcgtcggctacatctgctatcccatcgccttcctcctcggcgttagccgcgacggcgacctcctgaaggttggaaagcttattggcctgaagctcgttgctgtacgcacatctatttacctacccaagcaattagtccaaaatcaaactaacaaatatgtttagaacgaatttcgttgcctactcggctcttcagaccgatccccaataccaggatctctcaaaccgcttccgcctcatcgccacctatgcgctcgccggtttcgccaatatcggctctctaggtaaccagatcggtgtgcttgctcagctagcacccagccgtggcggcgatgtttcccgcgttgctgtgagcgccatgcttacgggtgcgatcagcaccttcacgtctgcggcgattgcgggactgttgatccagaatcaggagcagtatatgaccactgctacttcgtaatgctgtgagaatctgtacatttatctgagtcctgtcttgatattttatgttttaccatattctatcgttctttccactcaaccaggagaaaccgtacatcatgctgcagtcagcgggttagtgtgctgtactatcttattatattatcttatcttgatgacgataatcatatttgtcattttgtgttacatcagttctgagtcggtgcggtagttatggagtggtgtgatgggtggtgtttgttaagtttatgatgtgatggtttgatatcaacgtctcttggtaccaagtgttgtatgagctcaaaggttacgatacccaattcagtgacttgattgttttggagtataaccaagcgaagtctcgatcagcttcgaacgatttttggccgttgattacagagtattcatatacacattaaacatatgaggcataacagaa

SEQ ID NO: 10838 - DNA, 1302 bp, Emericella nidulans
ctttagagaagaagaagaagaagaaaataaagctctcgttcgaggagtgatatacatcttccttctttgttgcagactcttgtagatgcgtcgctacctgtactcgggtcatccaagaggttgtagagataaccccacttgccacggggaggcagtagattgtatagtagatgactcattttgacgcttcttgattcggacagttttcgaaaagccaagattttgtgagaagtgaagtcattaatgagcgcgtagtgctaaatgttctggaggtgaaatatttttttctcagcgctgttccagactcagaagcgaccctcacgcgacaagctttcttggactggaaacttcctcgaacctccagcttcgttgctgggcagacgcgccatcttccatcgaaaatgcccgtcgtcagtgtcgaagatctgatccgtctgcagcggaagccggacgatattcgaaatgttcgttgcccctccattatcggccatcccacttcgctcccaaacgacagggacgttcgagcttgccatgctaaccatgtttctttctagatatgtattctagcacatgtcgtacgttgatgtaagaccattatcctattatggctaattctaatatcctgcgcgaatacaggatcatgggaaaacatcgttgacagacagccttattgccacaaatggcatcatctcgcccaagctggcgggcaaaatccgctacctggactcgcgtccagacgagcagctacgcggaattaccatggagtcttctgcgatctctctcttcttctccatgatgcgccgctctgctccagatgcccaacctgaagcaaaggagtacctaatcaatctgattgactccccaggacacatcgacttcagcagtgaagtatcaacagcttcgcgactatgtgatggagcagtcgtcctagttgatgctgtggagggtgtctgtagtcaaacggtcaccgttctacgtcaaacctgggtcgaacagctgaaaccgatcctggtcatcaacaagatggacagactgattactgaattgcaaatgacctctgcggaagcctattctcacctaagcagactcttagaacaggtaaacgccgtcatcggtagcttctaccagggagaacgaatggaggaggatctccagtggcgagagcgtatggaggaacgcgtcaatgccgctgcccaacagaagcaagcacaagatggagaacctgctgaaggaggtgttgatggagcacaatatgtagagcgcgatgatgaagatctctactttgcacctgaaaagaacaac

SEQ ID NO: 10839 - DNA, 1826 bp, Emericella nidulans
  unsure (1)..(1826): unsure at all n locations
ttcgatttcctctcatcgatagcctgtgtcgacggcaatgagtacggtgagtctttgctttttcctttcccccagcaggccaacattggatgccactagactgggcgataacgaattctgcagtgtcaattaacacctcactggacccagggctctggtgaccatgaactctatcttccactgacgagctctagcgattcagacacgcgagtgaccccactccagatcgcaatttgccgtgctctcaggagcgacggagacagttcctatccaatcgcaaaatttactactgtacagctactccgcttatcacgaggcgaactcgagatgaaaaaatccgggacgttccattcgcatgtcttcaataacgtgggtcccgagccagcgtgtctatgcccgtcgcacggagcagcgcagtgacgcagtccctgtcggattctgcacgggcatgaggaactcacgcaagccaaaccatggaccatgatcgacgtcggacggaccattgtccagcttcagatcttcaatttgcgcctgtgatgatcgaccgatgtgactgcgttggacacggtctccggctcgtctggaactctgaaaatcacatatgagagcgaacatggaggtgaactacttcgcctggagtgcctctttaggcagtgtgcctgcatgctacgagtcagtacagtacgctggagttgtagctaggatttcgtggcttcgtcaagtcaagcgaacaagaacgaaaccaaggaatagaccccaacgatgaacgggcgagttttaccgcacccatggttcacgctcaccggccgaaccctagagcgctacggcgcttcttgaaaccgtgacagatgtccatggtccgtcacggacacgcaggctttggtagctggcacgagcccacggcgcatattctcgctagggattaagggagcgcttcgcaaaactatactattcagtagaaatgacttaattctcttttatgtacgtgattcggtaatcgaagacctcgagttatatttaggagctgatgttgaaaataaacttatacatacgtatatctagatatatatatatgaagtcgttatctcttggtgagcaagtacctaccaaatagccatagggttagtcgtagtacaacatatagtcaggtctgtcgcagtaaaggattattgtagagaaagtcccattcatccaatcaacgtacatcatcctatatttaaggctcatactgtccaagacaagtgatgtaccacactgctctgcatgtctccgccacgaggatatccgtacccattttccacacagaacgggacactttgcatcgcgggcctcgatagtagtctcccaccccagtattctgttcagagagtgttaatttcttcggctcccgatattttgtgttattattcaggggaattcctgctgaggctgcccggggaggtctcatataggcctcgtgtgtccatcgagacccaggtccgcgaaacttgactttgggagaagaaaaaggtgaccttaatataaggagactttgtcttttgctctaccagggaccctaaactccgttggagaagttgcaaatccattgcaaccattgcatcgtggtcagatttaagaccgtgaacaagttgaatcgcatcatatcgcgattaactcacctctgcacagtatacaaagtttgcttaattggtttcaatgcaatgccgggatggtgaatgtggaggagtaagaaacaattccacctgcagtaatgcggacggataacttagctnttatgccatcgcaacttattacatagccagataacccgatctgacggctaaagc

SEQ ID NO: 10840 - DNA, 188 bp, Emericella nidulans
gataacatcctcaagcagctctccatcgaccccgcacactaccaagaagcgccaacaaaaggtatccgccagaacctggagctggttacaggcaaaccacatccgagaagccagccattagaacttggtcctattgagagccttcgaatgggaacaacagtggccacaaatgctttgttagaacggaa

SEQ ID NO: 10841 - DNA, 984 bp, Emericella nidulans
tcctaaagttcaattcggaaagttggtgggtggatgaggatggtgacctgtgttatattcgaccatgcctagcatgatacgtagctataagcaccgatgggaacaccaaattggcgcttcgatatcttctagcaatcagattctaccctgcatgtatacaactccctccctcccttccaccttcagaaagaagtaatcaatcaaagacagcccccaagctgacaaggctgaaccgtaaatccggattccctcctttagcctcaacatccaagaaccttctgacccctaactctaacgccctttcactcaaggcatcctcctcatctccaagtacccccctctccaacgggcccctcctccgcccatcaagctcccacagcctcccatcctccccctttacaaatgccacaaaatgcagatccacgtcatcttccgccccaggcgccttggtatcccccaatttcgctgcatcagcatgtgcactctccaacgccttactttcgtacagcagatctgcccgtctgatcggatctagcttctccgcctcttttagcagattctcaagatctgagcctggcagaatatgtttccttgcctcgccatttgacacagcgtgtaggagcccaatcagcccgcacgcgttccgaattgtctgtttgaaccacattacgggctcatttggtccggagcccgtgtactcagggagagagctgtcctcggcgatacgactggattcgtagctttttgagacagggaataccaggaggagagcttgggaagggcgcggcacaagcgcgagaaggtctggctcgtcgatggagaaaacgtctgtgaagcctaggagggagagagaccaagctgatgaacgaggtgtgacattacttcggggtgtttttttgcctcaaaagtagttgagctgccctggtaaatacttagctggacggtgtaacatacccggaggaacgaagctttggtggtttcgga

SEQ ID NO: 10842 - DNA, 1026 bp, Emericella nidulans
gaccgctgacgagtcgttgtcgctgatcgctggttttgtcaggctgtcaggcttgactgtttgctgtcagatgtcatcctccgaggaaaccttaccctgacctgtcagagcttgcactgcgagacattctcgccatctttcgccggcagtctgtcgtgtagatcgcaggattcatattcttcaagcagctcccttcccagtctggtaaggcgctccagtctatcgagcagccaaggatcacccccatagctcagaaaactggagtcggaaccaaagtccccctacaaatcaccgctagcctggaccagaccttggttgtcgctcctgtcgccaacgcagacccgcagtcgatttcagtcacgtgagtgtggcattgttgaagctagatggctgcgtctagccacattgcatcagtttaatttctgcaatgagacatctccaaaaaaggtgttcagtctgaagctcaatttggctcgcctgaccgccacgacagccctgatgactcctaccaggcaagggccgtttgtgactgaggttctgatagactggtcggtgtcattgagtgggccaaccgcggtacgcattcgggccttctccggagtatctcgacactcggaattcgggcaggtgtaggattctccgcctgtctcagacttccgtcctccatcgcaatcgctctccacccctttcttggctgaagaatccttttctgctttttcttcatcgaatctatgagagtcagtggaatggttacatttgtaggtagggcaatctcggtcttacacttctcttacagtttccttacactctaataacccgtttcgaattaggcaacccagagcagatcagctccttgttatggtctcagatcgacttccagaacactcgattcgatcggagcatgcggagccttggctcaagcctgtgagccactctgattctgacgggcccaggctgggccacaaatatacgaggaccaatggggggtgaacggccggggagatccctatagtagtcgtattatcg

SEQ ID NO: 10843 - DNA, 1349 bp, Emericella nidulans
atctcgaggctggctggtccagaggggttctgggcccgcttcttggctggaactgccgagtcttgatgctgggatgagctggtggagaaagcctcggggggagtgcagatgggatttgacatggttctatcgttcttactgttgggatcacacgaatgtttcatcatatgtagtggcgctattgtatagttcctagcgtttaagatggacagattcctgcgggacatggaaccctgccaaatgcgccagattgagctcgccttatcgtaaagctgtttaagtacttatctgtgcatcacgtgtcattatcagcccgcctgtaaacgcagacttctggtccctgactccccggactgcaagcctagtcacatgccatgccgcagtccgaccaattgtacacatacaagcagacacttattcttagcacctgcatgccatgcccttgaacatctccctctcctccgtcttctacctaatccccctctatatcttagtgatctcccccattctgcgccaactgtttccgaacgatccgcaacacggctcatatcaattctacgatgatgaagaggccctcgatgaagatacctcgctggacctcaattcagaagtcctgagccttgatgatggggttaacgtagtatgtcccgacgaaaccgacgcataccgcgtgcatatcctctcgcaggcaccgttggtcatatacatcgagaacttcctctcagctgaagaggcggattacttggttgatgttaggtatgccgcaacatagccacggctctctgcagatatattctgacagttgactctactagtataccaaactacaccccctcgaccttgtactcctcgtccctaacctccgcgaacgatacgtccacaccaaaaactgacgtaacaaaacgtctctctgatcgggctcttctcccacgaacccagacagtccgatgcattgaggctcgcgcgcgctccttccaaggctggaaaccgaacttgtacatcgagcgaatgtgggctcagcggtataacgtgtcgggccactacacgcatcactatgactgggcggggacggcgagaggtcgtgggggcgataggatcagtacatttatggtgtatctgaaggcggagtgcaaaggaggagggacgaatttccccctgttaagaaagccgaaagatagtaaatggtgtgagttcattgaatgtggtgaggctgacgaaggaagaaagggagtgacatttaagccgatcaaagggaacgcggtgttctgggagaatctcagagctgatggaagtgggtggccttagacgtggcatgcggcgttcccggctcaggagggagagagggttgg

SEQ ID NO: 10844 - DNA, 622 bp, Emericella nidulans
tcctctagtaacggacgctactgtacaggaaatgaagcaagatccaataatggagacaagctcaaaagcctcgaacccggtgcaccccgggtttagtcgcgcgaaccgttctcggactctcagttcaagctcgagtgggggatgttgcgactaatgatacgtgctaggcaggcggtcaatgaattgcgtgattgatgggggaagaatggaggggtaaccgcatcgaggggcatggagtccatatcaaggtcctcttatttattttacgagaagcttcctctcactctttgttcccctttcttccgtctcagctcaataccatagttcatcccattcgataccacacactccccaactccctttctgatacatcaacactctcacaatggctgaaggacgcgctgcaccgtgagtcttccctacatagcttcttcccgtgcttgttaactgacaggaaatttatagccttcgtctcggctctactgcccccaacttcactgccgacacctccaacggccctatcactttccacgactacattggtgacagctgggctatcctcttctcccaccccgtaagtggttttgagacaaggagtacaaactgcatattaaccgtcgtc

SEQ ID NO: 10845 - DNA, 594 bp, Emericella nidulans
ttataatgactttaatctgaaaaaggcatattttcaggaccgtcttggggctagtcttttctgacccaggctcagtagtatgtatggttccactatacagatcatcacctcgttgccgggtcagagaagacggacacaaactaaagctccctatgtgtatatatacctcctggcttccaagatttcaaatttttttttatttttttgcttactttaacgaaggccaccgctctctctacaactgcataaacaatgtgcagaaaatactcaccagtttgcgctgacagaatcaatgcattaacaacaccggcattcccagttctacacacaatagagaatttataatctacgctccccatttcctatcagtagcatatccgttgccccgtgaacatgatagattgggaaaactggttgaagggcaatagtaaagaataataatgttgattcaactgctgatgataagatgggtttcctcactagcaatgatgataatgataagtaaccagtttcccaaaaggggaaagactatttgttacattagattggccacatgcttatagtataggcagatggctacattgggtcttattg

SEQ ID NO: 10846 - DNA, 618 bp, Emericella nidulans
ggcgcgaaagtggttatgggctcggcctggtaatttgaaggtgcctatacaggaccaacacagcgaacacatgcaaagacacacgacttgtgttttgtgtgcatttccctggatcccaacagagcgcaagtggatgagctagagtatgtggttatatactatgtgctgacatatagtctggttgcagggtgtcgtgccttgtgggctatgaattatgattgcgactagaagggaaagagctggtggctgttgatagtcagtgactatggagggttattgaccagacgtactactctagagtgactcatgatgacaacttctgattcgagagtacccatgtgcgagagcgagagggactctaaatgtaggggacgacgagagcagttagttgattcgagatacggatagctgactgcaattgatgcatgagcagaggatgaaaacgacaatatacctcgaagtcaacatttaacttaagttccaacacttaaatctacaagaagacggtccatttgaattacttcgggatgattcctacgtggaaactactacatgactgaattacttcggtagagaggacactgcattctacttgagtaaagcgattatgacgttttt

SEQ ID NO: 10847 - DNA, 2004 bp, Emericella nidulans
catcaaggcctggtccaactcctctgtttgactcctttagctcgcaactcttccatcaaaagatagttggagacataccctttatacagcacaaacgtcttattatccgtcattgcccccatccccgtacgaagcaaatccccattcggcaacacaacctccattccgcactgcgactgagaatgctctccgttaggcgtatatccgaatccacgatccatggtatttcccagcactgatccccatccgatcgccgggaccgagggccagagacccaggccgcgccgttggatttcttcatatagatcgaaaaaggacacgccgggctccacgattgcatagccgtattcttcgttaatctcgactatcctgttcattcggtgcaggtcaaggatcacggaccctttgacgacagggcttgatccgccgtacctgtggctaaccgttaactggaccggatacgggtatcatgaagtgaccacgtacccaagattcttccctcttgagacagtccacaggggcactttgtggctgttcgcaagcttcaggagtttctggacatcttccacaccccccgggcgaacagcgccgcttggttggtggagcgtagagaacgagaaggggtcgccgtatgagtcctggttccgaacaccgttgagggcaccatgttcaggagtgcgcgaaacattctcctccccgagcacgcttgcggcatcatcaaagaaccgggtcagcgtctgggcatctggtgtgttgaaccttctctgcggagacatggtggcgtagttcaggaatggtattgccacagcgtaaatcctactctctagggcgggaagggttcaagatatagcctactatgggacgtgtggattatatattctccagccagctgcaaattcttgctgcacggctcaaagtctgctgttgactgggcccccttttcgggagtccgggggttcgtggttatgcggctgctcggggagataaagtgcggcacccaggcgaatggtgaggtgctacagtaggtttggtctcagcctgtatgatatccatgtactttagcagcgaactactgttgcagtcttgttgggcggggcgttcatgatataagatatgttttatccagggcggcaaggggagggtaaggatgaagaaagagagagcatcctgagatctagcccatttgctttagcattatatacacgcaacattcaatgcgtttcggtgggctatgacaaagtatgcgtcgttcttaaaatggacacgcttttctaatgcttatatttgaatggatgataaaacagcgcactagggaaacgcgttccttctactttgactctcggcatggcataatggcatctgggacatttatcgcttctctggacactgattgcatttcgtaagatgtatttcgtttgggacgacctgttcagtggatatgagtattgaatacttgtcaaccagagacctccccttactagtcaacatacagcatcgctcgaccttgccctatcaacgaatatgaattcaatattcctctgggagatcaggaaagcccctaaatgaccataaattcttacaagaacatcacgaccttcaattctcgttgcaggcctcggtcacatgactaatataaaccagtaaccaccccgatagtcctctgtatatatagtggatataatatatacatgcttgacactttctaccccaaccacgtgaaggacacgataatgcttgctggtataatattatcaagggtagtatcattgccgtataccgtccagagaccacatgctaggtgcccttccccaggaccaacgaaatgcaaatactttccgtgctacgtcagggctgactggctatccgagctaactccccggtttccccgtctttcccgtcttacccgggtggaaccggccaccgcctgaattattgggaataaccgaggtgagtaatggcaatgatgacctggtcctgcctgcttggccacagaactcgttgtac

SEQ ID NO: 10848 - DNA, 1217 bp, Emericella nidulans
gcccctatagccggaaagctcgtcctccaacttccgactcgcctcagcgttgtcccttctgactgagaaccctactatcgatattacaactgttgagaacatgcctctgtcgggtctcgacttcccgttacgggcggactcaccatgctcaaacttcagccggtcgcatctgcgtttccattcaccgaatgactttagccaccacggaactgaagtccaccatgaccaccatgacctgtttggcgaccaacaagccaacactcggttctggcagcatgggccgtgggccgccggtgatggaaatactccaaatgaggagaatcgaccgttcttcggccctcatgaacggttgaaacatgactatgcttcgtctgacatctcccttggccgtggcgggcccgggtcgttgcactccgtcgatatggctggctttggcctggacaaccccgacgatctctgtgccgctcttagcccttgactatgactgcttatagacatgccgctgtaactgcatcatcatgtaacgatttataaggattgacgactgcatgacgggcgtttgtatttttgttgtgtccttcgtttctttgcagggattccccgttctcgcttttcgagtcatgactatacctgaccggttgtgattcagctcggggacttgctatgctctcgtgttattattgctatgttccctcaccctacaccctacatacagccgattttcgaggataggcagcaccggtgatgggagagccgatcagatggcagccacgctccaaagctctccacccaacctcacaccgcacgacatctcaacgcgtctgcataccttcatcgctgtccaccgtctgcaagtacatattcaaagtcctgggcatattgttgcccttttcggtttccacccttgatctcgacatcctttcttccgtccgacccctctcaaccgtcgccgaaagaaaaacaaccaaaaccaaaagcagagacgatgaacgacaaaaaaatctgttttctctgttctagaggaagaaaaaatgcttgtctcctgtgccatacatttaccccgtttgatacccccaaagccccatgtcccctatcatacccacctggctattcccccatatcacacttgtcatcctcctccacgtctcttttggtttactttctgaagctcgtcccatccctcccgtcctctcccttctcttcaattttggcgctca

SEQ ID NO: 10849 - DNA, 1467 bp, Emericella nidulans
ccagaaagatcgccagcgttacgcaaaacaccgtggaccagtagaaggacaggttaattggatgggaccttcggtgtctcttgcctcggacccatccaacgcctgaggagtgagacacagtaatattaggcgacttagcaaggcagtagtaagcgtgatgcatctcttggacaacaaaagtctgtgaaatagcagttgcgcggtcaattgggactcggggaatgagtctggtcaggaactggtggatttcagtgtgacggtgacgttgctattttgggaacgctccatccgtcagacagtcaagatagcgttcggccgttacattgcacatcttaaaccgatgctagacgtcatcaaggctctttatccgcacttatcagataccagttgcaggtatttggctgtctgaacggtacgtcgtatggccctcaccccctaccgatcaatggcagacggctgatcgtaataaaggatggagacctggtctatcatgtcggtgttacattttacaagcaagaatgctatgaaaagagcaaaacagtggtcatacttcgttaaagaaatagccgcgccggggaatcatgcttgaaataaaaggatttttgctaacacccaacccaggggatctgttgcattaatctcgcagcctgagagctcaatgaagcaagccctgactggcattggctgaatagacacgtccacaaagatagctttttcccataatccagaagctccacaaaacccatccaactacacttaacggtatctccagtagctctgggtgttctggcgcttccaggtgtgtcggcgaccgccagaggtgttgttgtagcggtgacccttgttgataccacgggacttcttgccggtagaggtgagaccacgagcctcgcggtgctatatgagatctacattagcaaatgccccgtacaaacagatatatgagcttccaatataaatgacgacgtaccttgtgaacggcgttgcagatccagttgatgcggggatcgcggcggatggccttgtgctgggggtcgacaaggatgacctcgaagtacttgtaggtggagtcctggttgatccagtaggagttcaggacacgcaggttggcgcaacggcgaccgacacgctcctcagcggtacgagcgagacgacgctggtacttgagctggttaacacccatgttggtgggcttgctaaatgcgaaaacttcaattaacctcctactctctgtgccatatgaagtattcgaggaatgcataccgtagtggcacccttgggaacgggcctcttgcggccaccgcggcgcacacggacacggtagataacatatccctgcttagccttgtaaccgagacgacgggccttgtcgggacgagaaggacgagaagcacggtggatagcgttcagctgacggagctatattgatgcactctcagcaaagtgcaacgagtgtatagcaagaca

SEQ ID NO: 10850 - DNA, 541 bp, Emericella nidulans
tagtgtggcttgtagaaagaacagactttgaattagctagaaactttttaaacatagctgcaccatcagttaacttgggtaagttgtatgacttctctgcatcccatttcttcatctataagagggggtgacaagtacctaccttttagggttatgaggatttgaaataatacataaactgccggtggagaagtaaattggcaaaaccattctagaagtaacttagtatgtaaccaagtctagaaacatataaaacttcggagtgaaatctaagaacttatcctaagagacaagaagacgtgaacaatttggggaatttggggtagagaatgaggggtaggtatttttaatagcaaatatttggaaaaagaaattatctaacaatttggggatactttaagtatattatactctttgataagacagaatgtgatgtggccaatataatgttttttaaagtttctagtgatatcacagaatgcttttatacttttaaaaaagtatataacttttttaaagtatgtaaaacgcgcaatgtttg

SEQ ID NO: 10851 - DNA, 476 bp, Emericella nidulans
caggtcgtcatggaatagttccaatcccctcatatcgtctacaacgaacccaagtcccgccacgtgggaacgatgatggaacaaatccattgctggtccgaaatgatcgaggcgcagatgcacctggacaacgtcgtgggggcgctaacgaagcttttacagactgggtgcatgggttgggaccggtatctacaggccgcctgcaacccatggacagcccggttacttttatgaacgccatcatgcaggccattggctaagggggcccaggatttggggtcttccatcgtcatgatggtatccatgttcacgttgacaggaatgctatcttgccgcaccgcctccaggatatcttcggattgggtagactcaggcccctccggcacggttgcgggatgatcttctcaggcggttacgtttctttggcaacactagaagtcgttggcaggaagaagccgcatcttgttcagtagcac

SEQ ID NO: 10852 - DNA, 425 bp, Emericella nidulans
ataatctatataaactactactagttatattaatatctaaattagaatatatatctttcttaatacctaaactaggtataaatctttatatttagttaattaataatattttttatagaaataagctccctagacagaaatattactagttaagacttatatttataaagattttttattacgttattttataatctaatttagtatagaaaactgtgactctaaataatatataacataaatcaatcccaagatacacctatcttattttaaataattaaaaaactatagcttaaataatttttttaaaatattcaaaagcttatattataattttagtaaaataaagatatagacttattacactatagattaaggcaggtttttaggaccggctaatctatctatacaggtttttgggtagg

SEQ ID NO: 10853 - DNA, 534 bp, Emericella nidulans
tagaaccggttatgagggggatcgcccactttttgagccatgacaacaactgaggagggcgccgtagggggctcggacagcactgcatcgaggccatccacggcgcccgcaagtcaaagcttgcaggtggacggcccagaactggtgcagatagggaggtaagaatgccacaggagccagcgctaggtagctctgacggggaactgcaacgttgtgagaactgagcgagcacacggccctccatgtgcctgttcgtgactggggatgacgccctctgctgtgacatgtacgctgctcgcgcattcggcaaggcattctatatcagctgagctcagagtacgctaatgagacaactacacaggaaccatgcttactggtgatgaaacgggatgagcttgagcgttcaacattttcgtgtacccattatttctggataatgcggaagagagcctcgctgatattgctgacacataaacgctcacgaaagtatacgatgcctgacatgagtggaacgactgagtggcactcagaaca

SEQ ID NO: 10854 - DNA, 377 bp, Emericella nidulans
aagaattaataaatatttaaaaagttttaaaactaaagataaagtcttttctaactaaagatttctattttaattaatatactagattataggttattaaccaggcaagcttaaatattcttttaaataaaattataaactttgctccctagcattctaggaaatcaatagtaaaaatatagtaaatttattaagtaagttttttgatttaatattcttagtaatttggatatttttatcttatttgatattcttaattataatttaaataaaaaaaaaaacccccccccttaataggggtgtatctgtcaatgttctgtaccttttagcatatatataagatagacttgaattatttttaaccataattgagattt

SEQ ID NO: 10855 - DNA, 997 bp, Emericella nidulans
cactcggccacaaggctgaagaatgaggcccaccgacgtcgtctatacggaggatctgcaatatttcttcatatcgtacaattttggtaatgtttattaaatgataacaagatgaagattgcgatgatcgatgacagagggaacacaagggtcgttcaacactccgtcgtgcaaggcattcatcggccgagatcggagcgcaacgaagatccctgggttttttcccaacaatgacttcagactaaagttcgaacttctgacttcaagtctgggcgatgaacctggaaatttctggagcctgctcgagcccagctatagagttggtccgtcgcccaggtgggtttcttatcttggatggcggcctactgcacatgacacttcgcatgaggcaaatctggattacataatacaagaaaccagcatagtccacaggttttgttagtacttactgcaaatgcagatttgagtgcaaatgccaatctggaataattatatcctagtctaactaagcaactaagcaactggcccgacgcccgactccaagctacgcctgtgccccttccatcaccacgacgtaacgttgcccaaatcgtgttcctgttgatgcacaagtcagacctacaaagataaacatgcagtggcagtgatatccacttaccttgagatattcactgcccttttccaggtactcctcgcgcgaaatagatgacttggccagccccgatccagaggcccattgcgctgctcccttccaggcgtccaagattggatccgaggcacgacggacggtcaactgtgcctcgagagggaggcatgcccggaagtcgtttcggaaccgttcatcaaaattttgaaacagagtgttgccgccagtcaaaaagacatcgcgcagtaatctcgcctgttcctccggattcgaaaagcgctgattgacaatgtcggcggcgatctccactatgcctgcctggtcaattccggcaatagaaggcttgaagac

SEQ ID NO: 10856 - DNA, 1660 bp, Emericella nidulans
gatgtaccctagccctatctcagcgttcaagtgctcaatgaggttgagatgcaaactgctctcgacgctttcggagccagatacaagcctctcataatggctaacccgctccttcctcgtcaatattaccgcggttgcgctatcgtcgaactgtggccgaccagctcggccaagcatttgcataacttcgagatccgaatactcctgaccgcagccatcttgccagcttattgtatttttaatgattacgaaatggcatggaaggttaacacccacggcgagtgtcgacgtacaacatatgacactgattttcccctgcagatatccattttcgacgaggtgtcggtcttcggtctcgaggccagcatggtgaaacgcaacgcccgcagcagtggttactatacggcacgcaagtcagcataacagcacgatattaaccactatgagaagggatacctttaagatcggcgtgtttgaccggtagcggcttgttcggtcccttccacatccgtactagacgactggacatagaccacagccgtgcaagttccttcgcagtggagacagtggagttccttgtcgagcagaatatcattatgggctttttagctgagtgggtgccgatgatactagaaagtctatatcatggtgaacacttaataaacgcgaagacaggagctcggccttactttgagttaagcagcttgtcaaatgcgaagttattgccagaaaaatgatagccatagacaaacttctgcagcttcaccgggcgaaactcttctccaaagtgttctctgtgtgccgggacatgttggctagtggcattcctccccaaccacgtcgcaatgtcttcagaattcggaatcgttgcactcaacgcaacgaagcgaacattggacccaatcgatttcatccgcgatacaacagcttccaacgtcgcgccacgggcctctttaagtgtgtgtacttcgtcaataaggaagagcttcacgggctgcatgagtcgaatatggtctttccacttccttgtcatgctatcccatttctctggagtggttacaattatctgcctgttctggacatttcccagctggctatggtccgtatcgccagtgagctctgcgcactgaagaccaagtgcgtggaacttctgattccagtcacggaatctttctgaacagagagatttcgtcggagcctggtaaacaactttgaatttcttatctttgcgaatattgagtagacgacatatcgccagctccatgacgacagtcttaccactccccgttggcgcagctatcaccacgttatcgtcgctcttgtaaatggcatggaagcacttcgattgtacggcattgaaaacagggaagttaaacagtggccggtagttatctggaagctcacgcaccgacaagagcgcaatacctcggtcagacgtaggtacatctttgaacggctcagccaggtcatgggaggtggcagggttagtactggttcgatcatgctgtacctccctatccgtggactgggggtggaagatttcggtcatcttctgcgcttccaaatctcggttcctaaataccgcatccgtttttccggtacgtaccagcgggaaagaagcatatcttgcaccgatatttatacgaaggttatgtattcg

SEQ ID NO: 10857 - DNA, 434 bp, Emericella nidulans
cacaaagatcgtcacaggccgcgaccgatctctcctgaattcctaccggcttattacagccctattctaaacaagtggctccttaagcgccctgagctccgcaacgcgggaaccgtccagaaacgcataggcgtcgctggctgcagaagagccactcccgcctcgaccttccacaatagtcgggtcgaacctcggatcacgagacttaggtacactaggcggttcaatgatggtccgtttccgagaaacagcatatttcgaagattgcactgatggtgcatgtttcgaggtgcggggtggcggcttatcgaccctggatttcgcgctgctatatttcgacgctaatgatgctttgcgctattgctcgcgtgcttcttggatcttagctcggatgacgtccaacggagaagcggtgggtccttcattatctttga

SEQ ID NO: 10858 - DNA, 560 bp, Emericella nidulans
ctcttgcttttatatttggcctcaacatccggtacgtgcgagcttgagacatagtcccagcgtagaccccctgctttcaccaagaagctcattagtctgccctgggccacagtcttttcgcggtttgacaggccgctggacgtagtatcggcgagactgcaaaaggagtacagacgcccgtaaacatctctgtcgttgaaaacccttctccacatgaggccttggcgctcaaatccattttccgctccattctccagtgtgctcgtctggtcgacttctaggagcgcccagagagcatcgaatgccgcctgagcgacacgagttgaggatgtagaaagccaaagttccacaagagatgtgaccagttccggatcgccagcaactatcgcagcatcgcttgggtgatctccgctttgcgcaacaacgtcaatgctagctcgtttataggtggtgacggggctcgaaagccggcaatgaaattgataggagggtcgatggcgcaaaggtcagcaaagctgaaatagacagcggacttgatccaagggtggtgacaggcgtag

SEQ ID NO: 10859 - DNA, 1188 bp, Emericella nidulans
ttaaaaaagatccccttcattagtgataatgaatatataaatgatgaaaggggtaagacaacgtacgagccggcgcagagtactatctccagttaatcaatggtcattggtcgtcggtagaacgagcaggaaaggacttactggtcataaagtacatcataaacggctgatgccaacggtgcgttttttccctgcggagatggttcttgtcctcctcgctcaagtctggaatatcttcaaatattttggggttctgtgccaccagagcgcctttccgaaggtcggggaggatgtgctcgagacctttctctctagcgaactgctcgacatctttcagcaactgctcgcgcgtcaaaacagccaaggggttatgcagcttcgtcttcaaggccgcctcttcatcgccttgcttgatgtcgtgcgcccattcccgcgcaacctcgccatccttcttgcccatgtcgctggagttggacgactcgatatggtaggagtcctggactggagcctccacgccgatatcctcatccttcttacccatggcgatgattatagagaatctagcgtaggaacaggctgggtccacgtgattacgaggggcttggtatgaggctataagcaaatgagaggaaccgacaccccgtggggagtgggttcaaacgtccttttaacgaccagccttcatggccagagcaaaagacgcttcagcccccactccagaagttaaagagatccagatggcagggttacagtgagcgctgatgccgacgccactctccccgcgtattcgatggtctttcgccgcaaccaacagtgctctcgttgcgcgtcatacttccccgtcgggcgcagccaagagctcaggagcacagaggacggcctcaatgcgggtcttggatatctcggtctgcagatgggctgactattagtgtcgcggcctcgtctcggcatatactaactcgggccatgctcttatggaggtgggtttcctatggtagtgcctggacttcaggctcgggttcattcgcagaccacaccaagcacgaacgcccattcctgctgccagttgtaacctgcccagcttcgctgatacctccaagtccaaaagcagtcctatacccctagtgccaaggtttgccgagggcgcaaaataaatggtggcggagagcagtctgggatgagtctcgc

SEQ ID NO: 10860 - DNA, 1107 bp, Emericella nidulans
ggcaaagtaatcgcccattggactggcaataacaaacaacagtgcgctccggggccgcgaaacactaatactcgcatcggtgcctagcaacgtcgggcgcaagtacagggagtgaccaggtaagtgcgggatgaatctcttttcgagatcaacatattttgctagaaactccagtacgccggattcttcgaatgtcggaagagcgagtctagctgcggatctgttgagccgcgccaggttctcctcaggcctgaatagccgcgcgttgccatgcgggtctttatacgctttcatgccctcgaagcaggtgaatgcgtaatggaggacgcatgaggcggggtcgagccgcaggttatcgtagggagtgatttgcgcatcgctccagccttgggttgtggtccattcgagtttgaggatgtggtctgtagcaagtataagtgctacgtactaggaaaaataggtatatacttcgggtctgtgagggatacttgccagtgaaagaccgcccaaattgtaactcggtcgagtcgggcaggggtttgggcgactgggttttctcaatgcgcaaagattggaatcgagatgaatagtggcgcctgacaagtgcaggcaagtgccagcggttcaacagtcgcgccatccagagaagccaacacgctgtgactgtcttctggactggcagtgatcgacagtatttgacagttcagttgcggcattgtccttgttcggcgattggccagatcaatcgagaaaataagcttacctgaaagacttagcgtatccgatcacaccaattatattgtgctgatcatcccgccagtcttgtcatgccggtcgaggcccacgccatccttccatcggtaatttttttttagtctgcttatttttttagcctggcttggctgcacaaagccaatgataaattttatttttctttgtcgttgggggctgaaaacaatgctgcctgggccctgggccctgcttggcccagggctggcgcttacagtacggggccttgatatgtcctacttcaatagtctctgtccgtatagctgccgctagcctccacgattcccgaacccagaccccccgtttcaccttttgttt

SEQ ID NO: 10861 - DNA, 508 bp, Emericella nidulans
aatttcaaatcattaaatctagaaattttatctaaaaataaaaatagataataagttattttataggctatatatattcttttcatataatataatatattaaacctctcagccagcatactacaataaaaatgttattatattatttctaaactttaggaaaatataaaattgttattagtatagctactgtgaaataaaaaataaacttgactaaatctagtaatagattctagagcttcttgataaattatatactatatatctataaaatattattctctattacaacttgataatagccagtcataataggccttaactatttatttttattattatataaactaagtaagccatgaatgattattaatgtattttggtcaataaataggctagaagatcacctttatctaggatgatttaataattttagagatttttttatgtctaatttattacttttatataccttcctagtattaattttcataagaggctattatga

SEQ ID NO: 10862 - DNA, 112 bp, Emericella nidulans
tgtagttggaattaagtgagaaaaaggagagagaaaaaaaggtggtaagttgatgatagagtaagaataatgaaaaaagtaatgatgaaagagatataaattgataatgtga

SEQ ID NO: 10863 - DNA, 920 bp, Emericella nidulans
ctacactccgaatcaacgacagccaatgatttgattagactagtatctgattgagcgctacagcacctgagtacttgatctagttcctgaaaccgaaatctccagcgagctaccccctccctcatccttaataggcatagcaacatacgaggtcgtatagacgccctttccctccgtgtaggagaaagatgcgtacgtctggccatagttctctacatccttgctttgcggccgtcagaagggatcgtataacaataaaaaatagataaatgaaatagaagaaatgactcacaagatttcctgcatgacgctcctatacttgccactcagcccccactcattccccagcttctttagcgcgctctcaaagttccgctcagcgacctcagagctgtccgtgtactggaataacgggacgtagatcttcgtgtcggggattgcctgaccgggggtaatctcaatcgtgtactggatccccgagtaccctgtccggttgagccgctctggcttggaccaggattcgtccatggtggccgcgtcgctctgtggaccttctagctcgttgatcagcaaaggccagaccgatttgagtgtctcgactcgcttgagcgaggtgtcgtcgctgagacggcctcccagcgtgaggacgtcgcggacgactgcgaagctgttgctgctcgtgtgcaggtagcatttgacccgagcgttcttatgtgtccttggatcgaggcagtcaatcccgacgagcgggagcatggcgtcgttggtgcgggttgagagatacctggttcagtcagcttgcatcgcgctaatacagaataatctagagatgtgaagttagagcttacgaagcaatcaggtccatcgctggcactagctcagacccaagtggctgtaatcacgtagagtctttacatgag

SEQ ID NO: 10864 - DNA, 2431 bp, Emericella nidulans
tgagaggaacaatcgctggctgacatgactcgatattaagccttatgaagaaactttggccagctcagagtgtctggatcgatcgaaaatcggaatttctaatctaggtgggggtgagagtgaactacgaacgttgctactgttgtactacgagcaagacggtctgagttgagagcttagagttgagatataaagtctttcccactcatcttttcaacgtgaggctgcgttactttgaccggaatttctgaagacaagctggcctctcaggatacttggtgattgagactccaagactgaaggtacttttcagggctttgaaaagatggagcatcttctcaaaccgcctcgatatgttatcgcaagcatcctttgctcgtgcggggggctactttttgggtaaggtcaagtcccgcgaagcctcgtcgtctacggctaaattatgtgctccggcagcatggataccggaattataggccctgtgacgaccatggacagcttcgtagaagaattcggcaatcgatccgcaacagtacacggtctattagtgtcttcaatcctcatcccggcagctatctcctcgttctttgctggttaccttgcggacaagtttggccgcccgcaaggcattagtatcgggactctgatcttcgggctcggcgcacgcttggaggccggagctgtccacgtctcgatgtttgtcctcgggcgctgcattgagggaatgggtgaggggttgtatttgggcacattggttgtgtatgttgaagccgtcatgttgaatgccagacccctttctgactgcggataggtatatctgcgagatttctcctccaggcgtcagaggagctttgacgactggccctcagttgctgataactctgggcctggtagtaggattcttcacctgctatggaactgcccgaattcagtcctcaatgtcgtggcgaacaccgttcctcattcttgcttgtctctcattactgttttccgcagcggcattcttgtggcttgtgccttctccgaggtggctcactatccacggccgtagagaggaggccaacgtcgtctgggatttgctgggtgttagccatgcagagcgcgagaaaagcgagatagaacaagccagagggtccgtcatccagggtccagtttctcaagaagtggccgtgaccaacgtctcgagtatggatcttactgtggccactccccaagtcgaagataaatccataagacacaagcttttcgacatcttctcgaaagacgttcggtctcgtactgcgctggctgtatttttgatggcaatgcagcagctcagcgggatagatggtgtcctttacgtaagttggcttttccaaggaacttgatcaacagctaattaaatcttctcagtatgctcctttgctcttcgagcaagcagggctcgcatccgcagatgccagcttcttcgcgtccggtgtttcggctcttgtcatttttgcagtgactatcccagccttaatttgggcggataaatggggccgccgccacagcgtcatttacggtggtgtcgtaatcagcctaaccatgttcttaatgggcgctctctatgcgggaaatgcggtgcacagctcagccggtgctggccgctgggttgtcatagtttccatctatatcttcgccgtgatattctcactcagctgggcagttgggatcaagatttatgcggccgagatccaaccacaaagaacccgcgcctcagcaacgagtctggcgcacgggagcaactgggcgacgaattttctggttgctcttacaaccccgattctgctggataagagtagttttggggcttactttctcttcggcggttgttcgttgatcacggcttgtggtttgtgctatctttatgcctgagaccaagggcaggtccttggatgagattgaagacgcgttcaaatccagatcgacgagctcttggtccttcattaaggctgcccggcccatcgccagggggacaccagagagcatccggatgtctggaatataattgctttttccatccttggagatgaaatatcgctaagtgtcggatacttcctggaagttagcttgcggtaagaagtaacagtgcttgacatgatatttagctggaatcctcggcgaaatatgaaacagctgcttgattcaacaggaaaagaatgaagttatgagctccagaagttctactctctagatgggttacactcaagatttatgcattgcggatggtctatttgtcatcaagccttgcatgaagcgcttaacctagttatggataagttagttagctaactatcattacataatcacctctatgcctcaaagaggaaactcatccgcaatttttagatcttttccccttgccgataagaaagaaattgtggtcttctatctcgtctgccatgaacgg

SEQ ID NO: 10865 - DNA, 995 bp, Emericella nidulans
aagaccatcaagggagcgtttgggcagtgttggcctacgataagaacactataatcacaggtaactccgccttgcacggagcacggcacaggtgctaatcagaacccaggttgcgcggacaatataatccgaatattcaattcgtctgggaagctgctcaaacgcattaaagattctcgggacgttgttcgggctctgtgcaaactgccgcctacacatcccactggtgccaacttcgtctctgcaagcaacgacggggtgatccgcctattcacgctgcaaggagatcttgttggtgaacttcacggtcacgagagcttcatctattcactggccgttttaccaacgggtgagctggtcagctccggggaggatcgaacagtacgaatctggaacgaaacgcagtgcgtacaaactatcacccaccctgcgatttctgtctggggtgtcgctgtctgtccagagaacggcgatatcgttacaggggcaagcgatagagttacgcgagttttcactcgggctcccgaaagacaagcgagcgcggaggtgctgcaacagtttgaaacggctgtcagggagtcggcaatccccgcgcagcaggtcggaaaaattaacaaagagaagttgcctggccccgagttcttgcagcagaaatccggcaccaaggacggtcaagtgcagatgatccgcgaagcgaacggcagtgttaccgctcatacatggtcagctgcgttggggagatgggaatcggtcggcactgttgtggattctgccggtagcagcggaaggaagactgaatatctgggtcaggattatgactttgtttttgatgttgacgttgaggacggcaagccccctcttaaactaccctacaatctttcgcagaatccatatgaagcagcgaccaagttcatcggtgacaacgagttaccaatgagttaccttgatcaagtcgctcagttcatcgttcgaaacacccaaggcgcgactatcgg

SEQ ID NO: 10866 - DNA, 1190 bp, Emericella nidulans
ggggcacgtagcgaaataccgtcaaccgaaatagctgattcgaccctgatattccccctcttcttggccggcggcgaggcgacggaggccggggaggtgaaatttgtgcgccagcgactacaactgatgttcgagaagcggcattttcagaatatctcgcgagccttgtcactccttaaggaagtctgggaccgccgcctgaggaggttagatacaccggacagcgatgattcagattggcaaaagatcctcgccagtcaaagctgccgacttctcttaacataggaatcctttgatccagctattatatttcggagcagccttcttggagtagggctttcccccctctccctagggccttgcactttcatttccatggggactcattaggctctcagtgctattattatgacagaaactccgtgctaaatcataaagattttcattttgaaaaacaaataggacttgtctagtcaccgctgaattcctcaatgacatattctattctagttgtctttaaagaattggagtgtttatgacctgaacagggccataatgaatgtaatacttcatcgtgataatgaacaactatcaggagaatgttaaaaggggcaggttcgcgcgaaacttgaccaacctaacatgatgtcttctggcaaataagctgctgcagaggacgaacacctgcttatagtaagtaccacccgttaatcgtaccagcttgactatcagttgacgggactactaggttggccagagcacatggactcctgaatgtctcatctgaaatgaggtcaagcgcgagcggtattgcttaaagttaagaagtagtggcgcacatgcctgtctagcttcaatattgagctggaagaacttccgtatcccagaccattacctgcccatttagccgtgccacggccgggccagcaatgtaaggattaaactcgtcattcgcagttgacgtgtcgaccttttggaaggtaactcaggatatggactcgttaaaacagggaattgaggcttatgctcgtggaacacagatacgtaaacggtcctgtcatggaagcccaccaagagtttttgaggtatccagttgtgtcctaattagcagtagtcggtaagagagtatataaaagaagacaagctccctgatttgtgaccatgtcagagctacgaagtcaaatgattag

SEQ ID NO: 10867 - DNA, 311 bp, Emericella nidulans
actctacaaacgaaatctccatgacaaggggaaatccctccatctctaacagcaacattcacattatgatgttgcagctcgaggaccggcgtcgccgtgaacacccaaatgacggactcgtctcgcacctcttttcaaggctcgccgccatgcttgcaattgaccaggcaaccgagctgtccagacaacatcaattagctcctcccgacgctgctgaggttgaagccaatgcgctcaagcgtgcagctgcattagaatcgtgcaagctctagtggaacgcaataaaaagtatatatgagctacgacacccg

SEQ ID NO: 10868 - DNA, 147 bp, Emericella nidulans
gacgcgggtactgacgtggtcgatgttcttgctggcggactactccctctgcgccagggttacgtacctgtggtcaatcgtggacaacgcgacattgagctcgtgcggcctaatacctacgcgatgaggagcgagacggacttcttt

SEQ ID NO: 10869 - DNA, 558 bp, Emericella nidulans
tctccttgacacattcccacttcacatccgcacaccaaccccacgacgtagacgtacccgacatacgtcaaccccgtctgacagtatccttccttatctctcccaattattcataaagcatctcttactgcatggttcccgcctatctaattcatgttaaacctgcaacagctaatgccagtgtcgcacctgatttctagttacgtgttggaacctcctctacttagctccatcgcggtccgcacctactgattaccaacttcctccgcgtgagggccggcctccccaatgtctagcccgccattcacggtcaaggcggttttcgaatacgtttcggaccacgaggatgaccttaattttaccatcggccagatcataacagttactggtgtggaggatgatgagtggtactatggcgagtacctcagtgagtcggggaacaaggtagaaggcatcttccccaaaaactttgtggagaaatatgaaccccccgctccaccgcggccaacgcgcctcaatagaccgaagaaagaacctgaggctgctgcgccgcctgag

SEQ ID NO: 10870 - DNA, 355 bp, Emericella nidulans
tctctgttgatcgtggacggtggtgcttcttgcggtgtttgagcgagccatcgagaagcagctgatcaaggggtaattgaacactgtaaccattatggccaacatcataaggccgtcttgatgagactaactgcagcttctgatacgcggcatgtatctggctctgccgttatacgacattatcgatagatttgataattcaaccagacatctacgacacaagcggctgcctctggctgacgagatcgatattaacggggacagtgtatatgagcgagcaatcacactgtacgatgacacttgcagacgtgaacccgtggaacatatcccacgtattgtttccctatcagcaaga

SEQ ID NO: 10871 - DNA, 222 bp, Emericella nidulans
gagtcaagggagagtagtctttgcaagtgcagactgggcggatggctggagagggttcgtggacgttagccatagagcagggccaagctgctgttggtaatactttgaagatactgacaggagatgtgcatgtagctaagtcatagtgaatggtgatggtatattgcatgactatccacgtcaaagtaccgcttcaaatcttgatatcgacaggggcgacta

SEQ ID NO: 10872 - DNA, 827 bp, Emericella nidulans
gaacccagggattattcaaagtaaccagcaagctgttgtttctttttcaagcaaacccggtactgagaattgtgtgttccagaatatttgctgccctcgtgcgtctgagttaccacgggatgggcgatcagaactcttgtggctcggaggtgtacccccgcctccgtgagtggcttgtcgatccagtgaatggtgaaggagtgcccactggtcgcaagagtgattgtacaaagttccttaaaagattgataaagtggctgaaccagaggtttaaaaggggccgtggggctggcctgggatcagaggccaaagtaatatttgttagtctggtgcaatcacaggtggcggaggtgccagtcggctgggacacggcagtctgtattagctaggcacttaggtaaggaagatgcgtcgaaaatgcaggagaacactgctgctgctgagctggctaattctttgagttattattatccttactacctcgccgaggggtagaagcacaatcacagtcactgcaggtgcagtagttagtagttagctctatggggtcgggctactggagtgggtttgaatgaccaatgaagacatttacagcatgaaagcaataaaaaactgcctaaactattgaaatgtcaatcaaatgtcatttatctatttaccagatgtgccgcttctcaacgggcttacattgtatctgatatggacgtataagttatagcgctagccaacgctatccaccggctctgcttccccgctgcatcccatgcttatccatcgctcctctgcgcatattggactatcttccttatggagaatggtccgatgct

SEQ ID NO: 10873 - DNA, 1452 bp, Emericella nidulans
taccgactaagacaacctcgtctgcgttcgcgtcggcatcaggttcatcgctcctcacgctcatatcgtcattgccgttgttattgtcgttggtattcatggcagggggaggtggtggtggtggtgttgacgatcgctgtcgttttgttgaagaagtcggtgtatcgtcaggagtgttcgtgttaccgacactgagttcgtctctcttccgtttgaggctaccggtcccttccctcccagtgctaccttcgtcgtctgacatcttcacgtccggtgttccgtcgccctcgctttggccgcctactggcgtcgccagcttgttatctgagctaccttctttggccagtttctccgcttttcgcttctcgtgagcctggtgcttcgcaaccgctttgtcaaagaattctttgcagaatttcttaaccttcttctgctgtttgtcgtcgatcttagtaggatctgtgacccggttgttcttaaaatccgaattgactagcttttttgctacctatgcgcaggttagtgaccgtatgataactggaaatagagaaacccacgtctttcgcgtatcgcttaaggtcgtctttcggaagcttgtgtttgaacttgtcaacgacgtattttatgtggggatacagctatacgcgtcagaatttagaaccacacctttcatggaaggagcttaccgtgttttcgtagagcttcttctgtttctcttcgctgtagctcctccacttttcttgcctgtccttgccctccggcgtgggcttagacggttgcggagtggtaggcgtgccgctcttctccttgggcgtctgttcctttgcgttcatgataccgtcaataatactctgaagtgctttgtccctcgactctttcggcggtggcggcggctgcggcgctggcttcgtgggccgcgtccaggtagtgtctcctcgagctgaatagtaatatgttcggccattggactcggccgcaaaccagccctgtgggagagggtcgaaccgccgtcggaacgttcgaggaccctgatggtgttgatttcttgggccctggccgcctcgtttctgcgctgctggccctcgaggagcttcaattgacctcgaccgtgaccgtgatctagggcgttgctgccgctcatctgagatatcatctcgtcgatgaaactggctgacagtcggagtagcggcattgggatcccgcttcatccgtggaattcgatagccaatttccagagtcgaccagagttgcagcaatacagtcgctttttgctcgactcgttcgtcgccgcagctggtgagtggctgaattgtcgactcaattttggagtcaatgatcttattccgcgtgagacgggggaacttgtccaggatgtccagaatctgtagaacaacgttgaatcatctttccccatgcgagttgtgaattaagatttgatagcctgcattttac

SEQ ID NO: 10874 - DNA, 1425 bp, Emericella nidulans
cccgacaggttggcacgggattgaaatctcaggtttccaaccgggcgactcagtcgtgtcttcggtgccgggcctgtaggtctcatggcggcatacagcgcacaaattcgtggtgcctcacgagtctacgtcgtcgatcgagtgcctgagcgcttaagagccgccgagaagattggcgctgtaccaattgattttacagccggcgatgcggtcgaccagattatcgcagcgaatgggggtgagatggtcgatcggagtgtcgatgcagtgggatatcaggctgtgagtgggacgaaggataatgcgaccgaggtgccgaatattgttcttgagaacatgattcgtgtcacgagggcatgtgggggattagggattccggggctctatgtgcctaggtctgttgtccttctttgcttggagtttggtgtgggtggctgatggtaatcttgtagtgaccccggcgctggtgacactgcaacggcaaagggtatgatcagtctgagctttgggaagctcttcgagaaggtacctcctgacccatctataacctttcagctcacacattctaaccccctatccaatctcagggccttaccctcggcacgggccaatgcaatgtaaaagcgtacaatcgacagctgcgcgacttgatcatcgctggcaaagcaaggcctagcttcgtcgtctcgcatgagattagcctcgatgaggcggaaattgcatatgacaagtttgataagaggattgaaggatataccaaggtcattattcatccgaatggcggatttcaggacaagaggccgccggtcgtgaattcgccgttgtagtttgtgtgagaaatatttgaggtgctggagttgaagttctttagctatatagactgaatgattcttgatgatgtgaatacctatgatgtcgtgagttgccgaggctatatcacacagtgcgtatatctcatagtagagcgttccaggaaaagaaccataagttatcatgtagctaactgcatttatttgcaccccagagtattgaaactaattcaattccggatcccgctcatgtaacaacaaccagacctttagaccgtccatactctatagcgtccgacgagatcctctcacagcccttgacatagacacactccacacttgccttatcctccgctgtttgcgtatccacaagtgctttgatagtaacgcccgtaatttcggtataagacaggttgagaacttttagcgtccgcaacccctcaacaagaacagccaccgttgagtcttcaatccccattatgtgtgcgacgtttagcgtatgcagttgcgagccagctcggagaattgggaagagagatgctgccgtgattcgaaagcagctgtccacgtgcaagacgtccaggggcgcttttgcttctgtaacgaaggcgtgcag

SEQ ID NO: 10875 - DNA, 2405 bp, Emericella nidulans
tatttccgtccccgccgatctggtctttgagcctgtaaatcgagtctagtgcatctacgaggagcattatcgcgcgctgtgaggactcctggaggtcgcggctgccattaaggcagcgtacaacaacacgtgcggagccagcagcttgcgtgagctgcccccgcagggcttggacttcggccatgctccctcctatgcaggttacggtcgtcgcagatatgaatcatgaatagaactgggagggaagaggccgccggggcggaggtgcgggggtaacgtggagaggaagaagtcgtgaacggtgtcagtgtcaggagaaaagagaaaagaggtgataccccagagtgtgccagctacaaaacaggctaagagaataaactaggtaataatgatgtgtctatggcgcggttgacgcctcgatggaaagggcaccaagccaaccaaggggaataagcatactgggatccatatcaaacgctttgctaacattagcgaatggaagggaatgacctgagaccggaagatcacgcagtcactaggcttagtactccgtaccggtacccctcatcaagaaacagcgctttcactcttccgcgtatccaacctgccatgttctgtcattgctgtttacattcaaaatggctttaaattaacccaatctacaatatttcacaagaacaaataggggaataacatggtactgtcctggagatctttcgttgcaacggcgacatgctcttgtccgtgcctgctttaatgtacgtacacagaatctgaggcgaccgaaaaaaaaagaagcaaaaaccaacaacttcacaatgaaaggctattggccttctctgcgtgatagtgaatagcccgcagacgtctcgaacgaagggcagctggagatccaggattggtctgatcagcagctgcggcaacatgccagaccactcttttttagctgttaagcgccgggccagtccacccaatttcaactcacccaatggccgaaacgaacgatccctgtcccaagaatgtgaggcacaagagcacattaacgcccagctatcgatttgtcctaacatcagctaaagagatttgcgctgcgctgcgcgtgagtatgcatgttcacgtccgctcaaggtcattggttttcaattccaaatcatggttacaccgcaagtttcttgattcccttggaaattctgagtttccttattctttacgctggaaaatggtggttgaacgttacgtacacttctatatgggaaagatactggttatcagtgacgcattccaactcccatggatcaaaatgattctggtacggagaaatgcggctgaggtaactgacactcaaggtgaaagatcagttaaatagatgatgacttcgtgcacaaagtgatattctttttgtacaattccaatgtacatacatgttccttcaaatacagcccactttagacaacgagttccagctcaagtccagtgatcattagcagcaaaccaggcgcgagccatctgtttgctcaagatgcgtcaaatctagccatctcttattggtagacggacgggatatgaaaggaagaaagggcagcataaatcaaagtcatcacgtcgttaggtgtaaggctcaatcggacatttgccaaatgaaaagcacagaaacgtcaaaataaaacgataaatggggatataagaggacgagaaacgaattagggggcaggaagaatgaagggtatcaatgctggtagtcgagaatcaaagagaatcaaagggggaaggaagctagaaaggctggccattgaggttgacagaatcgccgccttctcggcctcgtcggagagcttttgcgagcatcagctctctcatccagtcgatgcgctcctgctgcgtctcgacggagaaatggtgtgatttgggcccgcctggcaagaaatgcttgcggtcggtattcgaggcagggatgagggaaaaggcaaacgcccctggttcctggttgttattgacgcgcttcaggacggtctttttgaaagcgttggtcaatctagaggtggatcgcagtgaagaacacgccacggcataatcatctacatcaatacgctccaatgctttggagtcccgaagagcggcctgctcatctggatacatgcacagatgagtgcctcgaagggtgaagtgattctcttcccattcgtggcggatgagcttagaggttttccgcttcttcatccaaccgttgtggatgatgtcattcgcatgtgcagagttggggctgaaagggttattcctgcaatgcggtgctcgaggggtattctcgaggtcttcgagagtatcaattgccggccagcggtgagcgcttcacgacaggaaccatgggcctgaaagatggcccattgacagcagagtgcagtcgacgg

SEQ ID NO: 10876 - DNA, 1269 bp, Emericella nidulans
tatatttccagaacctgcagggcgtaggcttttaacttcatcgacagcactacgccgtacacaagcccttccgcatcagtttattccagccccatccatacagagatgtaaaaggaaacacaaagaaaaatttcccgcggtaaacacgtactcaacatagcgtgcataacagccgcgcagggggtcgtctgctttgaacccgtatcgcgcacgcgcaggtgagtgatcgagttcaggcggaccgggttgaggcgggtcgagacacctttgggaggcatctttgcggctcagactagctcgttcgtataccaggagtaaggaacggagggtaaggataggacgtcgtgctgtacaactggcaatggagctgtagacaggaaaatacggtgctatcggagtaggagtgccaagacctcaaattctacgatagaccgcggaggttgctgacgtaaacattgatggggcgacacaatccgggtctgaatcctggctttcttctaacctctctctctatagaccttttcctgtttgtgcgcgtctactggattcgaaatagatatgacggccaaatgctcggcttcttatagaatcaccaaggctctcgcgcggtacccagcagtccagacccaaacccggcgaggattctcagcggctccccgacggcaagatgcggcaaaagcagccgaaaatgataagcaaccagaggcaagaaatgaagacaaaagagaagagggcgcgatgagtcggcgtctctcagagatggcagagcaagcctttctcgaaggaggtcggtcagcacgcaagaacctctcgcaggcggggttctcggaggagctcaagaaggagcttgaggagagggtagcggcggcgacattcaaaagcgaacatgcggctgcacattctattgttaacatgccagtatgttgtcttaactcacaattcagacggattcgggttcaggattaggtatactgatgtgtattcttaaaggaaagcgccggtcagggaacccgcgacattgctggcgccgcaccctggaccggcacagagagtacacacgatgtgacattgcggatgctcgatgattccaagaaacctctccgcacgccttacaaaatcccccaaccgcaccaaccgggccccatagacactcggctcacacccaagccgccccgccaccctggcctgcgcatcgccgatgcaaaagaacggacagcaacatacaccttgagcaaaagcgaaggggtcaccgaaaccgaacgggaagcc

SEQ ID NO: 10877 - DNA, 110 bp, Emericella nidulans
cagtacaacagatcaactataaaatatataaacaatacgaaagacacaaacaatagagaaacagcaatacaacacacagaataccaacacagcaggaacagcaacaaaac

SEQ ID NO: 10878 - DNA, 519 bp, Emericella nidulans
tataatcacggatgtaagtgtgtggtttttttgaggaaagctcagtgagtagctcctagaaacactagttattaagcaggctgcacgactcgggcattacgaggtggagcttggaccggtgcagggcactgggacatgggagccgatgaaagtcgtgatcatatgcctgccgcgcttctgaagggccatagctctactagatcagcagactggatatcgagctgtcaagcattcgtcaactatatgcagaggaggaaaggcattatcacttgatcaaccggagatggtctactttgacctgatgagacattatcacaaggggaggatttgtcgcatctgagggtggacgagtgtgtcactgttgtgcagcttgcgaaacccataaaacatgaaagactggccctgcataaacagcctttgctttattgctgcggggatgatacacaggcggttgcctggtaaagacccaatattctgaaaggattaggaatattgcaaatgcactggcgccaatccctt

SEQ ID NO: 10879 - DNA, 1367 bp, Emericella nidulans
tccctcccgcctagactccacctcagttgcttctctcttcaccagctataggacagtatcatccccgcagaaaacataataccgctatttatggcaccatggcaaaggctcgagcgcctgattcgttctccattgtggccagtaacttctaccagctgtccggccctactgatgtggatcaggtcttcgaatcttctgtctacgagctgaccttggctgtcggtaccgccgtgctgtggtcttctttgaatgccgagtccagcttggaggtggcttgtgctgcctggcttggagctcctctgttagagcccacctcgactgcgacaaatcttccaagcttccccaagacctttgcaatggtaaccaagattttgctaatattaagagaatttctcgcttctgccccttttggcagaactttgcttgcttttatacaaagcacatcggttgcttgacgatatagcgcaatggacaaataacatactaatactcaagcttaccaagtacaaaggtacaagagtgcctatcttgcaacaaggaccctatattgcgctttatcatggaaatatctgcacgctcaattcgatacggtcaggtaagaaaacaaacttcgcttagacataagggtaacaccaaatgcagggtggcagctttaaagatggacctcacattcagtattagctctactcacttgatcgtttctcgcctgttacacgtacgtttctttttcttctgttgtcaatagaatgctgatatgtatttttatccgaatagggtatcatagtctgatcttctcgttttcgcttattgtttttcagagtgtccgctcatgaaatcggccggtcccgttcatattaagcaattccaaccaatgttcgttttggaggctactggtggctccttttaatttgcttcaagatttgcgaatctgccctgaagcaagtggctaaagatatatgtactggcctttatgggatatttttcggcaacatcatagcactgtcacccagcatgccaggcaagggcaagggggaagcgatataatgaagttaccaaggtagcaggtatcggccatgagctaagtgagacggggttggctgcatttcaacattgaagaatgtttatgtgacttcgagtctgacgccctggattggcttttggagagaatccggtatacattgtcatcactacgtgtccctggcctaatccataatgacctcgtttaacgcggtagtctcagcgagacagtgcgagtcctgttaggcagagagcacgctaagaatattatactgagtcgccgaacattgaatgtaaggatctgcggtgagggctagttcaagctaggcccagtagcattgtcgccgaga

SEQ ID NO: 10880 - DNA, 487 bp, Emericella nidulans
tagttctagaggatcccctagatctttagtttcgagttttcttaattaatattccactaaaccattcaatgacctaacactgagcacactcaaacaactgtcataaacttctgtacagatcaaacaccaagtaagatgtacagagacggcataacttgattatcaaacattctgagagaaagagtgatagataaagtcagcctaacaagaactacaatgccccaaaagagagactaaacaagccttcaccatatgcatcaaatagctatgacaactcagatctatgattctatatgaatagattccaaacatatctgagagtgaaacataaactcagagtaataagaaccataagagacagtataattgtaactttaacctcataacagatcaaagaaagaccaaataagatttcaccataagcatcaaattgcaaattcaacacaaagacattataatgggatttcagacaagagtcaaagcttca

SEQ ID NO: 10881 - DNA, 490 bp, Emericella nidulans
tcatttgctgatatccatgggcggattgtctcagggcatgcaaaagatggagttcaaaatcacaccttcatttcttctccccatctttcttatcttgttttgcttagccgacgagatggaacgctttctcaacagatctgttgtatgcgccgagcagtgcattagcataactgacaaaatcttatgtaattgtggcatacatctgcacaagtcatgcattcagcaccgctaaaaggagaaaagagacgaacctcgtatcgtattcgttcaccattccagttactcaattcctcttgcttgcaggggtccctctctcccgagaagagccttttgagatcatgtatatagccaacttcttccacttgtactcttgttttcctgttcctccccatggcgtgaagcggtgaacaagtaccccaaaaatataaaggtgagggcagcggaactcgtcttactgctttgagaaaatgcgactttggtctggcagtcc

SEQ ID NO: 10882 - DNA, 498 bp, Emericella nidulans
ctagaggatccccgtcgcttcaattcaacgcttattcctaaattcgattttgcgttgtcaaattccttaaatttcgttacaaaggtttgatatttccgatgagatctccagcaaagacgatgccgtcgatgtcaccttcttcagtttccacggagaaatctccacctccgtcagatacttcaatggctatagtagctttcgataactccactactcacttctcttcttctccatcgccgccacattctcttgatcattccagtgaatcggagaaggaagatgcgaaaagtaaacccgagagtagaagaaacaagaatcctggaaaggttgaggaaactccatctccgattgtggtggttcataatcacaatcgctctgtgaaagaagtggttccgacgagaaagagtgcgagagttggttctgggagaagtagtggccaacgatctggagctgtttcggctattttgagaaggtctaggagagaagaggtggtaaagt

SEQ ID NO: 10883 - DNA, 391 bp, Emericella nidulans
aggtcgactctagaggatcccctgcttgaacgataaccagagtaaaatagtagatgattagattattttcaactcttaatttgctaaatattagctgaaatcaaaataattgtctctaactggataacatttagcttttaaatgtttcctatcacactaatcacaatttagactttccacttgtatgtttgtagaggaaaaactttagtttcatttttactatattcctattccttcctacatatttccttatattttttagggaaatttgcatttataactatcaaaaaattataaattgaagaactaacctatgcaaaaaaatacaatgatattaagtgtataaagtgtaataatacaataatatcctcaccaccataactattcacat

SEQ ID NO: 10884 - DNA, 361 bp, Emericella nidulans
  unsure (1)..(361): unsure at all n locations
ccgcactactggcacccacggttcagtgcgggaagccctcagggttcagactcgcttgatcgaaatgtatgaaggccagaacttgtatggagatttcagcttttcaagtttcaattcatggtccagggtcaatggagtttcgttcatacgtttgttatagagaaacaagtaatattctagcttttcgatcatgtactatacgggagagcttttaggcctttttgcaagttgggtggagaaaactcatttctgccttattttttaccaatacgaataatccagtccgaccccgtccggggtcaaaacaagtcaggtgaggaccccnnntntttttttttcttattttaattcttttttaaaa

SEQ ID NO: 10885 - DNA, 577 bp, Emericella nidulans
ggatgtgcttccactcccggcggcggtgcgggaaagacatggttggcagccgtcgtcgccgcagcctgccctacaccatgccctccggtagtggcattcgagttctgatatggcgagcctgcagacccgggtctctgcggctgggaagccggaatcgggggaggtggtgagaccgatcctgacccgttgtctgaaccatgtccctgcacagcccgtttcggaggaacctgagggatcgtagaagacgaatgctgaccctggctttgcatagcagcctgagctgctatcctagacgctgaaagcgtcgcgtcagatgacgaagccgtgggcagggacggctcgaagaacccctgcgagtggtgccgcgagcgcttgtgcaggtccgacgggtagactcgtccagacggctttctgctcgtaggatcatgatgcggcatgaatgaagtcgggggatgccctgggccttgcgctgaggctgaggctgcggctgaagtttcggtgggtggtgtccgaagaacggtacgaggggagtaggacggatccggttagcggtcgaggtcgcggtcctggcgacgtc

SEQ ID NO: 10886 - DNA, 424 bp, Emericella nidulans
gacgacggtgaatttgaacgcgagatgttaatattgcaggccgagggaaccaccagacgtcgagggctcaccaaccgggcggggcttacattagctcatatagggagaagagcaactcgcgctcacgagatacgacgtgttacgacgtacggactgtgaaaacccagggtcacacgagttgattgaactgaggaacattcgagtatgtccagcacacatacatatgaagaggaccgtaccgactgtgacacacaaacatttgcacaatctgcagggagaaaggactccgaagagtgaagattgtgcgcaaatgggcgtatagtagatgatgaactagctcatccactcaccacaagatcagacactgcgaaattgtaaacacatcaagagaaagcaccgagactcttgcgagaggcgcagcaaa

SEQ ID NO: 10887 - DNA, 597 bp, Emericella nidulans
gtcgactctagaggatccccgttgtttattcatcggcaccttgaccttgactaatcgacgtaaagcgtcttggcttctcgtacggcttggtgctgtaatctttctttccttggtcagtggattatggttcagtacagatagtgataatgctccaatggttactgcacctgtgtagggaatcttatttctttttctttctttcgtaattaagtccattttatcagtcggggaagggagggagagtcctgcttcggacctgtgacctgcttcggggcataagtgtattagtgcttctgtgtacgattgtgctgatcagtcgttcgtgcttttgcgataatgtgataactaaaataaagaagaatgtgaaagtatgagttttgtacttgagtgatgtgctactgatcagttgtgtgagggcttttgtttccatagagcgtgtgcgaagtgtggagtttcgtacttgacgtccatcccgtgatcaatgtgctaatcatttcaatattgagactccatcctgcttctgctcctgatcctttgtgctgctaatcagttttgtatgcaaactgctcctttgtgctaatcacagtagaaagtgga

SEQ ID NO: 10888 - DNA, 532 bp, Emericella nidulans
tgcaggtcgactctagaggatcccccagatcggccgagggcttgcagatgaggttggcgttactgatcatgcaagctcaaacctgcgcgaagatgagatgtgcccttccgaagaggagcctgctgtgtgatccctaggtggcactttgcttcttgtttctgttttttttttccctgttgatgtaaacacttatgcctatatggctttatctatattttgaatgaatataatgaagcattttcagacatttcttcttttgagtggcgcttgacttacaaaattcccaagtcaatagtagataataaatttcgcagctgaggtgattggctcaatgccgatatatccgaaatgatcgagttttagcataaattgtctttcaaatttcccgagtcaaaatttgataaggaatttcgttcccaaggtgattggctggaacctgtgtattcgggataattgggtttatagtgacaagaattctcatggttgggattcaatccgattcagtcatttaccagtgtgtagaacgaggtgt

SEQ ID NO: 10889 - DNA, 399 bp, Emericella nidulans
ctgcaggtcgactctagaggatccccatcctgcataagcgctgccatctctggggtaattgtcacttcaattttattagttaaccgtcatacatttacattttaaaattgcgagcacaaacacatgtcatcttgtaatggttaagatcttagagatatatccaatgatcctgacactctacatagatggatgaattgagactagaaatgataaaagattgtgaccataactaataaaatgaagattagacaatgcaatattgttcctaaccgcgatgtcacatgtatggatacgtatatgacagcttcgtaggagatgtccaaaaagcaagggggcagtaatatggtatgaccaatgtcttattgagatatctaccaatcaactccttcagtaagattg

SEQ ID NO: 10890 - DNA, 941 bp, Emericella nidulans
tccatgatgctctcaacggtgtggaccgcaccaggcaatcccagccgttttaccagcagccccggcgcatcgggataaggccacgtccaatttgcaacgacagagacactttcgatggccgactgcagcttttgagcggcatcagtggtgagtgtggtgtcttgaatggcggcgccgatggcccgcagcataagggtcagcggttcggcggcatcgtctcgtcctttggcggcgcggtcgttgatctcgccgacgccgactagaattgggatttctgctgcgataggcattgtgggcgtggttgatcgtgcgacaagccgaaggacgacgaacccatgtgcttgccggcctatttatcccgctgcttgccgaggaagcgcccgtaggaagggagatgcccgtggggactggtcgatgctcaatctcggtactcgggaacgcagcgcggggaatctgcaggctcccccatacttggtctgcattttggtagatgttgttatctgaaaatgaaaataaagttggcaggtgtgttgttagataaatagaaatgacctctagtatgttcgtagcttcggcttaaaattaatatggctcctcaaagtatgtcaccctatctgcagacatgaaggcagatactaagtcctgcagagcaaatcagcaccaatgtcaccgagctcttgggcgtccgacacccagtgctcctggctggcatgtttaatgttgcttcccccaagctcgcagccgccgtgaccaatggcggcggccttggagtgattgggggagtcgcatatactccagagcttctccgcgaagccctgaacgagctcaagagctatctcgtagacccgagtgcgccgttcggagttgacctaatcaaccccaaagtcggcggcggcgcccggaagaccaagtatgtttcatacttcaaataatgagtggac

SEQ ID NO: 10891 - DNA, 499 bp, Emericella nidulans
  unsure (1)..(499): unsure at all n locations
gggcgatgtgaatgttaatttcgacatgtaaggtcgcaccccgagggagccacgagagatagagcggacggtaacgcggaggagcaccaacgcgcccaaaagagagncgnagaacacgcgcgcacaggacggggaacaacaacgccgagacggggaaaacccaggcgngacccaacaaaagcggcgggcagcacacgcaccacgcgccagcgggcggaagagcgaagaggcccgaaccgagcgcccaagccaacagacgcgcaggcggaanggcgaacggaaaacgaaagcgccaacaaancgggaaaaaccacgngaaagncgagggaaagcagaagagcgagaaaccaaaaggccgaaagccgcaaaaagcccgaaaaaacaaaagaagagacccgaggaacggaagagggcagngccagaagggaacaagagcccactaaccaagaacgaggactccaacgacaaagggcgaacaaccggcaaacagggcgaaggc

SEQ ID NO: 10892 - DNA, 598 bp, Emericella nidulans
tagaggatcccctcgggaataacgttgtcggtaaaccgtcggaagaatataccgaccgattttcaacaacgttctgatgcaatgtatgacaataatattcgttagaaaatagtctgaaactatttcagacgaggatccgactatgttccaaccggttttgcaaccaatgttattgttagaaaagcgtatagaaattgtcggaaaatacctcgtcggaaacccgtcggtaatttgtaacacgtttgcgacgacattcagatttccgacgagatagaatcgaccaatctatgtcgtcgaaaattcgtcgaatacggctgtttccatcgttattccgacgatttcgtccattggaaatagcctatctttttgtagtcgatagtattaaacatgtcaaaccaacccgagaagtcgataacctcaaactggaagagataccgcttaagatggcaaaaaagcgaaccacaaactccaaaacgaaatagatcttaatgagagaaaagaaccaaccatagaacatgagcccaaagctaagggcaaaaagaatcgagtccgtctcatcataaaggagagattttccaggatattaaatgacaaacac

SEQ ID NO: 10893 - DNA, 500 bp, Emericella nidulans
gcaggtcgactctagaggatcccccagactgtagaggtgtcatcaaggcgttgagtgatgcaactgtggtagcgacaatggaagaccacgtttcttgtgtaccattatctgaaaacattgaatatatctgggataagttgtatcgtgttgcatacctccaggaacattttagcttccgtaattgcttcaaattggatagagatgcgcgagactcatcctacgatcatgcttcaagcctgtggccttaccaggtgaagaaatccctaagtatttcacgtatcgagcttatggagattccctaactgtcattgtacctcagagctctctttctcaaaatttcttgcgatttaaggcttgcgtcgtggttgaacctctctccaagggcaagggtttttatccattcttgaaggtaaacgttggcttcaatggcaaacagtatcagaaatcattttctaaagatgcagaactggagctttgtaagacggatcatctgtttttct

SEQ ID NO: 10894 - DNA, 526 bp, Emericella nidulans
tgcaggtcgactctagaggatccccgctgaacagattgagttccttcttggaggtctctcggaagattacaagtctgtggtcgaccaaacagagattcgtgacaagcctccaactctcaccgagcttctggagaagctcctcaaccgtgaagccaaactcatgtgtgctgctgcaacaacgccatcgcttcctgccactgctcatgctgcaaactacaaagggaactcgaacaacaatcaatacaacaacaacaatcgcaacaacaaatctcatggtcgcaacaacaacaactggcagcaaaatcaacctcaatagcgacagaaccagtacacaccaaaaccctatcaaggacgctgccaaatctgcagcattcatggacacagcgcacgtcggtgtcctcagctccaaggtagcagctacaactcgcaacagtcaatcccagcctcaccattcacaccgtggcagccacgagcaaatgcagctataggctcacatacaacgccaacaattggttactcgatagtg

SEQ ID NO: 10895 - DNA, 586 bp, Emericella nidulans
ctagaggatcccccctaacaggaaacccttcttgtacataaagatttggagcagaatggttttctcgatgatcttatttatgttctgcaaaccaaaggtgagtatagtagcttgggaaaataattctttttttttattatttggatctatcttccaatctggatttccttacaactgttgttttatatttaatactaaactagagtatttcaaaccataaacactgaaattaagatagtgttttgtttgttgaccgttttcaaagagacttgtctgaagtgtacgtgtcaaattgcaggcgtcactttgtatggtgggccaagagcaagtgcaaaactgaatattccggaaacaaaatcatttcaccacgagtacagttccaaggccgtgcacgttgaaattgtagaagacgtatatggtgctatagatcatattcaccaacatggaaggtaaaattactgcgtgatttcaaatttttcaaaggacctaccgctctgtattccatgcatgtgctgaaagtgtggtcctccattgtcttatcttatgagagcagtgacacactgattgcatagtgacggaagatagt

SEQ ID NO: 10896 - DNA, 1442 bp, Emericella nidulans
ggcaggctgctgaggtgttaggcgcatatgctcagttgaagaaagcccagacggtacattcatgcgaacatcctacatattcggtcttccatatattcggtcgtttcttcctcctctttactcgctggctaattctttcccccttcccgtttgctttttctattttggatttgcttgccttaatactcctgtcttccgcacattgcatgtacactggcaataatagcataacatatatactataaaactggtaagaactctatgagtgtgccttgcacctgtcattttctttttaatcatgcctagctctcttgcatagagaatgacttacgctaagaatatacgtcaatattactggagtacgatgctgaactgaaccctagcaaatacaacagtagaaaaggaagctcggttgtaaggtataggatgctgtatatagctcttgaagacttccctagccacgaatagagatacgttacttatcaattattcacctgaaggaaacttggtaattttaagggtctgccaaaatgtgaactgacctggttaagagaacgctctaccaattctttagatttacaagagacttacgtgctgtgactgagaaaatcctggtacggtgcacaaacataattttctgggaatcgaggtaaagtggcgctaatctatgcatgaatagtcgcagaacaccctgcatgctggattacaccgtttgtatagaaatgctaacaaggatgactcctgcgtgtttggaatgcctagaaaatgaaggaaaagccaactaatataggcttcctcccgtagcatatgctgtatcagctacaacgtagcatactacttagtaggtaatttaattaggttgatgcaaatcggtacaaatgctcaatatgcattggccgcgagtaatgccacgaaggtccctttttcttgatacggacaccttcgtggtacggctcgtattgtgcctgcagaactgccatgcagttgttgtctctggcttgactgcactttggaatgagatcctcgtagggctgaggttgtggttggctaacatgtgggcatgccaacaatgccgcaaaccataattcaaatgccatgacgcatatatttctgttcatagtcgtgaaggacaaaggaaattggctactcgctctgtgcgaatgcagctgcaaatgaccaccagcgagcaagatatatgacaaacaattcagtggaggctggcaaagatggaaatgagggataaccaggaaaaggattttacctgaccagagcaatcacgagtccgaaaaaagcatggatcataccataacacgtctgctgccagtactcgactttattatcgagatgcacaagggcgttacgccagagttttaagccttagcgtaccgtttgtacccttgctttggatagggcctgagatgtttaaggcgtttaaaaagata

SEQ ID NO: 10897 - DNA, 586 bp, Emericella nidulans
tagaggatccccgaaatggtctattcctgcaagagttttggtacattcctccgaaatgctcgatttagaaccaaaaacaatcaaaaaatgtcagagaaaaagcaagttttggtaacaaggatttatctacgcattgataatatcgacaagttagtttactcatattaacaccaaatcatattgtttctgtcgaaagcttaagcttctccaagatctccccatctcacattgtacttagatgcaaggtaatgtgcaccaacaggacctctgcttccatatggatagagctcaggaatgattttcttctcctctagttccttcaaagccggtgtgaatagatcccatgctgcatctagctcatcacttctgataaacaacctcctctctccttcgattgcatcgagaagcagtctttcatatgcatctggtatctctcttggatagctatcaaccccaaaagaatataaataaataatctctataggaaaactagaatcagtagtatgcattgttgtacctggatcgatatagaaggttaaggtcgctgcgatctagtctcattccaagaccaggaactttgttgttg

SEQ ID NO: 10898 - DNA, 1435 bp, Emericella nidulans
cgcttggctgtgagctcttgagcgcgacacgacgcgcgacattcgagcttgagctggggcatcgtgaaaggttgctcccaacgctactaaaattcacaggttgggtatgctaatatcctattgctgtcctatttcagacgcgtccacgagatttacacctcgcatggccaccgctcataccgggtgcagccaaagccgcgtccggatgcaaacgtggtgcgtgcgccttagctgtgggggtgtggctcttatcacagccgtacagagtaattacagatctgcctctcatcatcctcacgccgccttatccgttaagatcgcgtcagggtcaacggcaggcggcgcaagatgctcggccatgcattccagttttctttattgagtcttacagaacacgacattatcacctcttcaaaaataaaaataccaagattactatcgtaaaccgattcgaagttcgaagttctctccgagtccgtcatccttgttttcagaaagggtgcactcgcaaaaagccaaacacgtcactacttcagcctcgaagaacagctgatgggaggggggtgcctttgtaccacaataacaagtctgccattccatggacggccaagcgcttcgagaactacccgttccctcgggaatgaatcacgtttctggtcctccaattccaaagtttcttaatttcggcagttatggcgacatggtcgtcctgataagtgatccttttatttgccatgtgatcggagagaaactaactcccaacagacctgggaaaggactttgcaagaacaagcaccggaaggaagccgttgatgatgtgcccgcactgcagcggatggaatctagccccaggcgcgggacgataagcagacaaaagaacgtgcgtctactcttgtcctatgccgcaacaaaaccaggatggtctcccaagtcccggctcccaacggaccaaccagatggctcctcgttaggcagctttgatgacagtgcatcgacaatgaggcagcctgaggaaacccatgttagaccctgctatgagacgttgtacaggtccgattccatgggataatgcgcgattgcgatgccgatcgttccagctgaaattccttttgaccaccaatcatcttgtgcaatggggtgtttagggcgtcgcgaagatcgcgggacattaggcgcataaccggattggctcatcgattatttctgccgacgaagaaggggggagcacggcatagcccataatcatgtccaaggccaccgtccaggtacgagtcatcatagtcacgctccagcggggcttttttctagctgatatacttccgcgtaatgcccaggcatgcggctgagtcgcatcgtgacaacattttgtcatgaggatcttgccggggcgtccacaaggcaacatcgtcagtcatccacatttgtatcaaatata

SEQ ID NO: 10899 - DNA, 846 bp, Emericella nidulans
aatcaaactggttacattctggaacctgcaccggcagctctctgtctttctaggccgttggctgcgtcaaagatactgtaaacgggatgaatgaaatgcgtgaagctaggccgcaatcagattcacgagactaattgaatggtgatactaaggacgaatgcaatatcccagtgcaagtaaaccgcctatcccgacccatatcgatacaaacaccataacaccaggctagctgcatagatcaaatcaaataggtatcaataaaggatgggcgattatgcgtgatgcttcaaataaaagcaaaatgaggattacggccaaccacggaataaaagaatcagtacaaaagagatgatcgacaaggagagatgtttccgagtggtcaaatccaaggatcgcccgtatgagtatacggatttaccggcccaaccagccgaatctgggacttcagctccgtccgcttcctatccagtttggatccgggcgtagtcccagacccagagcgggcaatcttccttctcgcgccgtcgatcgcaacgagcacgtggctggtcccatcttgcagtgctctcacggcgtggcgggttccttgctgcagggtgtggctagaccccgacaccagggctggcattgaagccgatgccgaatgtttcgggcggagcggtgacacagaaagtccggcgctatccttgattgacgagttccgtcgactgctgtttcgatactttgggaatcgcacgcgaggcgtctgacgtggatagttgggccgtttcttctccttccctgatctgtcccagatggcggtgtcatggctctggtaggaagatatcggaacggcaagttgctttt

SEQ ID NO: 10900 - DNA, 310 bp, Emericella nidulans
  unsure (1)..(310): unsure at all n locations
tctgttggcaatttagttaacgaagcataacttaccgacgaagacgaagacnaaggcgacgaggcggtaactggggggagcacgcgacgcaagggcaagcaagaggcggcgcgacncgagcaacccacgagaaacggcaaggggcgagcggaacgcgccagcangccgaccggggccgagacgaacaccggaggagcgcggaacacgacggaacgngcacggaaaaaaggacagaagcgggaaacgaacgggctccaggagagggacacacaggctgacaagcagacgaggaacgcggggaccacggcga

SEQ ID NO: 10901 - DNA, 1918 bp, Emericella nidulans
caacctgaggctgcacttcctcatattacagaccggactaccactccgcataagggacactgtgggggcgttttttcacaagctgaggctttcaaaaaccgcaaataaatgatcagtaacccatagaactgaatctgatcgactgactcgcgtccatgtacgactgtaatcccagttgtctccttacttgacgactatccgtcgtaccgagatcgctgtttaggttgcgacctggctgaacttgattatcggtgcgactcagtccgatcatctatgatcgattaccggtattctctggaagagtcgaggtctagtcagcttgcgttcaactgccgacgcgagtacctactggcactggggtgaatgcaggttgatgtaacgagttgtcgctaatggggggtcaatcaaaaacaccccgtgtagacgacctgacagcttcccggagtacccttgagattcaatcggagatagtttccaagcgtcttatccagttggataatgggcggagaaagtggttctccaccttcacctccaacccgacagcaagaatggctttgtgtgttcccgtcaacatggaagactagacctcaacccacgtgtcccgtgaagaacccagccaacccagccatgatcccatcagggatctgatagtccggcctttcgctgagtgtgacaactccctgaaaccaatttcggtggtctgatcgttctgctcgcgaccgggcacccacgccgatgagcagggctgtgtttcagtgtgattgatgcgcagccaagctattccttccaggaccctattaataggttagtacggtggcttatatggcttaacttgtactgaacactcactaacgatctgcactggagtactctctggcctgcgaattatcaagctccacctgttatattagcggctctgtactgccgtcgtcattagcacggatacgaagacaggcggggtcttgataatatgcaggtcagagagtgtagattctctcacttgttagtgacttctccatttcttatcattggtgttatcacccagcggctcagcttgtcatcgtactcgactccaccgtccgttgtccacaatcagatgagtccacacaggactcccaaaccgacccgttacccgaaaatgatcaaaacgatccaacgacggccttacgcttagccagacccgatgaatcatggccaacattcaggagatttgaaggatgctcagcggccagtcatcaacgggacagcctgtgataaacctaaaagcttctattttgggttaaaacataaggggatcgtccaccctcactggcccataacaggctcctaaatagacctgcaatatggcttagtccttgctagcgcagctagcgacgcgatgccggcgccgcaaatagctgagcccaatgtggccgtcagccccaacgccagcctgcaaaggccatgacttacgagcgaaaatccagccacaacgccaaatctcatagtggagtcccgctcttccatcttttaaacttccaatctgcggccggtcgcgctgaggctgtcatttctcttcttctggcctgactaccttcgtgctctcgcccaagaccgcgcccatcacactctcggcgagatgcttcgggatctgctccgggatcttgtcaaatttgtcccttgggcggcactattgccgcttgtaagggccgaagggactgtgcaggatctttggaactctccacaatatccagactataccacgaattacacggccgggacaacgatcgagatcagctggcagcatgcactctcctatcaattccaatacttctcccacagctgcgatgtcacgaatgtggatctgtaggtgacggggagtagttatactcgcaagcttgagggtctgtttctcggtcctcgtggtttaagcgaagca

SEQ ID NO: 10902 - DNA, 518 bp, Emericella nidulans
tgcaggtcgactctagaggatcccctaatctgtgcaaacagtgcaggcaatagacttcagcttctgaatattaaaatcgctgttgctagcatgcatactatttctaattatttaaccaaacgtaccaattcagcttctgaatggcctttataagaagggcctggcattcgagtcacatcagatcgacttcttgacagagaggatcctgccatgaaactacctcgtgtcaataacacaggtggatactaggacatcctactcagttcagaaacataacagaaagcttcgactagtgaacaaagcaattacagagggaactagtgattaccatcaagatgtggtttatctgtaagcaacttgttcccattaacagcaattcctagatcaaataggttaaccatcttccctaagcatcctggaactggactttcaatcttttgagcctttctgcctcggagttcattcattatggtccctgcagtttcacagctatttagttattatctgaggtgacacga

SEQ ID NO: 10903 - DNA, 2428 bp, Emericella nidulans
atatcaaagagcgaggtggacaaggtgaagtccgagcagactttcatctcgtgcaaaagcccaggcaagtcggccgctggttacccactgggaaggtaggcatgctgtgcgcatttctcagtaagcttgatacagatgaagagtatatgagaacatccagatatagacgattagcatccatataatgagaaacattgtgcctgtcctactgccagtcctatgaatattcagcgatgcggcctatatcaaccactagtgatcattactagcgactcacgcctgatggataagctctgcgcttggaagaggggagtccatgatctccactgtatcacttgaaaacagcagtagtgctatgaaaagcggcaaagtcgttgccagaccgatcatcagcgtcgtgataataatctgcggcacacggcggccggggtgctgcatttcttcggcgatgtggagggctatttggccatcatcagtccttttgacgcttcaggaatgtgcaaagctcttcacctccatctgttcccccaaacgcgtacatggcgttgcatatgcccagcatccaagatactccagatccccagcctgtcttgccggcggatgggctgacgagaaacgaaggctgctgaacttgctcatgcataccggtaggaacgaaaagcgtcattgctacgccgacgatagacagaagcaaggtgatctggcagataactgagatcttcttggatgcgacgaagacagggattactgccggcagcattagtagctcatttgactaaaggtagggtttggggaggggatatttgcttgtgattgtcgccatcgcaacgaaaaacagatagatctgccactgcgttgccttgaaattcgggtcaaagaagtgtattatcccggctaaagtcgttgcagtaagggagatgccagatgacctagcctccatcaatatctacgcaccgttcctccgctcaccagaaaataagaccaagccgcaggcagacatacgtcgtaacccaccacgcaacaacggacatccacccgatgacatacgccgcaaacctcctagatctgcgcggggccagcaagaagcaaaaatgatactggccgccggacgacggaaacgcagacccaatctccgcaaggccgatgctgataattgactgtgcgataaaggcgagtaacagcccgacgatgacaaggcgcggaccaccatatttcatgttctggccaaagttgctctacgtatcgcagttaatagcgaacagagtggaagtgaaggagggcaacctaccaagtaccccacccatgagtttgtgatggagaagccgaggcccagggctgacagccagttaaactgccggcggagctggggcttgtggccgtttgcttggaggatgaggtcatctgcgttggtagtatctgtgtctgggaggatgccggtgataatatctgggtcagttccgctggatgagtcatgcttgctttcttcttctctctctaggacactcgttgtcatggctgctccaagataggaaggttgctttttactgttcagtttgttaaagttgtacgcttcagatctacacatgtgtactcagtacttgggtatacttggaacctacattcctggaagctgagcaagcgcaatgaggcaaggaggtagttgtgaaacagtcgcgatgcctgaaccgtgccttgatttaattaaactcaaatagattgtatagacgtaacgcccgtctgaatcgacgtcgcaacaaaagagtaggtagtttgcgagagttagggctagtggggatgtgtcgcggaacgagcgacggggcggtctgctgtgcctataaacgccgtcgcctttatagacagttaatgtagcacagaaccacgcggctgcaataaggagagtatctgcaaggcgtaaatcctgtgtctccaacctcgatatgtccccataacgtgccaggactgctcgcaggactccccagataggcaataccctcagctatgacgcgctgattgtcttccagtcgagactcttgctgctcaaacatgcaaagaagctgtcaggtattcctaggccttaagtcagaagcccatcttttgtcgtatctttttgctgctagttcgatcgcctatcctgaagacaccgtatcattgcagaccagaaatcctgtgactggcgagtgcttacgcggggtaatcgccaagatttcgagtgaagatatcgaatggatgcctctgaagccaatgtcgcacgaagagagcgagtgacgtccagggacgcctcgtggtacagcaaatgccccttcacgaggatgggaggcaggtcatgagcctgccgtgcatacgctgctgaacggtcacaaccgacacacagatattgtggtagagcgagctgaaggggtccgttcgtcgagctgccgcaagtacaagc

SEQ ID NO: 10904 - DNA, 372 bp, Emericella nidulans
tagaggatccccggaaaattacctttatattacaattcaccattttccttaaattacaaaacatgttttaaaaaaaaaaaaaaatactgagccacttgtgattcaaatacatgaacaaaaaacagttgctgctaagtaccccaaaaaatcaagaattattatcaccaagtgaattactattcctaactcatgaaccaagataacatgttcatcaaagcagcatctaaaccgcgaatgtcgtgggccgaagttattccaccggttccagcaaaggagttcggccatctctataactattcccaaatcatgaaccaagatagcatgttcaacagggcagcaaccagtccgcaattgacgtggacctatgaaatt

SEQ ID NO: 10905 - DNA, 380 bp, Emericella nidulans
tagaggatcccctggaagctttaagctataaatacgattatgaagatgagggacatcttaataaccaaccaccatcaagactgggacaaataaaagaacaaaataaaacaaaacaaacggtaaccacattagtgtcatcaggcttatgcttcaaaatacattgcagcttcaaatttcaaaacaagctttatgtgcaatctctagatgtctcaatcgccggccacgggtaatctgtcgagcgtatcagaaacgtgcctcatggtaggccttttctctggactgctattcacgcaactgattgcaatcttaagaacagcaacaatctcgtcttccgtctctgcctcaggagccaaacaaggatcaagaacatcacacaatgg

SEQ ID NO: 10906 - DNA, 1432 bp, Emericella nidulans
ctcaggcaattgctgtaagctccaccgcagccagcttgcggattcagggtagtctgggaggatgaactacatcaggaaagcggacgctaaagacggggcgccttcaatgataaagagccagcgccacgctgaaagaccttgggcctggttcatatgtccaactccgtaagctatggcgccgccaaaagcccctgctagcgtcgcggatgcaagaatcaaagctacgcgcatgcttcgttctgatgtgcgataccagaaagtgaggaagtaaacgagtccgggaaagagaccggcttccaggactggtttgcgttagttcaaggcgtataatttcgcagttctggtgggtagagtttgtgtatgtacctccaagcagaaagcgaaggcctgttacttgtgcatagttgtgtgccccaccgagtcccattgtcactgctccccatgacagcatcaagaaagcgatccatctctgtggctggcgttaggtttgacgttgggagggtattaggaagacgcacgctcggtttgagcttcttgagaaaatagttggatggaacttcaaaaagagcgtaggcgatcaagaagaccatcaatgcgatcctgaccgacttagtgctaagtcgggcgacggttaaggacacctacgtatactcgtacgaggacatgttcgtctcggtcaggagatcattgccagtttctgagttcatgattttggcgtttcctgggatttataagcccactgactctagtcattatacgaaaaataatgtaccgatatttgaccgatccagataacagaggaggtagattgcagcactgagaggaataatatgaagatcttgcttccagattaacgccttttctcgagcctggactgcggcatctccgccactgttctggataataggattagccgttttcttgcaagccaagtgcttgagccgctcacttgaataaccaattccgcgtccgttgcattgacgacgccatccggagcgacctctttttccatgatgacggagatgagaacgagagtggtgtaagacgatcaacaatttttggggtctgctagttataaagacaaagcgcacgccaatcggggctttatccccacatatccgagttgggctagactctgcccttgcggtaagtcgcagcccctgggtttggggtcaagaagtggcccgtgactcgtgactgtcgtgttctcgcggatgtcggtcaatctccgaatgttcttgaattctgaggttggtccagaagacaccgccgtacattgaacgaagtaacctgagaccgttaagatcggcggtgggccaaacaacatgagggattcattgtgactggtttaagctgatattgattcacactgcagtcatgctgtgcaactcctgcaagctagattcttgtcatgcgtaggacccaaatggtc

SEQ ID NO: 10907 - DNA, 601 bp, Emericella nidulans
tagaggatccccgcttcgtaagcacccggtggtagcagccactataatccttgacctggaaagaccaaatagaaatatttagggaagaaacaagaaaacttagagggaatcatatttcaagaatggatagatcacacagagacttgtctcaacacttcaacaggcagtataggagaaatatataagagaatcaaagccaaacctgtgctgttagagattttataacttcttttgcggcttctgatttggcagattcctctgctgccaggctcattgcttcttgtacttttttcacagatttctggacttcgaattcttggacctcgcatcggtgcctcagactctcggcctgtacacaatatcacagattcattttagaaaacaaaccacgaaaatgtgtggaaacaaattcagatgaatggaaacgttagagtatacgccgagtttacctgagcgcgcaatctgactacttcctgattcagaagctcatttgtcttcttcaaactctcagctatacttgttgaaaaaccatgaccaacgtttacaggaatgggagtgactcgacgaggaggactagatctccttgagaaaggtgacacag

SEQ ID NO: 10908 - DNA, 534 bp, Emericella nidulans
tagaggatcccctataaggaatttgtaaaatactgaaacttatgttatacaattgtcactccctattaacaccgaccaaatagattttcatgctccttctaacattcctaaccaccaaagaaaaagaaaaaacacatttacattagatctatccctttgatttcccagggttaggtatttccaacaggccatccgcaacattctcatccgctgcggtatgttgataatgacgatgagaccacggaatcgtgctaaccgtcggaaagcaacacttgcactcatcaggacaaggtagctccggtagagtttcactcttcttgtgggtccttccgtcgtgctggtgctgcgacatggcctcccaaagcggtccccaacattcgaccttgttgtactcgggatgttggaatggaaataaacccaaacaggagattcttgtagctcggggtgattatttaacaaatactcatctccatgggcaaaagcttccagtacctataaatcaataggtccaatatactcaatcaatcgtggtat

SEQ ID NO: 10909 - DNA, 1811 bp, Emericella nidulans
acttgatgcttgcggtgcagagggaatgttacggggacgagtacgtggagggggaaggactgcgggaattggactggtctacgtgattaatatattcgctgcctgcacgggtcagggtgaatctattaccggctagtagtcgagagtgccggacttatcaccgttagcagcagatagcgctgttacctaaaaactgtgataatttgtcgggggagctgcaacaaacgataagaataacagaggaatagtggacgtgtcaggtctgctgatcgctgtcatcctaaatcgtggctctgagagcaagactcgagactgaggcacaagtggaggcgccgagccccgaactacgctggacccaagagaagcttgactgccaccacgcggcttctgttggcctttccccttctccgcctgcttatcgtgaactcttccctctcccaactctcttgctaccttacccttgaccttcaccctcgcgtctttcatcctgccattcacttccctcctcgtgctgccctttgcgctgcagccatcggcctagacccctctttctcgagtcgacagcacgttctccgcccgttcccgacgcttgcctcccccctctcctccgcatcacgtctcagtgtcttcgtgctcgtctcgacctacaaccgatcgattttcttggtcttgcccttgagcaaggaactactacgactgccaccactctctgttcagtcagaacctcgcgtgaaataatgccgaaccatcatctcgactcctgatacccatcgccttcccttcgtctccgtgcattcctccgtccgtcccctcctttcgctggtcgttgcgtgggactgtctttaattacatcgtcttgtaggcgaacctgggttgcgtcgcgcagaataaagcagaataaagcctcgaggcagagactcgcatcccagtgcttgtgctcggatcacgctttgcgcccgacggctagatcaggttcgacctgccggtggattgttggaacggagaattttgacctgcgtcgcctccattcctcctccttcgcgctctcgcttcccgtccccagagccccttgcctcgccgcgtttttatcgacggtcctagcattggcgtttcgtcactgggttgaatccaaccgaaggttgtcgccgacaggattacctgcgttcatacatcgctttatttctatctgccatcctttcaaatatacaatcactcctgtactatcttctcggtgatactgtgagaccctttactccttcatggttagggcgacgtgttcatgtgtcatgtccgtcaatcctctctccgcccaaacctctgcttcgccgctcagtcggaatcggtcctctcttctgtccaaattccggacgcagctcggtcagcgcaatcgcgctataactgatttctatattgagcccgatgacccttggcgttcctattttcccggcgatgttataaaagggacggtgtctctcacggtcgttcggcctgttcgcataacacatttggttatctctttgcacggcattgtcaaagtcttcaagaacaatgttccagctggtgaaactcccccggatgtggggtccttgggtcctgggcgcggcgccgaggcgctgagtatttgggtaacggcgtcgcaacattgtttgaagatgaggtggtactttgtggggaaggtcgtctcaaggaagggatttacaagtttcgttttgagatgtcctttccaccatacccattacctagcagcatcagcgtatgtcttttttcaggcccgatctccggtcattctcgctaatgtcgcatgcagttcg

SEQ ID NO: 10910 - DNA, 268 bp, Emericella nidulans
  unsure (1)..(268): unsure at all n locations
atgagacatatttaaattacctagtacatatatcttaaggcatttaccattcaactttaatttaagcttatataatccaacacaaatatcactcataattcaacgtcaaactagagatatctgtgagctcctttttcgatttcatcagcgaaccaaaatcagctcaggtctcagttcatttcaaatttgaggcagttcgtatgntttgttcttgagactccggattagagtttaacgaagatcagttttttttgactctaataggcaa

SEQ ID NO: 10911 - DNA, 365 bp, Emericella nidulans
ctctagaggatcccctaatcaaaatataagcaaaatataagcaaaataagtagaagttatatggtcaattctgagcaaaacacttttgatggcaactaactacaccaattcacgaagtagtgcaacaatccgtatgacttaaaaacagaagaaaattataatagtgaatagacagaagtttggtttagtccaatcaacccggtaatagatctctctttggttgcagtccaacatgtgtgattaaaaatggtttgtgtaaacgtaatctaaaatcctcgtgtaattacacttttgattacgcatagttggatcagagagcaattattggtgtaagatgttcacttgtataagaacataagatggtg

SEQ ID NO: 10912 - DNA, 539 bp, Emericella nidulans
tagaggatccccccgtattttacaacactgcaatggagctgttctgtaaacctcagttctttgaggttagcgcagagcttgataacggaagcaaagctcgattcagataaccgcacataattaagcctcatagagtaaaacattcccaacgcttctaaatcaagcccgttcgctgcatatcccgaaatcatactattccaagtaaccacactctttacttctgttttatcaaacaaaattctagctttcctaacattcccacacttgagatacagattaatcagagaattagaaaccggaatcgttttatctaaaccgttctttacaacaactgtatgtacctgaagtcccctcccacccactccttcttcagccaaaactccaagagcagctgcaaaagtaaatgagttcggctgagtcccttcgttctgcattctcataaacaatgtcaaaacttcatcattcatcgaattccgagcatacccgcttatcaatgtagtccaagtaacaacattcctctctttcatttcatcaaaaac

SEQ ID NO: 10913 - DNA, 562 bp, Emericella nidulans
atctctgctagctagaaaaaccaaaacaaaagcataaggttgatcaaaagacgttctctaacaaagattccccctcaaacttttccaccttggagctcagaaacgccaagcgtttctccaaacgcgctcgcttcatcttcagttctcccaaacgccctgccatttccatgactcctttacgaaagtcctttgcctccttctccttcaatctcacctcctcctgtatcttcttcatttcttctctttcaagcagcatatcccgttcacgcccatccttctccaccaccgttgtctcgtgtccatcatagtggtgggccgcttcaagaatctcgttcaggatctccctgagccaaccagctctgaatttaacagactctgcgtctataacaaccgatagcatttccaacacgcgtgcctgcttcaatttcttcaggggcgtcgattggagttcaagaaccaccgcggctagagtctcaagcgagtaagattttgtgcgcagtgactgaagtttggaacacggcgctatgtcccatgcttgccaggatttctgcagagtggcgag

SEQ ID NO: 10914 - DNA, 575 bp, Emericella nidulans
tagaggatccccttttcacctgaactgttgtctactgctggcgtcgggatggtggctgctgttgggccattgttgcctctcttctgtttctgtttgttatgaaaacaatacttgaattaggaagaactttcataaaatacagaatatttacaaaactgttaaacgtataacagagaactacgcaatccaggcctagtcggtggggataagcgaccaatgggggttgtagtctgtgtaggttctgcgtcgttaatatcatgcatcactgtcactaagacttgatcaataaatccaaaaccactgttctccttcgacttcactaccctgccattatccaaaacaacaagggaggatcgcttcttcgcacctaatccctcacccacatctcttgacctaggaccactgtgacgcttattcttcctgccatggctttctctcaacaagctgctcaatctagcctctaaatagctatagccttcaccatacgcgactccatacgcttgtctttcatgtcaatataattcttaatcgaatctagtatgtgaacctgccctttagttttacggggtttagaa

SEQ ID NO: 10915 - DNA, 813 bp, Emericella nidulans
taaagtgcgcttctcacgtctgctatcctccctgagttaccgtattcgatcatcgcaggctcgatttatttcaactgctggtacgtccaaacatggacccaaccactattaaacatcgaaacatactaaccagatgatgaccaggtactggggcatctggtttccccgcgactccttcagctcgggcttcacatggatgctcctaatgctcttcgagcttttctatgtctctttcggacagttcattgccgcgatatcaccaaacgaacttctcgcatctctgctagtcccatgcttcttcacgttcatcgtcgccttctgcggcgttgtggtcccctacatggccatgccccatttctggcagtcatggatgtactggctcacgcccttccactacctcctagaagggttcctaggcgtgctagttcatgacgtccccatggagtgcgtggagcgcgaagaaacactattctcccttccacccggccaagactcctgccaaagatatgcaggcagcttccttagccaagcaaccgggtacgttcgggacgtgggaaatggaatgtgtgcgtactgtatgttcagcgacggagaccagttcgcggcgaacaacttcaatgtctattataaccacaagtggcgcgattatggcatcttttgggcgtttgtgatgtttaatttcgcggccgtgtttgttctctcttggctttatttgcacggagtcaacgatatgaagaaatggcatagtaggaggaaagcgaagaagagcgggctgcagagctagagtggtataacgttttataacggtggcgc

SEQ ID NO: 10916 - DNA, 403 bp, Emericella nidulans
tcgacctagaggatccccggccggatgtccgagaaaatctaagattctacttagtaagggttgaatttggatcttcaacagttgcagaagaagaagaacgaagaacaagaagaagaagaagaagacgtaagagaaatataagcaaggactgacgaacaaaggagaagaaaactaacaatggaagaagaaggagaataataagaagaaggtaatttctcgttcaggtcgccgcttgtcgacactaaactgaaaaagtgagaaattcataaaattttagggtttagttaacatactagaggattattgtgaagtagctgaatcttttgttgtttatggttacaatttcagggaaatttggctgatgatgaaaatgcggatggctatgggccacttataggtaaaa

SEQ ID NO: 10917 - DNA, 270 bp, Emericella nidulans
cagaggatccccctcagcgaccgaatatatcgaaggtactggggctcaagggatccttctgcctcagatgccctccttgcctccagtagcttggatataggtgtgtgccagcacgcccagctaatttgttttcaaggtttagtagaggtgacgatagaagtgagagattgctttagatccggcagacttccaggcaagcttcgctatggtggtaataatcattgacatagggatcattgctgtgtgaattggaatgctgcatcttgagta

SEQ ID NO: 10918 - DNA, 475 bp, Emericella nidulans
cagactctagaggatccccctcattttgatactatatttaaatgataccaataataaattgataaacttttaacttcgtaaattatataaattaacatttacagacaaacacaatattagtcaaattagtattatatcaataagcgaaattgatagacaaattaaaaaattaatccgtgcaaaccatggatactaacttagttatttattaaagactgattctatcttagatgcagccaagcaagccatcctaagtttctaatttagaaaaaaaataccacaatcgttcggtgaaccatcagtctcgtatatattgatgtattaacctaaaaattaaaactatgtgtgacgtgtatcttatatatttccatcttactatatagttttcctttattggcatgttttgttaaattatgagtttgtgtgattttaaggtaatggtggcaaacgttatggccactgacagagacttaga

SEQ ID NO: 10919 - DNA, 2323 bp, Emericella nidulans
aaagaagagtgatgccaaggggagaggggatagaacgaaagaagtaacttacttggtatggtcgatagacgtcggctggagttcacttcaatgtaagccactagtctagtgcgttcgaacagagacaacagagcaacagagcgaccgcagaatgaccataagaataacaaggaatgtagtggtaaggataatacacgcacagcaccacaaacggagcagaggacgggaagggaggcaaggagaggagaggagggagaagagaaagaattgaggcaacgaggagaatagcgggggagcgaaagggggagggaggggaaggcagcgaaaaagaaagcacagctacagtcgagctgtgtagctgtgtctgacagacagctcggaagaacgcacgccacaagtgtgattggtgttcccgtgggaatccgagatgcagcagtaaagtgaccggctgcgttggagtcgacgggctgggaatagtatgatcaagagcaggtgggcgaaagtatgtatgatgagaatcacacgcgcacagagagagtgagagaaagagaggaattcgcagaaggatcgaatgcagcccaaggtccccgtcacatcagctctcgatgagaatcgatggagccaagcctttagaaggagggggataataataagacgggagaattataatagagggcagcaattagtagagggtggggggggggggggggatgggctggggaatggaggaaccaaaagatgtaaacagagcagaaagtatgatatgtaggtaggtacaatggatgcgacgcgagacagaagaatgaagaagacgaaacacacagggaagatgcagacatacccatgttgaagacgcggtcggaggtgtccaaacagagaggctgaagggcagaaggggaggaagaagagagatgatggaggagagagacaagaaagacggatgacgatgcttgatttgacgccagaaaaggtctgggatcttgatcctcccgcaactcacaacaaagaaagatccaattggcgaggagaagaggagagaagaggtggatggttcggaattggagaaattggagtgtttaaagcttgccagataagattcttaatctgtgttggaataatgaaggggacattgacaggcaactctgactgtctgcatagacaacaaccaaccgatagtctccaaacgaagacatctatcattagatatcaacacatggaaataaagccaattgtcgtcaattcagctgggcttgcaggcaaagtaaaatatctgttagaaatgaggatagaaggagaatgttccatatcatggcattcatagccgaaaagggtgtcattttggtaagatggccgagtggttaaggcggtggatttaagtgttaacactaaattaaattccccactgacgagagtcacctgggttcgaaccccagtcttaccaatatctttttttttgttagagctctacaatagaattacatcatcaacttcgaggtgttgaaccccccaagaataggcatatagtattgatcataataatgctgctattgtaaagcgagtacgtgtctcagcggtttatcggttttgagtgcttgcagagtatatatgtagagaaagaggcgagccgtcccaggaaccgtctaatcatccgatggtacccttttcagaacccggaacactcttacaaccaccaccaacacctcaccacaccaacatggctcgtccaatccttcagcctctgcgcgcatgcagtaacccggtcttctcttgctcactccaaaagtccattctggcaacaatcaccgcagtctcccagcaaccgcaccgccgtcaacccgccgctttccgatcccgtcttcacgcccaccgtccttaccactcccgccatcaccctgaactcccaccccacgaatacacaaactcccaaacgactattctcgctgcggctctgaagcatgtcccgtctcacggcttcaccaaggatgcccttacgcttggtgctcgcgacactggcttcttagacgtctcggtgcagctcctcccgcgcggcgaattcgatctcatcctcttttggcttgccagccgacgaggtcttctccgtgcagcggttgagcagagtggccttctgacgacggcaagcccagtttctgtggaggataagacaaaggggttgatcatggaacggttgcgcatgaataaagaatacggcatcagtggcggacgggcggatcttcggtttttatctttaggatgaggttacactagcaaaaagcccagtctgtggtttaccctcaacttcccttttcttttgaactcacgcctt

SEQ ID NO: 10920 - DNA, 3120 bp, Emericella nidulans
ccatatttctcaacaacgccttctgtgcttgtgtcaaccaccacgatcagtaaagcaagcacgccctgccatcgttctgtactacaagtagccgtgacggtatgacggatcaggatacgcaaatgtccctcagtacggtggccactttgacaggctgggcggttccaatgatgggctgtgaggatgcgtctagagtatttgagacaggcgtaccaaatagtggaaatcactcgcggaagagaacagtggtgcttggcgcgggtgctgtctccatgttgacgctctggataagtgcagagacattgtttagttgatttcaggatgtttagggctggtcctgagatgacctagattcgtgcctctggattctacatgctgcctgatgactaacgaggcaagtctgattgatgcgatctgtatgcgtgaatgttcatatttgactgtgctttgctcaagtctttctattacataaatagcacttttgctattacacaattcattcgtgcgtctacccagaagcggctactccttgccatccgatagacccatatcctactctacctatcaaacctacatttccctcacaaacccgctcctctttacagcgcccccttccaactcaacaaaataatccgcatccttgatcgcctccagccgatgtgcaatcgtcacaactgtcgactccctcatctcctccctaagcacttgctgaatctccagcgagctctcattgttgatcgatgccgtcgcctcatccaaaattacaatcgggctacggcgcaatacggcactggcaatgccaataagttggcgctcgccctggctaaggttgcggccaccggcatcgacgttcgtgcttagtgtccagttgcgtttgttgccaccgttgttgccgttactgttaccattgcagatgcggttcagtacggcttcgcattcggtgtctgtgtactcggaaacagggtcaaggtttttgcggatgctgccggcaaataggaccgggtcttgggcgacgaaggtgacacgggagcgaagggcctgtttgtcgacctgggagatgtcgataccgtcaatgaggatctgaccggaacttgaactcgagcctgggtctaggggaggggccggggtggccactgcaagcagcgagattgcgagagttgacttcccacttccggttcggccgatcagggctgttgttgagccgccggggatccggagattgatgtttttcagggacgggtctagatgtggcgcgtagcggatttcaacattttcaaagacgatatccgccccgaatctcggccaggacgctggaggcgtaattgttcctggcggctcttggtcaacatgaaggagctcgtcgacgcgttcgactgatacaaaatccatctgcagttggccatactgtctgcaaagaatgttggtggagattatgaagctgtttgctgcgatgagggcgaacgctgcgagacccggggttacgtcagtgtagagggctagagcagtcagggcaaaagtggagagggcggaaaggctctggaaacggtaggagagccaggtctgtagggaccagtagaagtggtccatgccttggaacttgtcgacaacagttattaccctgtcctggaaacggggctcggcatgaaaagcgcgaactgtggttaggccgtggaggagctcgccgaagttggatatcagagggctcagggaaaccatttctaaccgtcggagactctgtgaagttgggagaaaatgcaggaatgtgtatacaaatatggtggtgaataatactgagaaggcgaggaatattggcttgacggaggcgatgacaagcacggaggatatccaggtgattatttgaaaggcaatgagctgaaattgctggctgatatcaccatcaacgacaccgatgtctgatgtcagtctgttcatcaaccgcccgacaggagtcacatcaaagtatctgaaggttgcatggctgacgccctgcataacttcctggaagagcttctgacccgcgcaataaacgatgataagcatgaagagtcgagcaataagcattatgacagccgtgaatgtcgtaacttcgagaaagaccagcaaccacggccgcacgtcctcaatcggcgcagggaacttgtcaagtggatttggtggcatccaccacagtggccttggtatggctgagaatgttgtccactgttcagaggcagattcccaggtagggtgcccaaacacgttggtgacttcgttatatgcctctccccattccttcagaaaccaggactgcgcgattgcagctagacgatataccgaaatcacaatgattagtgccaaccaccacctgtactttccagctttgatgtaattccagtagactgccgctttgacgccccattcagcgcggtgttcttcctcaatgaacttggacggaacggccgctgagtggtcttcaagctccgcctcatccactgcatcgggattgtttgaggccttctgactatcacttatttcgtcgacaccatcctccacagactcagcagactccaccatcgcccggccatcctcaatgcgcacaatttggttagcaagatgacgaacaagttggatgcggcgcgtgactagaacgactacacgaccattcattaaacggcctgttagacactttcgaacaatagtctcggccgtattatggttcagtgctgacataggatcgccaagaagaaatatcttaccgtgcttggaaccgcctagcagggcaagcgtgcttttgtctccaaaagcctattccatcttaccaaaaatgacagtcgcgtgctgaatggacagaccgaagtaggccaagcgtaaactccttgattgcgtcacgtccggagatacaaaggttccggtactaactctgaacagggtggccaaattcattttatggtatcagagtccttgttgtatttcccgaagctgaggaggtgttctatcccttcccataaagacccgaaaaaagtcataatggagggttttagcaaaagcaattccccggcgttccataaccccttctggtttaattacttaatacgttcatccttttttcctcttaggttgattttttgcccacttaatcat

SEQ ID NO: 10921 - DNA, 559 bp, Emericella nidulans
tagaggatcttgccatttcttccccaacgctcccatctacaatgaccgagaacgcctccagatatacctctctgatgcgggtattctagccgtctgttttggtctttaccgttacgctgctgcacaagggatggcctcgatgatctgcctctacggagtaccgcttctgatagtgaatgcgttcctcgtcttgatcacttacttgcagcacactcatccctcgttgcctcactacgattcatcagagtgggactggctcaggggagctttggctaccgtagacagagactacggaatcttgaacaaggtgttccacaacattacagacacacacgtggctcatcacctgttctcgacaatgccgcattataacgcaatggaagctacaaaggcgataaagccaattctgggagactattaccagttcgatggaacaccgtggtatgtagcgatgtatagggaggcaaaggagtgtatctatgtagaaccggacagggaaggtgaccagaaaggtgtgtactggtacaacaataagttatgaggatgatggtgaagaaat

SEQ ID NO: 10922 - DNA, 455 bp, Emericella nidulans
caagcacaacgaaatccgtaggcacttccactccattaatcattactgccagatcttatagaaggccgaaggttttcttgaggacctatcagcaaggattaaagtcaggtcgcaaggcttgtactgagtgaattccagcttccttgccactgagagtggcattaagcttactgaagctcccaaatcacaaagacaattgctgaaaaccaattgaccgatggaacatggtagagtgaaagttcctggatcttccagtttttcttgaacactcctcttaacagtggtcctagacggaatagcatcacattcgtcttctgaatcttcttgatgaatcttgatgctttctagaattgactttctcacatctttgtgaggatccgggattaggttgagaacttctattagaggcatcaccgcttccatctcatcaagctgcttctctgcaagataattgt

SEQ ID NO: 10923 - DNA, 1101 bp, Emericella nidulans
ttggggaatattttgaacagcttcgggccattgccagcgagccagacggtacgaagggaagaaggttgcctgtgtttgagcaaaagtgggcggatgatttcgcggcgggccatgagtaggcgtattcggatgtggaagagggcaaatgaggcggctgctaaggcgttgaaggtgccggcctaagtcgatggctggctaatacattcagtgtaactaatcattggctctaatataaaggatagaagagatgcagactctatctttgtaaaactgaaccattctataaatctatcccaacgcccccatctatcattcatgcacgcgtctaattcgtaacgagatgttcataaagtgaacagaatcaccaaacctgttgttcgatgttagaagccaacgctcacaacgtcgagtcagtactgggcgtaggtttgggtgcgggttcgatgtagggtccaaagagccgacgcaatcaaaaaaactgcaacaaggggcaccattgtcttgcggccaatagtcattactcccttataggcgagcgcaagtataatggctaggcaacacatacacaggaatgcgacgatctggagagagacagacgaagggggctggaggctgttgccgggatttgaaggggctctggtgtataaagcgtcagctgaaatcgattctctgatctggtgatacggtatagtgcggacgtacctcgggacaggccatccgtcgacatagtcaagataattccagcctaatcgtgcatcctgcgatgactgtcagaaaaaggaagggaagaaaaaaaaaaagaagtagacatgacaattgtgagtaagaagttcggggttacgtacaccctgggcgaagccgatactggcattgtctataagagtatgtcaacagcgctgccttgccagccgggaagaggcaacctacgataatgatagtacagcacgtcaggctcaccgttggccccaggcaggacgcccagcccaccgggagcatagaccttcccgtggttcgatccgtatactacagagccgcctccgttaagtagatctttgttgtcacgatcaacgaacggcccatgaacgctcgtaacctcccgac

SEQ ID NO: 10924 - DNA, 556 bp, Emericella nidulans
agtcaaaatatagcaacatgtactgagttcctccacccatgctttgcatacttcatactttgctgatcaccgttgcttagcaatatcgccttggcaagatgtcctccgacttgacgtcttcaccggccgatcaacaagtgaaggcgttgctcgaagtctccttctggtcaaggggtttttctgacttcaactccagggcatcttcaaggcggcccagcttcacgttcataagcccgttaatattggtcggcagagggcggatagttctccagccaatcattttttgagccaagggcgtcatgctttcaaccagtgggcggggcacagacataaacgtctcagttggagtgagctggcaggacgccatttgggtgaaaagcaggcgccgagcaccctctcccaggtgagacgatcctgcgtgcaccattccctggtgcatgaccagaacatcgccgggctccattgtcgcccgcacggtctgctcctcggacggcttgcccttctctgcccatttgtggctgcccaggataagcgagtggaacattctctcagtgaa

SEQ ID NO: 10925 - DNA, 651 bp, Emericella nidulans
caagaagaacgatggtcccaagaagaaaattgtcctcctttccgccattggaactccatatgagacccgcgccagcgttgttgccaatgaggatattcgcgtggtccttgctcccagcattgaggtacacccaggtgttgcacagtcctcgaatgtcatctgtgcacctcctggatccaaaagtatttcgaaccgggccttggtcttggccgccctcggctcaggtacttgccgcatcaaaaacctgctgcactccgatgatacagaagtgatgctaaatgccctggaaaggcttggtgctgcgaccttttcctgggaagaggaaggtgaagttctggtggtgaacgggaaagggggaaatctacaagcatcttcctcgccattgtaccttggaaacgctggtacagcttcccgattcctcacaaccgtcgctacccttgccaactcaagcactgttgattccagcgtccttactggtaataaccgcatgaagcaacgtcctattggggacttggtggatgcattgaccgccaacggtgcttccattgaatacgtcgaaaggacgggcagtttgcctctcaagatcgctgcttcgggcggatttgccggagggaacatcaacctggccgccaaagtgtcgtcgcagtacgt

SEQ ID NO: 10926 - DNA, 125 bp, Emericella nidulans
catccacactccttcgcggctttcgccttccctgaccaccgtcctgctgtcttaatcgacccccaccctttgtgggttctcggatcacgaaccattagagccagtaccccggcttccgattcatc

SEQ ID NO: 10927 - DNA, 2905 bp, Emericella nidulans
  unsure (1)..(2905): unsure at all n locations
tggaccggtcgcacacgatgcgcttcagaatgcctattcatggttccggtggatcaccttcgactaacgaaagctcctgtgcggaagatcgggaccgagagcaaagcgttcgtttgctttatagcgccggtcacaccggcggtgtctcctatgtagcaatggcccagtagttgagggcactttctgaaaacctgcattctgattacactgatgttttttgttgatttgcgcccagtccagcccatcattaccggaaaggcaatatcgagaggctcaagtggagcagcagtcgttcttggggccttttcagccttgaatccttgatgaaaggtggatgatcgagtcatgggcagcggatgaccatcgcggggccctcaaaagtcaagattcgcctggtcagcacctgcataattgacttatctaagatgttagttgtagctaaaggctccgtaaccggggacgcgatactatatttgcagtcacaccgcttcctctcccgcgccgctcacaccacattcttttttagctttctcaccccttctgctaaaaccaatctgcctgatatccccattcattccacagtcggttccatggtcccaaacccacgccttcttcatttctacagagcacgtaccttactgtcctgatgatcatcagtagtgccccgccgaaacaagcggattggctcatactccggctgagtgatggttttagcaagcctcgtgttggctggggtatcccctccttcgaggaacgtgacagtgaaccttactaacatgaatcaaaacgaaaaaacatggtgcgaattcgcatgttggaatggacacggacaacggagaaaaccttcatgagcagagtcaagtgccaaggtgtaatgaagtcatctccttacattccagccgccaagagctaatgaccgaccaactgtttatattctccgacaaccagttccatggcaacgtgagtgtgggctgtggaatggttgtcgcgaaaattctacgagcacgttttgggcatgtacgaccccgctctcaccgaccttccatctgatatcgtgaggcgaactgatagacctggtccgtgcaaggacatgaaggataaaagaatccacccttgtcagcttgcggggggtatagatatgcagtacttggatttattattgcgacgcctttgccactccaccttcgataacggagttttgcttacgaactggctccagttcgcctcactgtcggtcgggagaattgccattgatggtcagtgtttgtcaattcgttgacagacagtatctggtaacggcaggacaacttgacggtcgtgactggtaaccgtccaatacgtgcgtaataacagaccaagacttttagcacatactctagtctagtcctggattctttggaatctcagagcatctgcgatcaatgttcaatatgaatggctggttttcccatagatctacatacgaaaacgaagctaacgagtcgacggccacccttaatcagcatactgccagggaacgagagcacggcgactaacaaggatcttccaagggacctgggacccatctcgttctccttcctgctttgggacactccagcgactatttagagaagcacactatgcctcttggtacaagcgacaaaagtggtccgtacgcagggaccataaaatatcgagttcctgcaaacatgcaatccgccagaaacagacggtctaggatacgctcaagatcgacgtaatcaataacactactacctggttgaagccgactaatagttcccagagacgttcacatcagcaactgtgcgtctttttcctcaacgccgagtcgctttcccgagcttcggatggtcacggtcagtggcggactgtatcctttgtgtgacctgagcatctgaacatctgagaggctgagctgaacgacaaatatcaacgttcggttttgatgcacctccttttccatttgcacttgaaacgtagaattgcggggtaattctgccggggcgttgcgccgtcgctctttggtccttcgataccctaacagtctgattcaaccatctttccttgcaaaaccaacggtcccagccctgtggtgattggacgaggggaaggcaaccactaatgagagtaaagggtagaggatttgcagctagtctgatttatcctagcgcggttctgcaatagtaattagaaaccgagggttgcaatctgtctctgcgactgggagatgaaggagcgctaacagcagtaggaccgtaccttcgaccggaatgcaatatagcgcatctggggagaaaaaaaagaaaagaacagaacagagaagagatatgtcaagctggagttgcttttttagcgatggtcggtgctgctacagactttgaagctatatcgctcatcatcaagttttgccccttactatataatctcgcacctcagcaacataacattcccgcgaaaatcatgatagaaagcaccgaccccgcgattgaggaatgtacctagtcaaagttaatagtaatataacgtataccgtatcaacccccttttcgggtttgcgcggtagccgcctcttgacctagggactgatcaaggttagttatcttttaaacgacgacttagtagcgccaccccaacctcggatctgaacaaccctgccgtacagacatacacagagtatacatctgcagcgcccgtctagagggtattgcctaaaagggccctctgcaggacgcttaagtccattgatgtcgctcggggccgactgaaacagagcgcctctatttcactggtccgctcagacgcatgcaagtcgaaccgatcgtctcggtggtgttttccatccagcccagtatatgcactagctctgtataggtagtctatgcattactccggaatngaaattcga

SEQ ID NO: 10928 - DNA, 492 bp, Emericella nidulans
aggtcgactctagactgttagaggatccccatccagccacttcttttggtccgggataggaggcttgttgaatcagacgaaataggacatcggtgccggtactcgattcgaagcatggctggacgccgcactcctggcacctaaaggtgcgtttttcgcgtactctttttttgtgatttcccggtatggagggatgtttttagtacagatcttttaagcgaaccactagaaggagtctttgattgaggatcatctgagatggatgagccatctcctttccattgccagtcaagcctgccattcaacaagccctgttgtggtcatcagactttattataaaataagtaacggaaaataatccattgctccgttgactctttcaagcaagggcttccttgtctcagaggccccttcaaccggcttcaaaactcgctattctgctgacgattttagcctttatatatcacccgaatggagtactcaagttgaacc

SEQ ID NO: 10929 - DNA, 2411 bp, Emericella nidulans
agccgactcggggatcatgctcctatataaaaattgcctcgtgcttctctcgaaaaatccggaatgtagaatgaccgctcgtgggttaatggccgaactcgataacgcgtcatctacagccccaggcgttgctggtccacttgcgtcttccgcagagattcgagtggtgcaagtatatgaccttcatacggtacgttgtatgcaatcaacatgcggccggattcttttccttgcccctgcttcagtgacatcgaagcctactcagaataccactgtggacctactggcgctggaaccagtcgccatgtacggtggtcgtgcaggccgcatcgtcgaagagattatcaaggcaaagatagagggaagattctccgaaaccgaaagagagagtggcaaatggtcgctccgaagcccaagtggtactgttggcaatctcgggattctagcctgcgtgttcgaggacgaacaaggcgtatagatgagccgtcccgccgcgtcaaagatcagggtcgtctttgacacaccaagagcgctgtgcagcaaagcgctaagcgactcatatctcgaagtagtcatctcggtgtctctggtagccgagggccaatatcgagtgaacgtcgactcgatagtaggtacctcttcctcggatatcgtgacggtggatagcttcgttccggtgctctcaaaacgccgtaagtaaagacccctatggattcagcaggacttgcgatttctgactgataaagtgttaaatgtcctccaacctttacacgatacaagaaataggcacatggcagaatcattggttcactccaattttgctatcatcaaatacctcgctggccatcttgtagcgcaattcaagactacccgtggtttccgccctccttcaccgacaaagctgattgcaaacctactgggtggtcattcaagggagagtagcacgtcaagttccaaggcacctggttcagcaacgttactgggtgaatttcccaagatgccccctcctcgcgccggacatgcacggtccaacacactaccgtcatcgtttcccggcaaggaagagaccccggtcaaggcgtccgcggtcgggacgatcccgtcaaaagtgtcgaatagtcctttcgctgtgttagagcaaacatttgctgcctacgtccttgcgctgcactgccgcagtgggaatattgtgggccgcactcttcggacaagggacaatgtggatcgttcatcggtcaatgagttatacaatgtgcttttggaagaccctgccaagcttcaggcggcggcagaagtagcggttgacacgctttttgtggcctttgagacgttcatgaaaaatgcgtggaaggaacacatgggaccagtacttgacccttcgggcctacaattactccagagtcaatttgataccatgtatccccgtgaattcgaggaatgctttcggaaattccttgcggatatgagtcctcagaaccgccgtgctctcgcttcgcttattcgcctgctcgccgaccttctggatgcgtctggtagtgacggtgatcgtggcgctttgacagctgcgtttgcagaggtcttgacggttgaaggcgatccaatgcaacacatttctttgctggacagattagtggatgactttgaccatcttttcgatgagttcatctcaggcggctcgacactggaaggtatactgaccagcgagctcaccagaacgacctcgcaaacgccgggctctgtcggttctaatgcatcatctttccgtaagcgcttcggctttggtatgcatcgagaaaactccggcgagagcaaggttgcttcgattctgcggactctcagcaagaacaaagggcccaacgaatctgaagcagggacacaaaggggctcgatgctagtacgctcaaaatcaatagatgtcgacacaagtttgagctctcttctgcgccctggttctcgcgatcgttctggtgcttctacgtcgcaagaaatgctccggcggccgggaagcgcgcaagaagaccctcagtcaactatgaaaggggtatcgggaagtggcgtagtaagagttcgacgaaagcggaggagctcactgtccgacttgcggccaggaacggcatccacagatgtctcgaacgtgtcgccaagtcaggcaccgcgtcccacaactcctggttcttcttccaccaacgtccagggtgagcttgttactccgtcaaagtctgctcgacccaatactagccatggctcgggatcgaccgtccgtagtacatcacccctgaaaggtagtccacctccaagactgggctcgccgaatcggcggtcacctgtccgcccagtcactccaagtcggaaagagaatgtcgaccctaaatataccccatccgagagatccctttagtagggttaattcg

SEQ ID NO: 10930 - DNA, 104 bp, Emericella nidulans
gcacctttcttcggatatcagtcggtgacgtagacaggtagctcctggatctccactcagacctgaaagttcgctagtacattgcagattgcctgtgagtacaa

SEQ ID NO: 10931 - DNA, 827 bp, Emericella nidulans
ccttgaagaactgttcagtattgacagtgcggttattgcccgagacgccataagcagggtttgcagcagcttgtggagataggacgtaaatgttcttgccccgcccaatcgcgaagaacccagggtggcaagagctccgtttagcccgcgttttcagctgaccgccggaggtgttctcgtcagaagccgggaacggagggaagatgaggctttcgctctccaaagcgtcctgctcaaagagatctctgtttttctgagagattaaaacccagtacacagcgccgctgacgccaatacccaaaatagcctggtcatcagaagagccgccgaccggctgtgatgtgcacacagaaacgttgaacacacgatcacgagtagatcggagaacctgtttgtcgctcccgtcgtcttggcggataattctcattccgccgttcttggcaagggcgtagacaatgtagtcgggagtggctgacgtcaaggaacggtctaactgatcgaaatccttcttcaatcgagcgatatccatgatcccatcatcgcgcaaagccggaagctttccagcataaggcttgacaatgattgatatgaatggtttcaagggaaagttgtgtacagggacaatgcgctcttcgtccttttcagcactatcttcagcactctcccagctgtctgccagcgcctctgcggcgccatttgagggttcctttgctccttcagtagttctaatttcttcatcaacctccttcgagaccttagtctcaccggtagaattctgaacagctgtggcagtaagacgctacggtagccttttcggaatcttcctg

SEQ ID NO: 10932 - DNA, 177 bp, Emericella nidulans
  unsure (1)..(177): unsure at all n locations
tggccacctaatgactggtactagactagttggcnagggcactgcctacctctctcgggctctgtaatcaggcactcnttnntatggnatggggactgcatgncactactgtgctcagctggtcatttctctggatggcattntgtctgccaggtatttatccggcactccctggct

SEQ ID NO: 10933 - DNA, 2374 bp, Emericella nidulans
gaagcgggatacgaaggatgccctgcgcccttgactcaagcaaatgagcagagggacaggcactggccttctgcatcagggaggacgaggagaacggggacgggtcccgagcgccaggaaaagcaaccatacctacgtacataagatttggctcctcaagcccattgcagcaggtctcggttaacgaccattcagataaatgcgtaaacacgatagctgatcagccttgtgcctccgtggcgccgaaatggaacgccggtgttaggacaccctttaccaatggatcgacctcgctggaaacggctcgcacgcagagggggccggacgtgcatggtcgaatgccgtctgacgcgcaatgcttccaggaaaaaggaaatccggctgtgttcgagttccggaagttggaactatcgggttgaggatcaactcctcatactgtacgtggactgtactcagtacagcacatccactccgacttatccttttctctgctcagaacccaagaagcggactcgtcaccccgatcgaggtccaagggaccaggatagtgtcactgggcagtgagacgcacgtttgagctggagacttcgcttctaccgtatccttgcattagtcacgtcaagttctcctacctatgcaagtcagaggcgcgcattacactgtcccgaagaggacaggagttgccacatttgcaaccgctggatgggattagcggtccgcaagaggtctcgcccttgttagcttcgtccatcctcttgcaaggtgcaagccatctcttctcatatcccctgtcccagtcccaaacccagtccccgttccaatgccgacccagcccttcggagagggagaaaaaggaaacatcccagaagctgacggctggccagacggtaccagtccggtccttaattaccaaccaaaccagcctagccaaacggcgagtccagaatgctgggattggagaccagcctggctctagcaatattcctgccactgtagtctgagttccgtcagtatcgcaggtcgtaagacatgaccaatgtactgagagacaaagagagatgctcgtgcaacggcggccttgcacatgaatggcgggtacacgtggtgctcgacctccgtctcagtctcagtttcaaacactgtaatggttcatgctccgacgctggcaataatgattgatccagcatgcgggacggagtactccgttctggacgcattggctgggtgagatagaaaagttgtttgctatgattcgtgtgacggccggccaaatacccatagagtcttgcgagatacttctaggtgagagaagtggattgcaatgtacgtgagaggtggaaaggcgtgagctggagtgtcaagtctggccctggcttcagtgcaaggaattattgaagctattgatcggtcgaaacttaaggcgctagtattgtgcaaccaaccagacacggagatcctcgttcaagtgtctgtgctacaattgtcacactggcggatatagttagctaaaccattcagcgtgtggtatcgttcgcagaaaggatgagtgttctatatcatcccacgggtaggttggcttgctaggtaagaaacgtacatgataccactaaaaccaaagttacagcaaaacagctgtaaatttccacttcaactcttaagttcaatacgccgatcacgggcggaccgaaaagcgggtacactagcccagaaaattctagctccatcgtaattccacagccgagatcctccgtctgccaatgagaaccagctaacgtggattaggatccacctcgtaaaaacgacccatggaaaccaaagctaagagaccccccttggaccgtgacacaaacctctaaatggccaatatagagaattggggacgaaactgggtaggaataaccgcagctgaggttccatgctggtgggattggcttgaagggacggctgaagacgatcgggtcaccggacaggcgcaccaggtgcactgtgacgttatccaaccgtgcatgatattcgtacgccagtttgctgggtaaacttgagcgttccctgaaagattatatcgacatacatgtaagcttgtaaatgtacggtcgattccaagccaaagtcccattccggtggttcccgtactcatgtattttcctgatagtatcatagatcggctggactccgtatctagctccccgtatcagcgaaaaaggtagactcagacagcccaaaatagatctaatcctgctgcgagtcaggaataactcttttcgtccacacctcgcactcattctcgtacatccgacaccgtacatgggccgactccgagtggcggcactaaagcgaccgtttcatatccgagactccagtctccaagccgttg

SEQ ID NO: 10934 - DNA, 467 bp, Emericella nidulans
ctaatatcgcgttgactgtgtttggataggaaggcccaacatcgtgggactattacaccctaaagcaaaccatgctgcccgagcactcgcccctatcaacaagcgcagtccccctcaacgatatgcacagaattcacctttacacagatcactcctcacaccttactaacgtaaccgagcctctagccgctgagcgcgccattgagatcacctgctctctcatcgacctcgcccgggtcgagaacggggtaccgaccgagcaacgccgtccgactatctgttatgatgagtggaacgtctgggaccccatccgagccaagggcagtaaaggcgcacaggaatgctacaacctatacgatgctttagctgagggtgtctggcttaacgtgctagtgcgaaagagaaaggagtgtggcatggagcgcatagtgcatagcgagaatgtaattgcgacgcttatgaccacg

SEQ ID NO: 10935 - DNA, 2074 bp, Emericella nidulans
ccttgattttgtctctgttgcgtcctcactgtctctaaaccaggttgggtcagccgagttcttcgcatgcgtatacctctatttgttgagtgactgctgagaaatcctcatcagctggaggcctgttcgcaccctcgatatataaatcgagctgaagatccatcagaactggtaaattcctgtcgaatctgaccgtcgtcattcgtcttcttatttattcccctttcgtcccccttcccgcagcatgcagccacagtccgctggtagccgaccggtgccgagaactgcttctgtgcgcccttgagtgatgcacgtccacaaacaacctcgatagcagcttgatcgccgcgtctgacatagactgagatacgtagattgctggaaataattgtacgctcatctcgtctcatctgcaatcctctcttgatttcgttcctgagcatgcactgggcagccttggtaccgcttcatggtgtggtgccccatttgcttttagccaatgggccatggttgggagctaccaatgacgccatactcctgtgccaagacctgttcctttccccgcaaaatcgactgattgaccatagtcgatggctgtcgtgagaccatcttgactggaatctatgctgacgaagggggaaaaaaaagaaataggaatctgaaaatagagcccaactagcagaacggtcaacatccatttttcatcctcaatgaggagttgagacagcagaaaagactctcatcagcaactggaagattttccctagttcctgatctcccgggcgccaccactgtcacggtcagattcgccaacccatggcttctccacgtagtccacgcacttcctcctattcaactctgacctcctcatccatttcttcccctttactgtatccgtcctcctgcagttcagcagattccgtcccccgttgcaccagtaagtttgtcccagccaattctttatcatgccgatcctcccctccaatcgcccttctcctttggttcaggatctcaatctgacctctgatgatgcttcttcatgtccatctcacacctggcacctccacttgacacgtgtggaatacttcgtcaatcctttctggcattctctctagcgtatccgggcttgctaaccatgttttgttcagccaacttctcgtctccttctccgtctcctcatcggcttcacactcgtgaccatctggaaagtttgatcgccaaacacggtcggccgactcgcttctccctttcatcccttgatgaattgactactacccgttccacttataatcctccatcccccctcccccgctctcgttcgcctgtccccgaactgtccgatctgtttgaggactcctcttcgaactaccatccccggtcaaggcctataccgatacccaggacgtactctacacgcgaggaggatatccctgtcacgccgttgactggacgattcgagcgagactattttcctcatcgcgatagctcaccagaaagaaatcaatacaaacgcactctgccccggcaccgtcgttattacagcgacagagacagaatgcgttctgatagctcgaccttttactctccggttgcttcgaccatgtcctcgtcggggcgtcccgactctccgcagcaagctcgcgggcaaaccacagccaagtcagccccgacattccatctcggtgatctccctcggttccatcccgctgtctaccaatcttcgaccaactctcaatccatggctgcgcgccgtcgccacgccagtctcgacagagcgtatatcgtccgtcgtcgtcgtctcgagatcccgtttctcagtaccgggaattctttgagggcgttgttcttcagaaacccgtgtcacgcccactttcacccagtccggctgcccctcgattgaatccgctcaatagcccaggccctgttacgccgctcgcgttggaagaggctggtggctacctttctgcaggctcctccaataggtcggagctgtcacgggaactccagcgttcgcgccggcgcctgatctgttggaccgtatgcttgctcgggaaaatgacaaggttagacaaaa

SEQ ID NO: 10936 - DNA, 1787 bp, Emericella nidulans
atatgtcgggcttcgctgtaacatcgtcaccgaacaggcatcctcagcgagggatgggaccaacgtcacagctgtcgccccactgccgattattactatcttctttccaagggcatcaaacttctcgggccaatattgggggtgaatcacttcgccctggaaatcctgcaggccagggatagtcgcttccagaggcttgtggtagtcatagtagccggttgcgaaaatgacaaactgggcacgcagtttctcagccgtaccattgctttctatatcgagtgtccactgatggccgtcccagtgggcggatttgacgggggtgttgaagcgaatatgctgcgtgatgttggccgctgctgcagccgcatcattgaggtatctgaggatgtcccctccctccgctatggggtttgactgattccagtggaaccattcaaggccaaatgtatatagatccgagtcagatcgaatacctgggtagcgaaaaagatcccatgtgcctccgatgctatttcgtgcctccaggatggcgaagcgacggtgcgggaacgcactctgcagacggtacgcagcattgattccggatatccctgccccgataatgagaaagtcaaacgaggcagatgtcatcttatcaatatgtggatacttgcttgattgaccagagatcttcgctatccaagcacagagggttgcccacaatatataaccacgccagctactagatggcatgatggacaggatatattggacaggatatacgcatccattacaaccggctgtcttgactagcagtaccgaggctctcctcatactcatagcacttcccctcatccttaaataatacagtggactgatgattggtggtgaagtggagtggcttcacagactccgaatgcggtaaaaaccctccgctccggccaagcccacgcagtgacaacctcgggtcatgcatgaccgcagccatggaacatgtacatcattcttgtgcctaggctgatcaacttcggttggtattgatttatttaagtaatcctgtaccgaccgctgcagctcatttttcaccgtgaagccctgctactgccaccacaatggcactgtcatccaaccaccttgtccaactttgtcttgagaaggcccaaagccttttctctttacttccacccaatgtgcaagactatatttcccgcccattggtgcgaaaagctgtcgcgattgtggtagccctccagctgctcagaggcgtcaaccgctacctctcgcaacaggcgcagaacaactgggtccgcgcgcgcccgtggaattcgtcgcgagaactggtcctactcaccggaggaagcagcggtattggaaagcagattttgcttgatctgtcaaagttgaatgtgaggactataattgtcgatgtgaaggagcccgatttcagattacgtgagtcgacgaaacctatgtctttgaaattggaatattttttttggctaatcacctgcgacacagctccaaatgtattctattatcaagtggatatcacctctactgctgccttgaaagagacagcaacgcagatccggagagatcatggccatccaaccgtgctaatcaacaacgccggggtaggattgtcagggaccattctcgaagaaccggaggagcacatccgtctgactctcgaggtaaacacgctggcgcacttctggacagtgaaagagtttttacacagcatgatccagaacgatcacgggcacattgtgactatcgccagcatggcaagtttcgtggctctgggg

SEQ ID NO: 10937 - DNA, 164 bp, Emericella nidulans
  unsure (1)..(164): unsure at all n locations
gggcgcgcaggggtcgtggctattggaggaataagccacagtcgcattttgcagaggatcaaaggtgttctcagacgcattcgacttggacagatgtctagcatcatcacgttcgagactatgaatantggctattagttacgattttccaattaatgcacttc

SEQ ID NO: 10938 - DNA, 599 bp, Emericella nidulans
tcgactctagagatccatcggtatatctttgcttgaaactggaactttggcatcttcaattggagtttgtgttcatgtgtcagctttggcgatgctggggtgtgatgtggttacaactgaccaaaaggaggtattaccactgctaaagaggaatgtagaatggaatacgtccagaatcgtacagatgaatcctggttcaggtttgtgtcaatactttattctctagtagctagctcgcttcttttactgcttctatctacagctttcttcattttcttatgccaaggaaaagtttgtagaactaactctcgatgtgatgcttactttatccaggtacaagaaaatcttgacttgttataattactgtctaatgaagttttcattccttgtggcagcatttggatcgctccgggttgcagaactcgactggggaaacgaagatcatataacggccgttgagccccctttgactatgtcatcggtactgatgttgtaagttcatcggaatcttcaaatgattcactctaatcatgtaatctagaaagactgaattcagctcaagggagactgacctcaccttaaatttggttttaaggtat

SEQ ID NO: 10939 - DNA, 1442 bp, Emericella nidulans
gcacattcgcatgagcccgcaagcgtcaacaagagccgacctgccgcactgtccccaagactttcgggtttacaatcagctgcagataagatggactactttgtgcgtgtttcttccttctatcctagaataattgtattgatactgtccctagcacaccatgcttcgccacggttgggacattcagtggaaggccgcgacaacaggccgacgaccgcagggtatgtccatccggcaattcatagcagaaggcctgcgctttgcatcgcatctagagacgcatcatgccattgaagaacaacatatcttcccgcatctggcgctgaagatgcctgagttccgggtgggcaaagggaagcataacgccgagctcttgcggcagcataagcagattcacgcggggctggatgggtttagggactatctagagaagtgccttagtggcgaagaggatttgcaacttgatgtgctgaaggtgaagatggagagttggaaggatgtgctctggacgcacttggagcaagaggtcaaaacactaggggcggacaatatgaggaaatattggaataaggaggagatcgggaggattcctttctgattcataaatattccataggtggcatggtatgagcatgtatatatgggtatccaataccgtcgaaggcgcaaagggcaacatttcttcgcttcttcacccttccgtattcttccaaggagtcggacgattgcagacagccacggacttcgcatagcagtgtcaactgccgctattaatagctgcattgcgaattgctatcaactatgcccactcgctgacgacgctgaagggaggtaacctgcgtttacaactgcgtttacaacggccacacccatagtccccagcgggtttcgtagcttcaatctgattccagttctaacaagcccatttactaaccttttcccatgccctacctttgaagacagaaatgttgggagcaccgctaccgccgcgcctcttttaacgaagagtccaggcgtgtcccatggccactgtgatgcagtattgcaacagctcttcatagatgaagcctaccaagcgggaacctacgaaagccagtagttgctcttcttctcaggacagccgctctcagccaaagctgttgactagctttcaccaagccacatggtgcgactaccggttttcccagtacttcacttggctctctcttcactacataaatggtcctcggttagggctaggtcttataacgatatggcaaggccacagtgactaggcagttcatcacaatgagtcctcagttaacatggtattgggagactactcccactgtctagagatctatataatcgaatacgggcctcacctcttggaacgtagagctcactttgatgactgtaaggccaggcataccttgtagatcgagcagtgggacttcgtgctg

SEQ ID NO: 10940 - DNA, 418 bp, Emericella nidulans
  unsure (1)..(418): unsure at all n locations
tcggattctgacttgggcaggttgtagttcgaaccccccgcaaggccacgcggcacaccgagcgcacgcaaaggccccaaagccggacccgcccgaagcggcgcggcgaaagctcacggggccggcgcaccgacccgagcaagcacacgggcgcagcgcgaacccacaacgaaccggaccaaggaagncgacgaggggcccncagacggagaacgaacagaacggcaagagaccaggacgggcaaccagaacacgcgcgaggacgagacaaccacacagagccgcagcgccccacgggacgaaagcaacgaccagaagaacgcgaagaaggacagggacgccacgaacaggcacggacagaggacagaggaacaccacaaaaagccgacacgacaagacgacaagcgaacaacgggcg

SEQ ID NO: 10941 - DNA, 1945 bp, Emericella nidulans
accataattttagaactttcatcgttataaattagacatacgcacggtaatatatagacaaataagtttcgcgctaggacaaatataaaaagatccctatagacaaatcattgcgcatcaaccgtttcggcattcaaaaccgtaggaagcaagatgtcgagagaaaactagcacctaccaggggtagtgttatacaggaccaaacatggtgcgagtcccatatcaagtatcaggactggttaacggcgctgtagtctgattggtcttgcgatcacaagtagcacctggcagacaaattagatagatacctaccatgactggcgatcttgtggtaggcggtcttgttgataataagcggggtcgatgaagattagattgcttttgttcgggaaaacaagctgctgtaaacagcatcgacgacaggttgcgcagtgatttgtctgccgccgaagaagcgcccgttcaggcccttgatggcgttctctccaccctggacgcggtcgaacttcaggtatatgtcgccctgggaatttggatctagtgcaatgtgaacaacatggccatatttttcttcgcactcagcgcgaacgtcatcctccagctccttaacccaggattcaccctcctccctacagatttggtcagcaaggtcagcgttatagatgcaggtagggtgtacgaactcagccgggtcaaacatgttgcgaagcaaaacacaccgactcgccatgttgacattaaccggtaaaggcttgggttcagttttcggaaggagtatcttttgctgtttgtcgtctgcggagggctcagcaggttcatctgttcttgcaagtttcctcatcaatgcgtctctactgaagttgttgaagttcacaccggcaacgtctgtgtcatctagggcactggcagcggttcccttctcaggctcacgaccacccgcacgatcgaagttgctggtgcctccagcctggacaccacgtccgccagagcccgagaacatagagccctgaaagttactttggtttgcactctggctctgggtacgttgagtgttctcgggggtgaacttatcattgccaaggccgacgcggatagcccgaccaccaaggtcatagccgttcatcttttccaatgcctcccgggcctggttggggtcacggaacctgagaatacagacgttattattgtgcagataatacagttcagggggttcgggaacttactgcacgaagccatagcccctgctcctaccggtttcgtccttttgcagctgaacgaattcaagttcgccatatggctcaaagacactctgaaggtcattctcatcgatactgaaatggatattacccacataaagcctgtgaaaaggggcggagtgtttattgccactgcttgcctcggaattgcgggcttggcgattcttttcggcttcagtcaattgcgcaatgatcggaattcctagaagtttttgtcctgtaagctggatagcgggcgcaacggaactctcgtctttgaattcgacataaccgacactagaatggacttcttagcgatagacaaaagatagggagaaaggatgaaactcaccctttggaccttccactaactcggtctttgacgatttgagcttctttgacaggtccgaccttttcaaagaaggcaatcagctccttagttctcagtcgtgcggcgagttgctgcacaaagatagtacgccggtcgcgttcgtcttcgttgagttcagggcttctatctctcgaatcacttcgtttgcgaggttcgcgttcacggcgaggtcgcctttcttcatcacgctcatcccgccgggaacgcgctgaggggcggtaatatctgtcatcataaggagatcgagatcgagtgcgtgcgcggccaccgccacggtagtaatcaccattcgagcgatagtcgtcgccgtgtcgatcgc

SEQ ID NO: 10942 - DNA, 525 bp, Emericella nidulans
ctgcagtctagaggatcaggatcccctgccataatgtgatgtgtttccaatgccaataaaaagtaacccatccaatagtatttaacatccagaaaactgccaaataaaatgcgtcccaagccgaaatatcacaagtaccacctcgtcccggaccatcgcaaggaaaactatacccgaaatcctttttatctggcattaacttggaaccacgtgcatctaaagcaccttttactaagatcaatgtagttgtatgtaaacctaaagcaatagcatgatgaaccaagaaatctccaggacctattgttaagaataatgaattactattctcattaatagcatttaaccagccaggcaaccatatgctgcgacccgcattaaatgctgggccacttgtcgaagataaaagtacatcaaatccatatgaagttttcccatgagcagattgtatccattgggcaaatataggttcgatcaagatttgtttttcgggagtaccaaaagcaagcatgacgtcgttatgaacat

SEQ ID NO: 10943 - DNA, 2198 bp, Emericella nidulans
  unsure (1)..(2198): unsure at all n locations
gccgttaaatgcttgctttgcgttctaatgaagcgtagaattattactccaatcgagatttctttatgatcccaatcattgtatcactgttaataaggttttatcggaaatgcttcttccttcaagcaatgcgccgcttatcccatggtaacttcgcaaggcccttctcttccagttaaggaacgcgaaccggggtatcgaggaacagccccagcgccgatcggactcgcctctcctccgactggctatcacctcctagtctataaatctcggcgccaaggacaaatcaccttcacccgttgatttagcgttaattggcatgagcttgttcattgtcactctgctgtctatcaagtctccactccgtctcatccccagtgatgatcgattgttatcaaattccctcatcttgcctcattatgtaacagttcagcttcccccgcaatatgggtggcccagcatgttgataagcaatgggggcgaaacacgcgagtcctgggaacgctgcctgctatttcaagtcatttgttccaacgctctcttgtgaatcgtttcttgcatccatttgccttgttgactcgttggttatactggcacgcagaagcatatcacattcacgtataccatgaaagacattccagcggccgatgatattcagctggctgcccttggcgataaagccgagctgaagcggaatttctctatgttgtaggtattcaccttccgtggcctacttctggattcttaatgtttgctaccaatattgtcaaccaatttaggtcgatgctgggtctagcctttgctattttaaacgtatgttgcccacatagatggtgaccgaaccaggacttgagcaatggatggggcactcacaatctgcagtcatggactgctctatcaactagtttgaacctcagtcttccgtctggaggctgcaccagtgttgtttggggtaggctcaaggattgtaacgcatacgtgctctgtgattgaccggttttgcaaggcttggttactgctggcgtttgcaatatttgtactgccgcatcgctcgcggaattcctttcggcctggcctacgtgagtgcatggtccgcttgcagtggtagacaaagtctaatggttgagtagggctggcggacaataccattgggttgcaggttcgttctgccacacctacgcgattaatcatgattgatcttactgatacgtttctgaacaatacagctagttagtgcttcctgagcttgcacaaaaatgctcttgctaaaaaagcattatagtctcctggaaacgacaaatgccaatgttatcctgggttacaggctgggcgaatgtggctggctgggttagtataatcttcaatcgaatgaaatttcgatttcgtgaaataatactgatggttcttagttggctctgactgccaccggaggactgttatcaagcactcttattgggggtatcattggcctcgtttatccggtatggtaacaacagctgtgcttgagacgttcggttctgatccagagtcctagctgtttgagtttcagcgctggcaccagttcctcatttatattgcaattaacataatcgcattcgccatcaatgctttcatgaacgtgggactcccgctggtcaccaagagtgcttgtatgttctagcctatccgaaggcttacttggtaaggctctaggagtactgatgaatgtagtcatatggtccctgaccggattcgttgttatctcgatcacaatcttgtcatgcgcgtcgccagattataattctggaaagtacgaatcaattcaccctgctaggacgacgggagctgatatgtctaggatcgtattcggcgaattcatcaacacgacaggctgtatggctcccttacttccttgtcgttgaagtgaagctcatataaagcagggcctgacggcgttgcttggctgcttggcgtgactgccactgcatccgcaaagctgagcatgatcgctaaccccatgacagctgctgcaaggtggcttcggtctcacaggtttcgtatgtgacccctaagtttgactcaactccttgactgacggttgctcaggatggtgttgcgcatatgatcgaaggtaagcaaagagaagganagatcatcagaggcttcgtataataatccagttccagaaattgcaaatcccacagtactcgggcccagaa

SEQ ID NO: 10944 - DNA, 2278 bp, Emericella nidulans
cgtcgctctgctcgccagtagccactgtacggtaaacaccccaatcttcatcgttggcgccgaaatcatcatcatcacctcctcttcgtcgctttttagggccgtccgctgcgaggttggcgagagtcttcatgcgcatctggcttgctaatgacttgcggttgcctagatcggctttcatgcggtcgcgttccttgatccgttgaaggaggttctattgccctgttagctaagtcttgtagttcgcagctcagaagtcctacctggcgctgtgctctccgttcagcgacccagccctcagggtcgttctcccgcttctcgcgatcaagccggagttcttcatcctttcgcgcttgttcccgctccttctcttccttagcacgttgccgtgcgtcgacattggatttcataagtcgctgatgacgcttctccttcaacccagcctcgtctagctcttcgtctggcacatccagtaatgggaacgacatctcctccgatgcttcttcctgctcttcatttcctaggtctttgtttctcgatctcttaattgagcgctcaagatcccgaattagccgctctagatgtgcttcgtctttcaggtcctcggcatctagaatgcgtgtcttctcctttttcgtctcagactggagaccacgctgtaggtccttgtagtactccagttcttgctcctttttcatcaacttttcgagtcgcatcttcgcagcttgttcttgcagccgtcgcccgctctctttcttcctctgtgcgattcgcgcaagttcctcctctgttttctccggtacgatgtgctctgtaaatggatactggataacatgatcacggtcttccaatccggtccaatccaggtacccactcaattcccgatcgtagtcttttgatacataacaatggttatgcattaagtcttccatctgatgctccgtcatcttccccgggaaagtcgggtatttgaggcgcataagctttaacagatactccgaagcgtgcatgccaccgaaattcaggcgcgagcaattggaaagtaaagccttcgaattgagcaccgggataacatgcgtggatgtatgcgaggagtcaactataagaccgtctgttccgcggttatatcggtacgaaaacagcgagtcgattccgtaggcaacggacggggcggagtaacattcgaacaggatttcgttcatcactatagacgtcagcaccagcttcacctcgcatgcagtcttctcactttttctcgggtagtttgggtttgcgataggctccgtcataacaatgggcctgtcaacgcctccattggccccgtccacaccgagcttgataaaaagatagtccaatactccttccattacgtcccagtttcccaccacgctagtaccgggatcgaaggcatatcggagctgtccgcgcgtagtcgcatcgacgtaggcatcgtgtccgatgaactggcaagccttgttcaatttccggtctcggtatcggctcatcacagggggcagtataaaccggggattcttgtcaaacgaccagccggctttgacgagatgagaacctagccaatgataaggaatcaattgccgccctagcttgatatcatagggctgtagtccgcttaccattatcgatgactatagcgctcgtatcgggcctggatctgctctgttcgtaaccatcgggctgcggaggctgatagcctttgaacggacgttcgtagacattaaagattttgggaggcggcttggcggccccctgctcggatgaattgattgagaaccgagcagggagaatagactgtattgatgtgatcgccatcgtgtgaggcgtaagtcacggagatctcaggagcttccagcgagagatcaccacattgctgtctgtcgcgtacgtcggcgaagtaagctgcgcgagctctccaggaacaacgggtttgcgctccatacacagttggcagggtaatgagagttggttagtggtgacaatgaaggatgggtgggaccccagctttgacgcggtggaaagtctgccaccgccggcgtttgtatctatcgccaagaccattcactaaagtatcttggcgtcgctatgttctcacaaagcagcagttcgacaatactatttccctactgattagatgtacagaattcgaggaacgattggctaaagaatttaggtctaatacacccgcctcatggttactcattaacatcaaagactatgaagtaccccagactacattcacgatggttccttcaaccttggc

SEQ ID NO: 10945 - DNA, 2025 bp, Emericella nidulans
caagctcatcgacctgaacacctggactcggatggctcttcctcttctactgaaagcggagcatcatttgccccttccaagcgcaaaaagcctggtgaaagagactgtctgtctgcttgatagcgatcccattaacatcaaaaatgactctctggtcgacgagcttatcgaaaagtgcgagggagacggaatcagcaaacatgacatgtctctcgggccaagtgacaagatcgagtggatagctggtggtcttcccaaatcgacagagatctactattccatcgtctcctgggaaaagggttgcgagggcccgaatcaaaatccggtaaccccaatggtgggtcttacctgcaaggatataacaaagaagcactttgaattgggttgcattagacccggtaatgttggtgttggtggcacaactgttgttgggtgcttgcgttatcaatcatacatgggaggttaccctctgggggaactccatgagggagcgatgccggacgctagataagatctaaacacatatgcagtttacataactcaacctcctaattctacctcagacttctcatcctttcagccgtaggtcaaactcgccatgtagggcaatcaagtgggaagtcgagattgcaccatacgttctacagatgggttgcaaccatatatagttcgacgaatattgcaaaaaacaaaactcaagccaggtacgcatagagatgtgctgtgtcggagattctccgtcatgttgatcagccgagcgcttttagtagccgagagaagttacatgccacagaaacaacttcgacgacttctccatcttgcacagacctaggcttgcactatcttgtagctctattctgtcatccactgcctccagatacctgttctgtgcatttttgctctccgccctaagctccaatatttgacctcagaactgaatacgatcccctaatgatgtcttccaacccggaaattgatgtcctagtaatcggcagcggcaatgcgggcctctgttccgcgatctcagcagccgaatctggagcaggtcgagtccttcttatcgactcctgccccgagcactgggcaggaggaaactcctactttacagctggagctttcagaactgtccatgccggcctaactgacatccttccgctcgtggacaatgtcgaccaggagaaagcatctaaaaccgacgttgagccgtacacaccggcagatttcttgggtgacattacgcggatttgtgtcggacggtcagatccccatctctcaaaaacgcttgtgggggatagcaacgatgcggtcaagtggctagcagagcatggagtgcgcttccagttgagttttaatcgccaggcgtacgagattgatgggcggttcagattctggggcgggatgtgtttgaagacgcagaatggggggaagggtctaattgaggatgaacgacacgcggccgagaagctaggcgttgaaattttgttcaacacagcagcgaaacggcttattcttgatccctctactggtggtatccgctctgtgattgtgcaaaatacttctacctctatatcttctggctccactcctggattggagctcggcgaacgagaaatctttaccaaatctgtcatcctcgccgctggcggcttcgaagcgaacccccggatgagggcacagtttctcggtcccggctgggattttgcacatgtccgcggcacaccgtacaacaacggcgtatgtctcgagatggccatccgcgatgcatccgcaaagcaagcggggaattggtccgggtgtcactctgtcgcatgggatgcgaatgcaccagctgactccggggaccgggaaatctcgaacgaatttacgaaatcggggtatccgttgggacttatgattaatgccgagggaaagcgatttgttgatgagggcgtcgacatgaggaactatacatatgcggtatttgggaaggcgattctggcacagccgggccatgttgcgtttcaggtatgggacgccgatatggtg

SEQ ID NO: 10946 - DNA, 531 bp, Emericella nidulans
ctgcaggccagaggatccccgtcgctagtaataatgtgggtgctttatcctttctgctagtggaattctgcctcttcttttctgtcgccgtcttaacagtcatacaagcgtcacaagtgagccctcattcctttttccttatctgcacatctttgttcctcatacaaaggctgctctttcgtactttgcttccccggattactcatctctagaatagctccagagctaaaactcactaagtagactagattattcgattttcatggcgtggtgttttgcctcatcctgaagatccattctccctattttcccttacagatatcaaggaacataaccacaaatgaaatggccaacgccctgcggtacagctacctaagaggtccaggtggtcggtttaggaatccttatgatctcgggtgcagaagaaactgctcggacttcttagtaaaaggttataacgaagatattgagtgtcatgaagaagacgcaacacagagaccagagggtattagcatgatgcagatgcagcgg

SEQ ID NO: 10947 - DNA, 1989 bp, Emericella nidulans
gcgctgctcgccacggaagctttcgttgatgctgatttgcttccttcctcttgcggagtcggataatcccgtttgtctctctcgttgaagtccggagcgggtatgggcgaagttgtgttggaacttttcgcaaaattggcggccggggtctcaaaatctcccttaggggaagagtaagaaggagtttcatcattctgggcgttctgatgcgataatagtttgtgagctggggtaaaaaaaaaacttaggaagtgagccacaataaaacttaccgtgccattggtgtcttcttgcttgacttcgggttcatcagcggggagccaagctactcgtattttgcgctcctgaatagctgatttggtggctttctcaaactataggtcaattagagaatgccatgtagaagtatcaagaacacatacaatggagctaacattggcgaattccatatccttggtgaccgccacagtttgaacaaggaacttatccttgcatttcgcatccggagctggttcgtccttcatggcctgcaataacactgtccatataatcaaccacccggttccgcagaaatcttcaagacacggaggcataccctggacttccacatgcttgcctggttctatccgccctgagttgggtcggacacagtagcttaaaataatttagtgagattcgactgcgaagcaggcaggatctatcacgtactgtttgggagcggtggttttgacctaacaaagtgacaaacgttagcgtacaacttaggaattgcgcggtacattaaagcgcataccttgaagacaacggcgtccgggttgttgttagtgaggtgcaacacttggcatatttcacgattgaaggggcctagttcgcaagtcaatacgcccggttgaatcataactcaagaatgctcctagagacgtacgtctaaagccaaggtccggggggtcgaggaggatggacatggtggtaaaatgtgatggttgttcgctatgtgggaggactgcacagaaactaggaggttgtttcaaagggcaatcagcccaagataagaggagttatctggatgaggttgggccagcagcgggagtccaaagacacggcggtacctgacgactgggtgagggagtcggaatagcaggatatcgataaaatgggtatagggagttggagatagtcagcgctggcagttgtgatttgaagccagacaccgaagttcaggcgcaaccaaaccacctaaattactgggggaagagcgtcgcggctgctggttgggccggactgctgactcagccctgctgttgggtgaagtcatcattgccagcgcgctcgtgaccctcccactccaaaatatctcttgatttcatggcagaattactccgttctctctatttacttatgggtcattaattgagcagttttgcggatgaatgatggtgtcactgttcatgggatgagagattcctcgggaatactgaagcagaaacggttcctagatacggatgtggttcctgaacatgtgatgctggaataacatctttcttccctggaagagcttcgcttactctcatagcaaaacttttttttttttgccatggccacatacatatatcattcggtttgtattcagtcatcgtcactgctgacacgagttcgagaacgccttcggatcgatgagtgcatgcttgctgaagtcaatgttacagcaaacacccgtgcatgttgccgacgtaccaaaatacttacgattgttggaccagagactatcttatgccttcatttcaagctaccgatattctaaacagcgatgagaaagcaggtcggaggtcaatagggattgcttattgggggccgcgtttgactgacagtaccaagtttccatattcgtagggttccagctttgtagtagtggggaccctttttttaatgtctaaaggccgatttcattataccctaaaaaggtggaattcaaccgggtcgactgtttac

SEQ ID NO: 10948 - DNA, 490 bp, Emericella nidulans
  unsure (1)..(490): unsure at all n locations
ggaacggtggattggcagccgttaggtaacgacccacgagagggacagcaggaggcaggagacagtggagggaggcggacccggaaagcccaacaagggacggaggggcaggaccgaaggggcggcacgcagngcaaaaancaggacgacgagccagcaacgaaccagacgcaagcaccaaggaagagaacagcaacaaagaggcacagggagcaagggcccgacaagacacaagaacaagagaagggaacggacgaaggcagcggggacgaaaacagacccacagaaagaccgaaacaagacgggaggcggagacacaagacgacagcagggacgaacagccgaagaaagggaaaggcgcgcaaagaacaggagcggggccaacagaagaaaagacagcacggccaaacagcagcgggcggccgcgaaaaaaaaaagaaccgacgaaaccggagcaaacgcaacaaaaagacagcgagccggaaaacga

SEQ ID NO: 10949 - DNA, 1584 bp, Emericella nidulans
  unsure (1)..(1584): unsure at all n locations
tccaagaaaagagaaaggttttcactgcaaaggataagctgttgaagagtgccttgccatcgtgtagtgcgtgagatgtttacaaccagaacacggtgctggtatcaatgctgggagaaatctcccgggtcgagtagacaatctccagagacggagcctatttctgcgaatatggctttggaatgaatgctacaagttctcgcgtcagtgcagccacagaaaattgacaattgccaatcaatgtgatgcttgcacttggagacaaccgcctgctcagtctcactcctctccctacccctgtcctataccccctgtcgcagcctaaccccgcgcatataattagataattttggccgcatgcgcatatcttcctttggtcaaccttaggcatggtgcggggtatcaaacttgcggttgcacaagagcataaaaaccagcttgagtagcaacaacatgaagtaggagcaactgcagcttctgaatgtgactctgtgctgtccatcaatatgtctgccacccaggttgtcaagtctcacggtccattccaagggcttcccacctatccccagacacctgagctctccgatctgtgtgcagtggtgactggcgcaaatggtctatccggttacaatatggtgcgggtgttgtcagcagccccagagagatggagcaagatatactgcctgtctcgtcgagcggctccgagcaacttcttcactgacctgggtgatggtgcggcgagggttgagcatatccctgtcgatttcctgtctgaaacggcggagattgcgagtcggctgagagaggatattcccaaagtgtatgtcaattatccataaacttcaagttgttgcgccaactctctcaccatgctcagagactacgtctttttcttttcgtacatgcagccagaacaggaaggtaatgttctaggcatgtggtcggatgcggaggccctgaccaaggtgaactgtacgaagcctctttcctgcgttttcaaatgcaaaatcgtactgagattacagctactatgctcaataacttccttggtgctctccaagaagcaaacctgcacccaaaacgcttcctcatccaaacaggcgcaaagcactacggcttccacatcggcccctcaacaaacccatccttcgagacagaccgtcgagtttcgcttgagcaaaacttctactatcttcaagaagatgcgctggcagcatactgcgccggtacaggggtcggctggaatgttgtccgcccctcctacatcataggcgccgtgcgcgacggagccctaaaccatatgattggcctggcgatctacgcagctatccaagcgcacttaaaccagccactctacttccctggcgactacatagcctgggaccgcgaggtctgccagagcacggccttgttgaatgcatattttgaggaatgggctgttttgaccccagatgcggaaaatcaggcattcaatatccaggatggcatgcccttcaggtggggacggatatggccgaacattgcccaatggtatgggncgacttgaaaggccccggaagttgaaagggctcagtatagggcccc

SEQ ID NO: 10950 - DNA, 505 bp, Emericella nidulans
gtcgactccagactctgagaaggatcccctagtggtatcccacaaaattttcgaagaatgcagcagtagtttcaaagacgggaagaaagaaacaaatataggttttgtattatcatcactaacaattgaaaaaatcaaatggatcaagagaaatgagttactaaacctcaaggaatgattcagcagcaagatcattgggtagaaacttaatcaaagctctctttttgttgacaaattctgagttagcttcaatctgaaaagcaaaagagagattgaaggagtcatcaacacacaagtcaataaagtcggttcttttattgcaagtacaagagacataaagtaaaaccgcatttctctttttttctctttattacctggctgatgagttgcttcatttctttcctaaacctctcagctttcgtggatttgcaaaagctacgcagccttatggtcgggataaatgatagttcaaagaaagcaacggaacaactccactgagacaaat

SEQ ID NO: 10951 - DNA, 1382 bp, Emericella nidulans
agcatcctccacgaccttgaaaagcctttcttcaaatccagggctacccgcatcaccgacggattccaagatggaaggggagaatctgcggtagaggcaagagccatagacagcggcagcaacgtcgaatccggaccccacctttccttgagcagcacaatgggcggcctgcgccaggttgtgcaatttatcacgagccgcaccaagatcatccggctgcatggtccgatgaattaccatcgcggacaccaacgaagtgaccaaggctgcagatgaaccaagaccagtcttgtgcgcctcatggagaggaacaccaaagtttacgaatccccccgccttgcgctctgaagcctttgagaatgcctgttccgagtagtagtcattgtcagcaaggatagtgatagacagtgatccaaaatccttggaatcggccacgtagctgatataagttaaagcgtagttcaacgatgtttcgacaaaaggattgcacgccttaacattgttagccatattcattaatcaaattcgggatgctcacccatcgttcttctgtacaaccttgatcccaccgccattgtcgacgcgctgaatagcatattcccaaactgcaccaacaaattgaggtgagcgaacgacaatcaggtctacattgtcattctcagcttcggcgcttccgttttgtactttttgcccctttcgcaattgttccacgacgacatgaatccgagcattgagagcaaagacggtgcctgtgtaattccggtccagaacgaggtaaccaccagtgagcaacaccttgccgggggcggacacggccgtggttactgaggatttgcaggacatgacgaggggctttggtcgtatttcgagacggggctttcggacgtgaatcgctcgaggttttgactgagatcactataaagcgatactggaatcaacaagcaggaataagaagcgagtacggtgccggtgagggggtattaagtgattcaactgcggtggtgtcgaaagtactggaccccgcgtgctccctgctgctgaccactcaagggaaagaaggacacggaaaattgagaaatatgattaaaaggctctgtggagaggaactcgaggcatcatatatcagggcgacatccagttaccgtcctcattttggattgttgtgtatgatcgactgaacatcgtcagttgtgcccgccgtactgtggctggagctgacgaatgtggctagtgtatgcctgaaaaggaagaattcaagattgctccataggacaaggagtaaagattactccgaggtcaacagtcaatcagtatctacgcagtagagctaggaccgggatagggtaaaaaagtacaaaaagatgtccttcttccacgatcaa

SEQ ID NO: 10952 - DNA, 378 bp, Emericella nidulans
gatccctattggaaatgtgcatgtcaccgcaaaacctttctattgctgacctgggccaaacagagcaagcactaacatacctgaaaaattcgggctttaaggtggattggttggagcgtaaactggaggaagtaacggaaaagaagatccaagagcacattggtaagtctcggatgcaaggattagaggaagacctgaaggtcttcaagaagaatttgatctgaaatagaagctctactggagaaagagaaggaagaactcaaggacttgaagcaaaagtgctcggacacagaagctctgctcgagaaagagaagacaaaggtgttggccgccgccagagctcctcctctaaccttggatgatgttgtctcatgactt

SEQ ID NO: 10953 - DNA, 463 bp, Emericella nidulans
ggtcgactcatgaccacaagctagtctctccctaagcctccttatcccctgctgagaaggtgtcaaagttctttactatgatttgcaaggtcctctgtgaacaggaccctgctcactctgcctcacctctccccatcctcacttcatcctttatcctctggccttgtgatgctaggaataatgacccccaaaggtaaccaagtcttaattcctggaacctatgaagcattaccctacattgcaaaaggcaccttgcaggtataattaaggatcttgagatagggaaattatcctgggttatttcagtgggccctaaatataatcacaagtatctttatcagagggagattagactacagaagaaaagaaggtcatctgaccagggagacagagactggagtgatgaggccacagcctaaggaatttggtcagctaccagaacctaaaagacacaaggaatgaa

SEQ ID NO: 10954 - DNA, 2381 bp, Emericella nidulans
ccaaacgcaatacgtgttgaagtaagtcccggattcgatactagcagtgctccatactgacagtggtagttcgcatgcgaatgttcactcacaagatcggcctcacttctgtccaattgaaggctgatcacgtggccctggagggaaggggtttaagcgcaaaaatgaaatgattcggcatgggctcgttcacaattctcccggatacgtctgcccgttctgtccagatcagcagcacaagtatccgcgacctgataatctccagcggtaagccctccttatatccggattgtaaacggccagctaacagccaaaggcatgtgagagtccatcacatggataaaaacaaagacgatccagctcttcgacacgtcctctcccagcgacccgaaggtagcggccgagggcgacggcgtcgaatgaatccccaataacatccacccttaaatgatgcctgctccatcacagcgctgttctattctgctctgttccgttaggagacggctttctccggcattctctggagaataacgcggccattctctgagtggttcaaagcacatgcattacgatatcctgctttatttcctcgactcgacttcgcttctagctttgtttcgactagcgatgcgataccagatgttaattctagaacatttgtgctttgctcggtcattcgttcttgcattcactttgctcccctcggccgtaacggggagcaaagacggagcgtggagtgttacctggtttcggtttcggcgtacttgatttgatctttctgatctctcctcgttcgttttgttctcgcttttctcgtctcctttgcatggtattttcagcgttgcaagttgtctgcatattacggggtcctcgtctattcattccgggaccggcgtctagggcctgaatttgagttttgagtatcatcttagttcgaggttatgggctgggctgggctggtttgatggcgttgtggaagaaaggagattgaaaagaaagggaaaagaaaaatgactttgcttgacttgaagaaaacgcagccagctagccaggcctgtaactatgactatcatgagtatttaactatattttcaacaaattacacgctcatctcccaaaaataaacagccataaattgaaagccgaactgcaccatgaaacgcaagcagaaggaccgtctcctgcgccgctctatccagttttccttccagaacaaaaaagtacactcgtcttcatctctccatcattcgaggataaatagatggatatggagacaaggaggtagggtaggtgtctgacaacatccgatcagagccagctcctcaggcagaacaccaccctcaatccaggaaaaaaaaaaatacaactcaaacccctttatggattctccgaacatgatccttcatattatccactctggaaaacacccttgtgcagccctcagcagcccactcacacacaatttccgggttgtgtttagcctcatgacgatcacggtccttcttagagctgaatccggcccctggtgtctgtggattcgactgcggacatccgtcgtgtcggcagaagagatgtttgcggtgccggttgtagtgcttacggagatcgcaaccccgtcggaacaacgagggcgaagaacaggatgggtaagcgcaacgccaggccccggggtgagttggggagggaatgccatagagagaaaggtctttgctgttggtattgttgtgtgttgatgaagcggaggttgtggagggggtgcgggacgggcactgggcgtggctctggttatcagggttgttggaagggtcggatcgactagtttggtagtggatgtgatggtaagaaggggaaggggaagagaaggaaccttggtcgagatcaaggtcgaagtcgaagtctggatcaaggtctggggacgggatggcgtcctgataagactggtgttgatggtgtgaggcggcttgtgaggggtgaagccattgtgtgttgctgctactgggggtttggctcaaagttgtagtgggatagtattgggtttggttgacgtaggtttgaggttgaggttggggtgctgagtagcaggagcccattgggtcgagctgactgctggcgccgtagaagtactcatccggcacacggacgggattgtttggcattgggcagaatgacgctgctgaggcgtagaggatagaattgtcaggcgcgacaatgaggggttcgtccattgtggttttgtagggctcagagtcacggtgtctcctctggaaattgttagtttgatagagactagattataatgtgttttgcgacgtacagatctgctgtctgccatattccatgtctttctctgcgttccaataaagtactgttcgcggtggtgt

SEQ ID NO: 10955 - DNA, 1785 bp, Emericella nidulans
ctataaataatagagagagaaggtgagattgttataaagagaaatcaaaaacaaaaaagtaaagagtaaagaattcaaacaaaaaaagaaaaaaaaaaaggggaagtaataagtgaggaaaataagataaaaaaaaaaaaacaccaaacgaagatcaaagatatgataggggggtaagaaggtggaaaaacctcttaaaaagggggaaaataacataaaagaatgataaatattcttctggaaattataaaaaataaattttaaaggtttgtaagagaaaaaaaacataacgaccaacccccccccgaaatgtaggcgttgtatatttctccagattaagctcaaaacccatacccccccaatccccaggtgccatgctgaatggccatttctctcaccggatgttgcccataaaataccccttcttccaaatatggatctggggccgggggccaacaacttcccccactcatgtatgccatccacacgcaactcactcgcacccctccacaatcagcctcttgcacgagtcaggggactaaatggcgcgaatcgacgcagatctggattggtgggtcagtaggtggcctccaagtctgtcgaagggtccctccaggaaaactgaccgcaagaacggggtaggacatggggaagaattgcactcatccctgccacaagtcttcctagacaaataggcgcaccttacggaagggatgcgcccgttatattccgtgccacttgcgtaccactgttcaggaccgcctagtatataggctggcatctgtcgaggtggtttcaaccccggtttttagcctccccgggctcttcccatagctttgtttaatcaacctcaatcactgacacagtttcgaccaccgtagttgaaccgggtagcaatggcgagcgtcaatgcagattacgcgttctcgatcgagtcgttcatgcactcctaccgccaggacatccatccttcaaagcatggtgccctgaaggtcgcagaggcatgtggcacggctctcagacaggcacaaatactgcacgagatatcgcacaacaccattccgaacgctaggttggaggaagagttgaagctacgcgagaaattccgaggcaagccgtatgcgaagaaaggcgaaattgagacagatatcgttgacttggccactgtgttcatccatgtgcacctgcctcgagacaagagccgcgttagaagaattctcagagagacgtttaaagtacagtctgaacctaccggggcgatagacgatgtgggcaccgaaccagagctaaccaatatggacgcggagtactactgggtctcgttgggggaggaagtgtggcctccaagaaacgttatgatccaagtcgaaacagacccaggcgacaggtgtctggagacacagcttgaaatgaacacatttctgcacaagtgggcggccatccagggccgagagatgggccaaggggcggattgcggcgacgttctaccgctgtgggagctgacgcgcctcctgaatttgcgttatgtcaatgatttcaggaatttcctggcaagccttgatttttcagcgggtcccgagagcgctttcgcgctccgggctggtgaatttgcgcccgggctcgagctcagcctcgctatgttcgtagccgattccctgatccgctcggcacaggggaaggagatgatccagaaaacgattgaattctggagaagcagacccgaagcagagcagcaaagggagaagacgaggatcgttagggattcattcatctggcttgttcgtc

SEQ ID NO: 10956 - DNA, 1874 bp, Emericella nidulans
gtcgccgcgttctagggcgagttcggccgatttggatcccgaagaacgaaaagagcgcgagcgaaaacgagatctcgaggagcgtgatgcattagcgaagcggctagcgagcaaagacgacaaacggtcgaaaaaaattgtggaggaccgaactaaggatagtgaggctgcaaggcgacgagcattggcagatgacgccaaagccagggatgccgctatgccagaccttagattgcggtcaagacaggagtatctcaagaaacgagagacagaacggctagctctgctgagaagacaggttgcggaagagacgcaggaattgcgcgagaacccgaacctgacgcggagggagaaagaagagtttgcgcgcaatcgtgaggtattgcgcatcgccgaggaacgactacgcattgacgaccatcgtgacggctatatgatgccagaggactatattacggagaaggggaagattgatcggaagaagaaggaagatgctctctacaagcggtatgtggagcgtgatgaactcggccaggagaaattcatcacggagcatgaggaatgggaaatggaacaaactgcgaaggccaaagcccagatcaaccgagctgagtttgtagatgaaggcgattacgagtatgtctttgatgatacgcaaaggatcaattttaccatggacgcacagatgaagggtacgcgcaactgcatgacccaggaacagcgcatgttacaagaaaagctcgaccaggcggagcagaaggcacagactattgaagacacccgcaaaaagctaccaatataccagtttcgtgatcaaatcatccaagcggttcacgatcaccaggtgctgatcatcgttggagaaaccggctctggaaagacgacacaacttccgcagtacctccatgaagcaggatataccaagaacgggatgaaggttggatgcacgcagccacgacgggtcgcagctatgagcgtggccgcacgcgttgcagaagaaatgggtgttaagttaggcaacgaggttgggtactctattcgatttgaagacaacacaagcgacaaaactgtgctcaaatacatgaccgacggcatgctgctgcgtgagctccttacggagccggacttgggacagtattcggccctgatgattgatgaagcacacgaacgtacggttccgacagatattgcttgtggcctcttaaaggatattgcgaaggcacgcccggatttgaagttgctgatctcttctgcaactatggatgcgcagaagttccaaagttattttgacaatgcgccgattttcaatattcccgggcgcatgtataatgtcgatatccactacacgcagcaaccggaagccaattaccttgctgccgctattacgacagtctttcagattcacgtttctcaagggccgggtgacattctcgtcttcctcactggccaggaagaaatcgaggctgccgagcagagcttacaggaaactgcgaggaagctggggaataagataccggaaatgattatatgtccaatctatgccaatctaccgtccgatctgcaagccaaaatctttgagccaactccccccaaggcgcggaaggtggttctggctacgaatattgccgaaactagtctgacgatcgatgggattgtttatgtgattgatccggcttcgtcaaggagaacgtcttcaaccctagaacgggcatggagagtttggtagtgactccctgctcgcgagcatcagcaaaccagcgagctgggcgacgcggtcgagttggtccaggaaaatgtttccgcttgtatacgaaatgggcgtattacaacgaactggaagagagcactactcctgagattcagcggactaattt

SEQ ID NO: 10957 - DNA, 463 bp, Emericella nidulans
ctagatcaagaccacaagctagtcgaggcaaacacttaaaatattcgaataaattaacaacccaatacagtatttggaatagctagctactaattaaaatagtagattccgcctgattagttgctgctgtgcatgaccaactgacaaataataaaaagttaggacaatttatacgagaagaatgaatgttagggtaagcgatatatacacacaaaacaaggataagcgatacacgttatcaatttatatcgtggtttggtgcatgttcaatggtcgcatcgcgcacacacgcttcttccacttacatcatgtctatgcccccacacgcaccatttcattacatccgtcaaattttaatgtgttcagtccaccaaaactattaatatcccatctacacgaattatcaagtagattagaacgtttgattgtgactagattttcaatctagtatcgattgtccaaa

SEQ ID NO: 10958 - DNA, 1322 bp, Emericella nidulans
ctctgtacgtgatcgctctcttggtcgggggaaaactaattgtcatagaaatccaccgttcaaaactggaggtacccaaagccatttgtttacacccctttgcatggcgtcggaggactggtgcttcccgccctgtgccgctcattaggcatcacggatttcacgacagtaaaggagcaggcggaaccagaccctgacttcccaacgttacccttcccaaatccggaggaaaacggagcgctagatcttgcagttgagacggctgaccgggaaggtaaatctcttatcattgctaacgatccagatgccgatcgatttgctgcagccgagaaagtcgagtacgtatatcttcgctatgccatggttgaggacgaactaacataagcagcggcaaatggtttttcttcactggtaatcatatgggagctcttttggcgtctcatctattcgattcgctcgagaatattgatactgacacgcgagttgctgttctgaattccgccgtttcctccacaatgcttgagaaaatggcaagggctaagaatatctactttgaagaatccctcacaggcttcaagtggatgggaaatacatctcgcaaactggaggagtcaggatactacgttacctttgcatttgaggaggctctcggttatatgttcccggaggtttgctacgacaaggacgggattacggcggctatgatcttcctctccgcccaagccagatgggccacgcaaggtctcaccccttacactaaactgcaacaattattcgccgaattcggacaccatgagacgcttaacaattacttccgctcgccgaatccagagacaagcatggcgctattcgacgcgattagagctggtcagttcagatcagaaatgaagctggggccgttcaaaatccttcgatggcgagatatgacagagggttatgattccggcacggaagacaagacaccccggcttcccgctgataagagcagtcagatgctgaccctgtggcttgatcgggacgtacggttcacaattcgcgcatcaggcaccgaagccaaggttaaatgtaagtttctcacggtggagcacacccaggggccagttctaacaacgcatctgcagtctacattgagagctgtggctcgtctaagcaacaagccatcgacgctgtctgtgataccctccgggcagtcgtcaaggaatggatccagccttttgccccgtcattgacctatagcaagcaacttcccacatcatctggatacactcttcagcttgattagggtttctctttgagaataatgatgcgttgctggtttcata

SEQ ID NO: 10959 - DNA, 834 bp, Emericella nidulans
ttactctgaaacttcagcggatgcgaacctctcctggagctgaaccttcagttcaggaagttcccagaaagcgtagcagcggctctcagtagtccagtccttcaccttgccgacatactgtccgtcaaactcgacaaaaaaggaggccaaagtgagaaggagcatttgctgggcgaagctggggcgcgttagggcttggttttcattgtagaaggaaactggataagagactaggcaaacttactatttcgcaatgcaagaccggcttccaagcaagaatggctgcacggcctccttgcgatccgtagactcggggttgacccagcgctcaggggcaaatttgtaagggtttttgaagtactcgccgttgtggtgcagggcgtagagggaggtcgacacctcaacctgcggacccgtcagaaaggcaacaaactgtgatacagggagagatacgtacgccagcaggaacatagaccccgtcaacataagcaccaggcgagatgcgcgctcctccaagcggaacaggcgggtagaccctcagtgcctccgtgatgaccgcgttcaaccaggggagtttggcgaggacgtctaaagatatctcatcggtggactgaaaggccgtgcgcagctcgttctggagacgctcacgcgtctcctggatgcgagagcaccagccagatggtggcgcaaatggcgtgcgaagtcgtatggaacccagccagcatgatggcagagaagttttctgcgatttcgtcctcgggcagagtgcttgaatcggcacgctccaggacttcaaccattacatcgcggcgtgtgtgggttgctttgagctgt

SEQ ID NO: 10960 - DNA, 379 bp, Emericella nidulans
atcccctccttgtgtcaccactagtaaaagcaagatgatccttcagccatagacgacatatgttagttgtagataactgtaaatccatatgtcaccactagtagaggactgacaatccgtgatgtcaccagttaggttcaaagcaacgatgatacctcagtagactgatacctcagtaatgtatcggcatagcataattgccggggacttaggatcactgtgacacatgataatgatccatcacgaaaggtagacatagcttttttgcagaggagtcgacatgcttgtgtcaccatcaggaagacgagcatgatacttcagtagatgatacatgacactccagtagactaatggtggacatagctttattccgggggac

SEQ ID NO: 10961 - DNA, 586 bp, Emericella nidulans
gcaggtcgactctagaggatccccggagtttccgagctgccgttatcaccgccaatgccagcttttctaaggtcggatatctggtctcggcgtcattcagggctttactggtatagaagataggtttttcgtcaccacgatcatctcttaccagtactccgctcaccgccgaacttgacaccgagacgtagagatataagatttctgtgagaccccgtcccggacgtctcggcgtccggcgacgttgtactcaagttcgcgcctcttcccggccgaacctcttaatttttcgcgattcaacatagaattgcctttacgaggctaaattctataatcgctctcttattacacagcggaagtctttctaaccttggtttaattctaaccaactcttgtaccggtttcatcgtctttgttccttagacttagatcgatcctttactcggtcaagacatgcatatgttcgctaaccattctaagccaaacaatcgcatattcctttatcctactttcacggtcaattaccaaacgtctatcttaactaataagctagatcgttacataccttggtcaatatgcggatttg

SEQ ID NO: 10962 - DNA, 549 bp, Emericella nidulans
  unsure (1)..(549): unsure at all n locations
accgggccccccccgatttngcattaacgatccaccagtagaagatgaaaacccccacggacacaacccggcgaaagggagaaaatggagggggagcccccgagaagacccacgaaccgggagacgaaagggaggaagccagaccgaaaacacgaaacaggaaacggaccaacagaggccgagcgaaaggcacgcggacacaggaaaacaaaagaaacagagggcaccaaacccgaagacagagaacaaggagggccaaacaacgcacgcacaaaagaaaccgaccggagcgcaaaagccacaangcaaaacccagaaggggcaacaaagcgaaaaagaaacccccacaaaagcaggaacgccagaaaaagggggggaaacgaaaaagcacgggaaaaaaaccccccagaaaaaacaaaaggaaaccccgcggaaaaaaagggggcaaaagaccccaagcggcaaaaacaagggccaaaagaccccccccagaacgggaaggcaagaaaaccaaaaagggaaacaaagggcggcaaggaagggggcaaa

SEQ ID NO: 10963 - DNA, 519 bp, Emericella nidulans
catgtctgcaggtcgactctagaggatccccctcaagaatcaataatagatctcagttcttacggaaaagtcaggttgaacccagatttaaactatagaaatattggtttgatcatgttgaatactgaatgaaaacagtcatagataatcaagaggaagcttaaggaagaactcaactaaattgcaacaatcgcatgatcagagtagaaaaagcagtgtgtagcctgttaaataaaattctattcctttttcgtctaaacacagtacaccaacgttttcattccgatcgattttaacatgtaaaaggagaagctacaagctaagaaagaccaagcaataaacagaagtctttctacacataagtcacaactcacaacaatcaaagctttcttcccactttccgagaaaattcaatcttttatttaatgaagatatacgtacagactttacattgcaatactaaattctatgtacttcaattaaacactgaaaatgataaagttcactttttgagtagga

SEQ ID NO: 10964 - DNA, 573 bp, Emericella nidulans
  unsure (1)..(573): unsure at all n locations
tccttttgctcgataattatttcaaacatattcttattctaaggtaaaatcatgccaactcgataaaatatttcttcatattgattaactttatatcggagaatatatatatatacccctatattttgtgagtatagaacatagaactatgacgtgctaaattgagctatggacaaaatcatatatgagaaaatgaatgtagatggatagagtagtcccacacttaaggttggtacacaatgaataccgttggaggcttcgcaggcttttgttctgtccttgtggcgatgaggactaaanangatttgttacgaaaaattcatttgaattaattttggtcggtatgtgtataatattatacaattctcatatacttctaggtttagacatttttctattttatttttcatgaagtaaagaacacaaactaaaacccataagataatgtaagatagataaaacaagaggatgtcgtcataaatagattggaatttggcatttaatgaaaaagggtgaaaggtgcttgacatacacgcggcgtagtttcttacccggaaagggattggtattgat

SEQ ID NO: 10965 - DNA, 378 bp, Emericella nidulans
  unsure (1)..(378): unsure at all n locations
tacttagtgttcgtgactaacaggtatattcctgtcgggaccaaacaatgtgtccttatccggagagatgatcgtgctgtgcacagataggcctggaactcggtatcaatgctagacacccggcttggaaggacaggctgctcagtccgtcactctctatcggtacatatctgccaggagcagacgctctaaccgtagcgtgggaacagnggatattctcaaggaccttcacatgtaagagccagggagatacgggcttgctaggggagaactgggtgttaggcaggaacactagctccacccatggtacgggaaagcgcgagtatactccgcgtgggtctacatggtgcccgtgcgttgttataacgccctcaacat

SEQ ID NO: 10966 - DNA, 1621 bp, Emericella nidulans
  unsure (1)..(1621): unsure at all n locations
tgatcagttccaagtttggtgatttgtgattttttatcgcggtggcagctcaggatggagaatgacaggtgctggccatgaatgaatgaagaagaaccccgataccaaattcatccctacaaagaaaaacaacaatacaaccacccccccaaagaacaggcaaaagctaaaccgagttgggattctgtccatggctgctcggaggaaggtagggccagtgggattcaagcaacgccataggcctaaatagtgtggttatcaaggaagcgactacaatgcaatacctgatactggatagaagcattctgtttgtgtaaactgtgcacattacagcacatctgtgaaaccgctgttgtgtgcaaaagccacaagataccttatgtcaaatgattcctttagcaccaaaattcagccgtggaacctgattaggcacacaagcgttcgatgaggaaagaggactgcttccgcttggagtagatgacccctgatcgccatgcccctgccgcgaactgcctacaaaaaacggataatatttatttggggattgtttccgtcgcattagcccatcagacctggcctgagtccaaaggactcatcgagtagtcctggtgattgttgtcggagatctactattcaacatgctatgcaaaactggaggatgtgttgagggtcgtgccgcagaggatcagagcacaagaaaggtccactgggggcaagagggcagtggccaaagtccagaagccaggccccgagcattggatatgatctcaaggttagagccttctcgcggccctagccatgcccactggtggcacattatcagtccacagctcgcagttatgctagaagagactggctaccctgtcgagaaacagctcgagatcctcacattcttgtaccactgggttgtatgttgctttcttcagatactgctacttacccgagccatactaactgcctagatagataccctacctcgccccggttgcagcaggaaacgcagccagcagttgcaattggaaatctctcctcccctcggcaatcgtgccgctggagtactcatggaaatgggattcatctggcaaggccagagagccggagatcagactcactatcgaagtgttcggtgagcttagcgggacccagttcgaccctctcaaccaggccccggctatggagctcctttatcgactaagtagtatcctaccgggagtcaaccaaatcttggccagtcacttccgctgtaaattcttcgatcatgacaatgtcaaatacatggaagagccgcggcttgacacgcttccacgctcaacaatgctagtatgttttgaatttagtcgcaacgatacaaccctaaagacatacatgaccccgcggaagctcgggcagcaaggcttcgcccctttgtctgaatatgtatcggctatccaggcactagggcaagcgtcaggtcggacccttgataccctaacgaatttcctaagcactagccctgaggagtgcatctacacccattncgcttagcattcgacaacgtcgagccatcgtcatctaggctaaactctacttcttcttcaccgaaacagctacattctatgcgggagtgcttaccctcggggcc

SEQ ID NO: 10967 - DNA, 1364 bp, Emericella nidulans
gagttcagcctgtgatcaccctctaagtcagcgctaggcggcaaggtcgaacagggagtaggaccagaaccattatgagagccacaagatgaacagtaatcatgaccattatccaagtggtaaggggaaaagtaatcaaggcagcgtatctttggctttcagcgacagggatgaacttatatctgtaagagccgagggcaccttcaggtagtattcgccacaactggtctggagactttacgttagaggcgatgaactatcttcggctagtgcaacgaaacgagaaagataaaaaaaagaaacaaaaaaaaggaaaaaaagaaaaagaaaagcaacagaataatgcagccctgtttcataattggccgtgcgacagaggtaacaagcaggcctagtccagagtcgggcaattgcggccaaagagctggcgagttttccgttgaagttgggctagaaggatagtgcagcatgatatggcactggcatggtacacgttcaaagaccatgaaatgagagcactatacggagtactcacacagacctcgaatccccctagtgggaacctcttttgcaacaattccagcagtttctggtaaatcaggtaccttttcgaaataatttgttgctccttttcatgtctccgtcgaaaataagagcataaaaaacaatataacttagggtagaccccgtgggcgctgtaaacgggggacgcgtgcgtatacaagacagctggggtagatacccgaggaccacgtctatctgccaatgctagctatctcatccatatatatatgatggtaacacatttgagcctcgtcctcttttatggaactgttttcaatgaatgcccaacaaccccattgacttttatcggctttattgtcagacgcaacactgatcgcgatgctgagaaggccagatctattctgcgtggggagcgcgagtcaccaggacacagatccctgcactctaacaactcagttagcctcaacgatactgaatcgcgagagtcaagcagcaatgctttcatgtgtttggatgaaggctgcagcttctgtcactatcataatcctttacacgactccgatgcatgacgggcgagtgcggtgccctctgcccaccatcaagacacttggtagacgaccatacagtgtccatataagttgctgcagtctccaaagtagttgattgctctgagcggacggacgctctgcaactgttccatgggagcttccagggatccggggcggtggaaggggacgggatggacctggaatataattcccttccttatatcacccagggctttgggtccaggactagacctacttactattggtgatttagatttaaggaagtaagaa

SEQ ID NO: 10968 - DNA, 2360 bp, Emericella nidulans
  unsure (1)..(2360): unsure at all n locations
agttattctgccaactcaaaggaacgctgttctaaacgcggttccaaacggactagggtagcatcggccgccggctgtcaatgccacgacagcttctgcaattaccgatcggagcattttgacagttcttcctcaatactccgtatttactagccgggcaatgcagtggaacctagcacgtaagctgggcttctgtgaacctacatctagctgcggacttggtgcaacgtcgagcggcgcgcataacaggagcaagactgtgtggagcttctcttggactcgcagagttttatctctaactcttcgtacagcttcctagtccgttaagccttcaggtttccagtcaggtactgatgccgatccatcggttgtgggaacttggagaagcacaaattctgccctttcaacagccggtttattctcgcccgggtgatccatggttcacaactagtccgatctgacaaatattgagaattgctttgcggaaaagcagtcgcattggctagacgaaaatctaagtctggttctgcccctgttccagacttggcaggccaaggacaagactcggctgtcctttgacacctgcagggcacgagagcaccagttcatctttgcggctgctttgtacaacacacctatggtcattgcaaccgctacacaaactacttgccatataacttccgatcgccacactgtgcgcatgtcggcttagtgggacattccctttcttttttttttttacatacgtaatccatctttggtcaatcaccaagaaactggtggaggtggagaccgaatcccacagggtctcgaacctgggggcgtgcatatccattcctagccggggtctgaggtcggattttgggcagttgttcgacttgtttctcggcgtctcgtggcctctcaaaaataggccctgcattaaagtccagacttgtcctccggcaatcgtggttcctcgcggagtcggcatttgaacggcgcctctttgccatcgctgctgaaaatttgtctgctttgtccgtcttcaaagcaggggtgctaatgtggctacacaacccatacaatttggaaccggcccagtacagctcacaaaggatacgtagcgctcgaggggtactaccgtgctttccttgatctcggcagtgggagtcccgcctgagccactgacgccagaattgcacactcttagactaaatgaaattccattggcggtttgtgcacaaatccaggtacagcatccactaccaccaatcatagtttcagcgacaatcccggtgggccagttttcaatgctgatatggccaatgggactgcttctcaaaaatccacgacctatcaagccatcaattgtgtccttaaccgatagcatctgttcatagctgccccagccgagccatcaacgagggatctcacgcatgcgtgccatcacttacgcaacttgtcccacaaaagcctcgaccaaggtggctcccactcggacgccatggtccagttttgaaggccactgtggtggcagccgtgggggatgcccagtgctccctctacctataaagagtggacattcgttcgttcaattgcaaaccctttgatcttctcatagttagcaatccaactcagacactctttttttttttcgattcttggatgttaccgagtgtaacactttgctacaacttgaaacttcgcttgaagcacacgctcattcaaaatgcaactcaccaaatcccttctgctgctggcagccttgaccaccaccacattcgctcgccatgaaggccaccagaggcgtcacgcctcaatcgctcatgaagaacttcacaggcgtcaagccccgaccactacgacaacaaccgctgccaccggctcttcttccgacgcttcgtccagctcgtccagctccggctccttctctaccgccggcttcggtaagaaaacagtcaacaaaggcgcaggtattacataccaaggcaatgtcggcgacccctggggcagcaacatcatcgaaatctccgagtctgacgccgagcaatacaaatatgtcgccaagatctccggtcagaatagcgatccctgggatatcatcttcttcaacaagtacggccctgctggcctgatggatgggtggttcggccattccgctttgaagctcactctaaactccggcgagaccaaatatgttgcctttgacgacgacaccaacggcggcttcgcggctgccccaggctccgacatgcctcttgaccctggtggtgggtacgccgcgacctggggtaagtttgcccttggcagcaccggtaatgaagggatgaactgggttcgatgtctataagatcnaggctcagaccgctggtcggcgg

SEQ ID NO: 10969 - DNA, 1780 bp, Emericella nidulans
cctcaaggattctggggaaggggcaccgacaacgtctgcagtcaattcgtccatcaccggaatctccgtttctttcttacaagcgtcggcagctgttggtgctctgattgcaggtcgtctaggtgatatcgtgggacggaagaagtgcgtccgtctcggcggtttcatctacttcttcagtgcattcatccagatgtttgcgcctgggttcgctacttttcttgccggtcgaacaattcagggccttggtgttgggtttctttccatgacggtgccgatcattcagacggaaatcgcgtccccgcatagccgaggtctgatggtcggtatcgaatatacgattttgattgcaggttacatgctcagttgctgggttgattatgggttcaattttatgctgccaagtgaaatgtcatggaagggtccattcatcgtgcagataggactttcattcatcctgctcgcgatgtcgtttttccttccagagacaccacgttggttggcgaagaatggctttatggaggagagtctacagactgttgctgatctccatgccaatggtgatacgcaggctgagcacgtacaacaggtttcaccgaaaatcaagaagccgtcatctacgagacgaatctcggcaaatctacttggacggtaagccaaccccacaattgaggggttgatgaagctgactgaggcaggaaatgttcacgcgctatcgaaaacggacgatcgttggcatcactgtccagatgtttgcccaactgaacggaatcaatatcatctccttctatctcccgagtactctcgcctcggctgggtttgacaacaggaaatctcttctctttactgccgccaatgcaattccctacacagctgccaccattgctacttggtggctagcagataaatggggccgaaagcctctattaatcttaggaggtgagtccagagccttttaaaggtcacaagcagaaaatctgacattttcattaggtcttggcatggcagtactcctcggcatcgtctgcgccttcaccgaagcctcgctccccgttcaaaccaaagctgatggacaatacgccttcgtcatgctctacaatatcgtctatggctttacctggggccccatgccttggcttctgcccgccgagatcttccccctccgcggacgcagtaaaggaatggcgttggcgactacgagcaactgggtcttcaacttcattatcggcatggtctcgcctgatgcgttttccgggattcatgggtacttctatcttattatcgcgggattctgtctgttttcggccggactggtatatttctattatgtggaaacggcgaacagtagcctcgaagagattgcggcgctatttggcgatagagcgtttgaggatgaggccgttgtaggagggcatattgatgaggtgaggaaggatgaggggaaggaggttgtttgatcgtgaaattactggcgtgtgtaagatgtgatgcagtgtgatatcaaactctacgatgtactctgtatgttcaatctgccaatttttaatgatctgtgtcactcttgctcaaaaacaggcacagggagcctaaactgggcgtctgagatgcctcttagcaccagatgatagttggcgtacctctcggccgtttacagctatacttcttctcagtagatggtcacgaatatactaaacagtgctaggattaagcttattcttagactgagaagtgtacacggccttttcgtggatcttgtggacattagggtggtccttgtata

SEQ ID NO: 10970 - DNA, 158 bp, Emericella nidulans
atagaatagagagaataaacagaacaaacataagagattataagcataacatataatcaagcatagcagaataccatacacaaagcataacatatatcatacccacataaaagtcatattattaataaagcaataaccaacaatctaacaataacaat

SEQ ID NO: 10971 - DNA, 520 bp, Emericella nidulans
tgcatgtgtgcaggtcgactctagaggatcccctaccatataaccattttgcaaactagaaaacagatctaatctcaaatttctgacagagtttttgcaccagatttggtcttctaagtgttggctcttgttatctttatatcaatatccaaattttgttatgtttgcttttgctattttgttgctattgtcttgaatcgaattggcacagaaagagtatctggctaaaaccaaaaacgcaagagcggttgagaataaggtttggttgttctcctgatgaataggtcgttgacagagaagagccttaaagaacctaaggtgacatgaaatttttagcccttttcctgaaatagctttgtgttgtgttgtgttggtacgaaccactatatatatctcttttgtgtcttcacctacatttgctcagcctctaataaggagaaaaaagaaacaaacagttttggcttcttgaaaggaatcagaatcttttagctccacagttcttcccattgtgtaaatttgt

SEQ ID NO: 10972 - DNA, 2584 bp, Emericella nidulans
gccagcctcgtagaatctctccagtagcgatatcaccgtggtcttaccgcacccagaagcaccgacaaggccaatgtgttcgccctttttcaccttaaaggatagtccctgcaacacggggaccgtgggcctggctggatagctgaagtgcacgtccttgaactcgatggcagtgtccgagtctaattggactgtctcttgctttccggtggaggcgtttattgacggccgggagccaaggatatgtataatgttgtttgcagctgtgtgtgcctttgcggtatctagatagtccctattagaaagggaggagagaagaggtacacaagcatatacaaacgtatacttactcactgtatagccgagcaggaatccagctgcctgaccaccgaagatcacggcaacaaacaccatgaagaacgtttcgacgttgtattccccttgtgatagaagcttgaccccgtaccagaagattaggcctagtgtggcaagataaagactttcgcataaccccaataaaatggccgaaacaagggtgattcggatgaacttaggcgaggtgtgcgacaaccgttcatcatacatctgaatgaccttttcctccagcgtgagactggctacagtgcgaatggcactgatcgcctccgtagcaaaccgggcactttctaagtagagccttgtcgtccgttcctggcaggtgatctccagcctgacccgaacatagccggcaagaaataacggtggaagacatccaaagatagcaacgagagcaagcctccatcctaccgccaaggctagtatgcatgaggcaagcacgttgacgactacaagaagaatgaagcccagacagagcgagatcaaatcttctatccgctggggatcggtggaaagttgacctgtcatcaccccagctgactgatcttcttcttcgaagaagctgacgtcctgattgagcattgctgcaaagtatcgactgcggtatgtcccgctcaaaaaagacgctgcaacggtgaagaaaaaacccaggccggcgtaacaaatcaggacagatactgcaaggacaatatagataatgccccagaagttgcccttgtgaagcatctcacttgccattgcagggaggggaaattgaaatatcaggatggctctgctgaaaacgaccgcttgaacagggaagacactgcctgcaccgatagagacaatcagtccgcagaaaaagaggggccacagctgtagccgaccgcgcaagagaatgaaaaggcactttagaaggggaactcgtttctcatgggctgtggccttcgatgactggctactcatggcgctattataatcttcgacagctgccttttttacaagtacgctgtcagcttcagatgtcccagtttggtctccagctgtggagatgataccatcctcagtttgagcagcgacgagatcgaagtatgtccccttcttcgctaggagttctcggtgggacccctgctccaccactcgtcctttacggagaacgacgatgttgtcggctcgctgcacagtcgacaacctatgggcaacaatgatagttgtccgcgtcttggacacattattgagcgccgcctgcacggtcccttctgcatttgggtccagtgcagaggtggcttcatccagaagcaggatgggaggattccggataatactgcgggcgattgcgatacgctgtttttgcccgccactcaataggccatctccagccccaactggagtgtcgtactgttcgggcagaccctggatgaagtgatgagcaaatgctgcctcgcatgcttcctgcacgcgaattcgcctttcatgctctggtagaagatccatgtctgttctgaagaagccgtggcagacgttggcgaagatgctttcgctgaagagcaccggctcctgctggacagacccgatttggccgcggagccagcgaatgttcaactcgtgaatcgggtgtccatctaagagaactgagccggagacaggatcgaaaaatcgggagaccagggctaggatggtgcttttgccgctgcctgaactgccaacaatggccgtggtcttcccagcttcaaagtcaacagtcacgtcgtccagaaccctcacactgggccgcgagggatatgcaaaggagacgttccggaaggatatatgtccggtcacaccggtgagcgtcctcccatcgctggagaggctgtctatgtttggcttccgatcgatcacctggaaaagctcctgggcggcagccgccgtctttgaaacctccccaatgaaggggccaataagcgtgagggattggctgcctatcagaactgaggtgaggactcttatgtcagttagcactatatttgtctaaacggcgttcagggcaggctctcctacgtgatcaggtagccgccgctttcgatctcgcctttcacgagcagtcgaattccgtagacccaaccgagcgtgtaggcgcatcacatgattgccgattgacccccgttctgtatcccgcggtacgggcgccatcttggagtccaacctgcgtcgccctcatcaagatgcgagtagcaccttgccgttataa

SEQ ID NO: 10973 - DNA, 631 bp, Emericella nidulans
gtcgactctagaggatcccttttacggtgtgtgactgactctctcacgagtcacgagcgtgccccgttaaagagcgtttgcgcaattgcgtacactcaccacacagctgaggtaacccctacacgctctactttttgtactgcggtaaccccacaccgcaagtaattgaattatttttagggttaatacttttatgcaagaggagacataattgactttgtggagcgttcatttggaaattcatatatctttgtggaagatgacgccattttttttacaagagacttgttaagtcaagctttttcttttttccacaaaatgtaagacagtctttgggtctattactagagccatcacttataaacattgaacatcattcatttcactttctgagaaaaaaaaaatcacagaaaaacagtttattgcattgttgaggtcagatgaagatgacaatatggagcttgtgtttaatcttgtccctttctaattcaaaactggttttggcttctcatgttaagcacttatgtcgtcaagaccagaagaatgctcttttggagtttaagaacgagttttatgtccatgagttcactcgaatgggattgttggtgttagaagacagagaagtggagga

SEQ ID NO: 10974 - DNA, 1413 bp, Emericella nidulans
caagcccttcaatttaacgcgttatacagtgcaagcgggaattcggtgcttcattgtggacaacgcacctgcgcaccagcaggaatctgcaaatgcttgggccagccggatgactggcgtgggaaatatcattgggtatatttttgggtatatcaatctaccaaagttattcccatacctggggaacacgcgatttcagattctttgtgctttggcatcaatatccctcgctgtgacgcttttgatcagctgctcgtacattcaggaacgtgatccccgccttgatgggcccccgccatcaggaagcatgggcgttgtgggcttcttcaagcaagtcttcaaatcaattaaacacctgccgcctcaagccgccaaggtctgcgaagtgcagattgctgcgtggatagcgtggtttccatttctcttttacgcaacaacctacattggtcaactctacgtcaacccaatcttcgaaaaaaatccgggcctttcggactctgatatcgacaaagcgtgggaagatgcgacaagggtggggacattggctcttcttatatacgccttagtctcgtttgttgctaatataaccctccctattttcgttgtcccgacatacaaacctgtcctttctagtgactccagcgaagtggacattcgacaagaagcagagccgtgtctgagagtcgagaggcaatcgagctcggatatcgaagtagggcttgtcgcggaactccacccagaagtcttgcgcgacaaggcacggggctcagcggaaagcaagtcgtggtcgtcgaagttgcagattcccggtcttaccttgcgccgaacttggcttctgtcgcagatcctgtttgccttgtgcatgtttagcacattcttcatcacctctgttactgctgcgacggtagtagttggcctaatcggtataccctgggctttgtcactatgggcaccgtttgctctaatctctgctgaggtggcgactttagaagaacagcgccgaagccgacgtcagcggtcagaattgacgacctttgatgagcagatgtcacctcaaattgatcgcgatgcagctgatgataatgatgatgatgacgacgacgacgataatgatgacaatgacgcagagaccggctcttcaaggtctcctaaaacaccgggagacgagaactcagcacaggcgggtatcgtcttggggcttcataatgtagccgtgtctgcgccacaggttctatcgagcttgatatgcagtgctatatttagggcatctcagaaaccacggggggagccgtatgatgaaagtgtgggatgggtcctgcgattcggtggatgtgctgcacttcaaaaggcttggttgacgagccgactttcggaggggacgccgaggaagaggtatatatctaaagctatttg

SEQ ID NO: 10975 - DNA, 603 bp, Emericella nidulans
gtctgcaggtcgactctagaggatccccatgtgtttgtcggtagtaatcaacttaggttgttgagtattaagagtccgttgccacttaatattcaaaattgggctctcgtacctgcaagttttgcagaaaatcaatgaacactgaggaaataacctaacgatatagcatatacaaagaattttgagttaatacaaacacagtaagacttacatgtgatccttcactcttatgggagttgaagtacgcaagtcgtatatgaatacctgcagataccgaacagcacaatcaacacaacatatctatataatcaaattgacctaccaatgttttaaacctttcagataaaaaaatgaatatagcatcaaacctttcccgcgctactcccgacagctacttgaagaccttcactgtcatcaaactctatagcagtaacctcctattagccaatttaaagcacaagatcatcagaaatcaatgcaattttcaccaatcacatgacgtctaagctaagaaagtctgtttatttggaacacaagttagaaaaaattaccgcagcagcatcgaccaccatgtgtgaccgcgttaattctagcagcagatga

SEQ ID NO: 10976 - DNA, 487 bp, Emericella nidulans
  unsure (1)..(487): unsure at all n locations
cgggcccccnntggatcggggagggagccaagcgggggcccctcgtcggaacacgagcaaaacaaaaaggctggggtgtagtgacaacaaggtgcgcgatgacccccagtagacacggatagcaggacaggagacctggaggaggcatgacgacatgtggccaacgaagaccaggctatgaaccaacgcgatctgtcgaacggctacagtgagagaggtgacgataatataaagccccaaaaagaggacaagcgccacgatggcaacagcaaggaaagggaagctgatgtagaagagccgagcggggccaagagaattaccggcgtgaatatgcaagataaacctgacggtagaagagaacaccgaagcgacaccgagactgtacgggagaaatagaaacggcccagggacactgggcaaagttcacatggggcacaagataccaaaggaccggccctgggatgtgaaaggaacaagaacagtgcga

SEQ ID NO: 10977 - DNA, 1462 bp, Emericella nidulans
ttggacagttggaacaattgcgacaggaacacatccatctgcgcaatcaaagacttcggtcggtgcgggaggaagatgagaatagctttcaacgccgactctcggatccggaagctgtcgatagaactgaacgatagcagcttcggaatgatcacgtccaaggggcactgcccgctgtattcccgctcgaggatcttgcggttatcctcgcagaccttgaacaacgccgacatggcagcttcccgagtggtcgtactggcatctccggccgggttctcaacaagcgtcagcaactcgtggaggacctctggccacgccaatagccccgcctttgcgatcaactctgttatcacgataccagcggaattccgtacttgcccgttgtcatcgcggagcccgatgagggtggctgaccggatatatgcgagagaatcctggggaatggtgttgtatgcaacgtggattttcatcttgaggttcatggcagcggcaacgcggacaatgtcatattcggccggctgcatattcaagacggacggtttctgcggggtgcaaaagaggtaggtaatatatttaacatagtctggagatgatgttgcttgtaccagcatctgtcatggtcggaaatgcgctcgtgtcagttctctctctccaagaaaaatttccagaccgacgaagcgcaataggagtccgttgcggtcgcagacaggagaaactgggcatgtaatggggctgcaaataatgaatgacgcatggggaagttatgcagagggagtatatcatagggaagggaatacaaatgcgcaacgcacctgttcggcctgtttttgagcggcgctgttgtgagaattcaacgaatccctgaggcagtatgccagctgccccagcgggccctcctcaggctgccactgcatggttataagattataagaaaagcggcgagatcagccggtaacaattgaatcccaatgtaggggaaagaaatggaaaataaggagaagagaggggggagggagaggagactctgaggatgggagaaggcgcgtggtggtgggtggattcaaatgtgtaggcctaggaaccccgctgtgcttgtgggaactttgctccaagcctttccccagaaccaacgtctaggactactgcttgctgtgaccgctttgataatggcgcgggaatattataactgttaagagacagaaatacatagataaagaaagaaacccttcatcagtggcgtgtgcacggtgcacagctgcaacaagcaagaaagttcagcgtcagaatattaccacacgattacgggaaatacaataaggcagtcagtctgatagagcaaccattctggcattttagaatattggaagagaatctccgtctgccttctctatgatttcattctttccgatggtccctatgctggattcctatacttcgatgttgtgttcgaattgtggacaat

SEQ ID NO: 10978 - DNA, 468 bp, Emericella nidulans
gggcgccggtctagacgcacattttgtctcccaccagtggccagatgaaacccctcatcgtagatcgggcggacggcgtgcggtatggcacatcagcttatagtgtggggaagaacgggcgcgcactggctcagtggatgccacgcaacaactctgaaggcaatgccagtaccacaactgatggtgcatgcggcacatgcgcttatgaagagatgtcgtgctcaggaactgggccagactattctaggtatgcatgacggagccaccctggatggctagtgacccatgatcacgggaatagtccgtacctatgccagtcccaagattgtttaaaaatctgatttgaccaccaatgaggcgaacactgctgaaatccttgtaagcgaaaggacaatgccgcaatatgccctagtggttgtgcgcgttggaacacgataacactatacaggaacgtgaccgccaacagaa

SEQ ID NO: 10979 - DNA, 586 bp, Emericella nidulans
aatgcgttctcggaaagtatgaagaggattgatcaatgggagtttaaccggctgattccttgccacggagatgttatcgaaagcggtgcgaaaggcgtgtttagaacagtttttgagtggttcttgtgattctgtttgtggtgttgcggtaggtggttgcggactggtaacgcactcattttcaatcgtctttgtactatacctagtttgcggcagccttggatattggtggtttagtcactggagtttggttgttttcaacattgcaataatgaactggctaacatggaatcttatggtttcgatctacatatgtctgaaggccattatcctttagttgccaatgggcggcgccctaggtgatgcgataaaaggtgagcgtatacagaacattgagggaatccacatggcaatcagcactaaactctaaaagtattggtgtgaatggctttgagctcaacatcaatatccaaccatcatgatgaggtttatttatttcattagatgccacctgagactttgatcgtaaggcttaaaagatggcaggacaccaaatcatcttgacggaaggataatcgaagcgaaa

SEQ ID NO: 10980 - DNA, 565 bp, Emericella nidulans
gtctgcaggtcgactctagaggatcccctgcaaactttttgatgatgaaaggtaaacaaaacccaacagtttgatgcataaacgaatcaatttaccactgtcaaaaatcaaacttcagaagctattctaaccgtgagaaacaattatctgcattcagggccgtttaccactgtccattctgcaacctttgccgggtcggggaaggactaggaatcgattttttccattgcatgacatgtaactgttgcctagggatgaaattagtaaaccacaagtgcctcgagaagagcctcgagacaaattgccccatctgctgcgaatttcttttcacatcgagtgaagcagttagagccttaccatgtggtcactacatgcactcagcttgcttccaggtttgcaaatctctctttctctcattaaacttaaattaacttttaacgcctaaaatcaaaacacttgctgttactctggtctttcaggcttacacttgcagtcactacacatgtccaatctgtggaacatcattaggagatatggctgtaagatgatcccggccctcaagagt

SEQ ID NO: 10981 - DNA, 1253 bp, Emericella nidulans
aatgtcgacatgaacggggatacagaggccagaatacgggtcatggaggccatgctgcggtggaggtgtgaagtccccacggccccagatacgttatgtatgttgcccattgttacccccattgtctcctaatattcattaatgacacgtacaaagggtcctatccattccaaacgcacgaccccttcgtcatggagtcctgccctcacctcttcttcgcgggcaaccagccccaattcaagaccgccgttattgagggagacttgcccttgagaccggacggcgaagacacagagatgggcgggacggcgcagaatgcagccgtccctaccgttcgcctcatctcgcttcccaagttccgggaaacgggtgagcttgtcttggtggataccgaaacgctgggggtagaagtagtcaggtttgggactttcgcggggaaggaggagaaactataatacgtgcatagcatctaaacgaataaatagttcatgagcgaaatgttggcacctagattattggcattgtactgattcccgtccgagcaacttcatcctcaaacggagtcaaacgccaagactgcgaaaatatccaatttccaccgcagcattccatcccactaacaaatactccagaaaacgagactcaggaacaaaaatgctcctaaacgccacaacaggtccataggcctcccatccacaactcacaaccacagtaaactgatctgatcccagcaatctccacctcaaaggtcctcctagtgccatactcgaaatggcatgtgccgcggtaccacgaatggatgaaggacgaggtacgccggccacatatagccaatcccctcatatacgccccaggaattctaatgagcaagtaggagatccaacaagcaacagcctcagagcccctctccctctcagaagagtacgccatgcagcagtcttggcggaacgacgctgataaactaacctttatcatctgtcttccggtggcacctgagacggataatgggaatctaagtctcactgacgaggacgatgctcccacccgcatgattggggatatcaatctgtttctccgagtggaggaagatgaagaagatggagacgaggaaaggaattctagcaaccctcagatcatcggcgaaatcgagcttatgattgccgaaaaaaaggatcaagggaagggctttgggaaggctgcgctcctggcattcctgacgtatgttattgagagggagagagaggttctgggag

SEQ ID NO: 10982 - DNA, 1601 bp, Emericella nidulans
cggggggaccaaggcggcccatagcactgacacttcctgttatccagaactgccctgtaccggacgtcggtttcaatgacaaccatggctttccccaacgcgaccacctcgtcgagcacctgcgctcgtaccaccacatggatgtgccgaagcggcgcgcagcaaagcgattgagaactgtttagacaccaattgttcactgctctaccactttctgcgccgtatcacgaccgttatctaactacccttctgtttttatactctgcttctcgaggctcgacctgttttataccaccctttttttttttctttttttttcttcctattgcttcttgttctcacggctaacgactaatgcggtgtgggattactggacggcgttatgagacagacgagactagcgagatttctctcacatctgctttgcttctgatgtcttgtcgttcctcatgttgttatacgctatagacggtcggcgttggagatacctggcattttattattatcaacaatacatcataaacaattcaaactgaaccacaaccccagtcgtagaagcttctcattaagaacgaaacgcgacaaaagccgtccctataacgcgtcccttcaagtcgaacttcaccccctcctcttcaagcatcctcctcttcctctccagattacctcccttttcaattcccttcccggagccctttgatcgcgccgagaccgatgcagacggcgttcccatgtacccacccagcgttccatcactggccagaacccgatgacagggcacccccggcgcaaacggattgagtcgcattgccgtcccaaccgccctagcgctggagtttgtgtgcttggccagcgcagcgtaggttgtccattgacccggcgggatctgcaggagagccaggtagagggacttgcggaaaggcgttaaggcagggtgttggattactttctttgctaggatttgagtctgggattgggtttgtttcaggactgcacttgcatctgggctctggtcggtgttggtttctttcattgtgtgaggtgggattgttggtttgcatggttggaccgcgtctgcagttggccgggttggaaatggcatcatgatctggttctttgtggactctggactctggagtgtggatctggacctccggctgtcgctgatcatggtgttgtggggactggtgtggtgatgggagtaggagattcagataagtcgatggcagtctttttaaatgaattattgacggatcatcacaggctctgagtctcagacgacaaattttgatttgtcaattcaagatcaataaactgacttggtccactggaacagcttcgtactcctgcctcttgtcgattttctggtcccccagtagggtttgaagtatccagagtacatgtgggactggcgttgtctgcacgtccctgcgttcttcgcacacgcaccacccaatcaagcgatgcctgccccatcggccactgtcattagagtctcgccctgtttactctatacggtacatcgctcggtactaacgccttctttcaaaccaggagaagtagctcgtccaggactctaacagatcatcttgagtttgaac

SEQ ID NO: 10983 - DNA, 366 bp, Emericella nidulans
  unsure (1)..(366): unsure at all n locations
tccccgggcacacgatcgaatgcgaagggcgcttttatactagnaggannccgcaggctaggtttccaccggcagangccacccggcccgcacccccaacgccacgggccaggacaggcgcgaacctacactagggatgactcgcctctgtatacgggaatgggagacaaggatggcctacgtgctgggcacccagcagcagccaggagaaggacgaacaggaaggacattatggctgtgccgactggggaatagaatgacagacactgaatagagatgcccaaccggagagttaaattgcaacagtatcgacgaccacgcagccttatgcaaaaaaccgaggtcagggaccgattgaagaagccg

SEQ ID NO: 10984 - DNA, 1688 bp, Emericella nidulans
ggcgggctcaaatttaccctggcaggccgaaaccgttacattaatctcttgcaagaacacactaagtggctatgtccgggcggcataatctttttaatatggacttgttggatccccttgtcatgttatggagcacgcatttgttggtgccgcgttcttattgcgactttttccggcgttatggcaacagcgaactggtgggcttagagccaccgcatgattccaaaacttgcaacctgtgccataccctgtgtaccccttcatttgcgcgtcggttacttcgaggcttcacctcactatcagagtggaaggattggttatccactgtgtaggaagtcctacactagctctgcttgcagctggcaccgctctgtgatcgtgtagctgatagaacatataccataatggcttacctaggcctgaaagatcccgatcggtttttgaacctgcagggctgttgctagtgagggcattcagggcacggagaacgggaactcactgggaaagcacgcacagcgggttttctttcgttccagatgatggcaaggtcctctggatctcagaacgaaatttggtggcttcagggcgagttgttcccatcagagagacggtacagaaacttggacccatgacaattattgtatcaaccttccgataatcgtatgcataagttgtccttgcgaacttcgggtctctggccactcggcagccccatctctcatctgcttgcttcttggcagtcccagttcagacatccagcactggaaagatcttcaattttcatagacctagctttggcacgggagcagatctggccagagagtgctcagtaggtgttgagcgagatccttcgcgggttcccacactctacctgacgctacccttaccccaatcacgtcctgcatattgttgctctttatagccacacttttctcagatttcacatctctctcgtcacagaagcactgtacttctagcgggatcgtgtcgaagtcgggaccgtctgttattcgctgacttggaacctggagcgagattgtcagggagtgatcgctgtcacagggacttatgggcgaccggcttagggtcctagggtggagagtcggaatagatgccaaagacagagcaagagcgagttcaagatggttcagggagctagaaatgaggtttatggggacgtgttatcgagataacagcggccttgaaccgcctgaagtgcgcagtggaagcgacgtggatgcgcccactttctcaggaaaagtagcgggcttatggtctttctgagcacatttcacgttgttgtagagtaagcaaatcttgtactgggtgaggctgcttcttcagattatgaggtgtggacttatgagggttatgagggataccgtatgtccatttctgcagatacctcaaaacgcggaatgttggccgctataattaccttcttctggtgaagaatttcaatttgtagggagtactatagacaaccccgtgctttctttgtcgcccaatcgatactgattgcccaatccatgtttgcaggcacgaacgatagttcgttacaacgaatggatgacacgtgggacagttatatatattttgcacaacattggtaaaaaccatgcctcataccacctgtcagcggctattttgtcagtactggcagggttacgggctaagattatatagct

SEQ ID NO: 10985 - DNA, 1200 bp, Emericella nidulans
aaagttttttataaaccccacgaatacggttacggtgtcccaggccggaaggttcttcaacaatgaacaagtttttatagccctcaatttccctcccgaaatagaggtctagtccacgcgtctcctctttcccccgagtgcgccataaaacaccaggtgtccaggtctccgggacgttaagcctagaagcagaaggcgacgctcaaaacgcgggccaagaaatgcaggcgcggcatatacggtggagtgaacatgtggtagacaacgagggaatggggaaaaagagctcaaaaggtacattcaatgccaataccaggctacaagactttttcggtgagacaacctgagctaactgatcgccttcaattgctcgcacgcaaacgttagtttgctgtatttaccataagactaggcccgtcggggaaagtagttcggaatcagaatcatcggactccgaatctgattctgatagcgatcgcgaaaccaagaactcgaatgacagaagaagctgcggacactcaaaccatcgccatgatactgctcacaagtcatcgagaagaggacgcgcctcagatggccatagtcatgacaacgagaaagtccagcgcaggaagcctagtcccaatgcatacgaaaagatgccgaaatatacaaaaggctgattgtgatataatcgtcgggcttaaacttggattaaccgtcatacaacgttgacatatcgataatcgaacttttaagcatgcatacgttataatagccctatttcgccggcttaagatatccctcggcatttgcaagcatggaccgtgaaatggagaaaatgagacggacactcggtccatcgatctgggaaatgaccaccctaagcttagggaacatggtgctctctaacgaaacatgtagcaaccgtgcgcagttcaaacccgtgtttatcgcttgaaacctagattatggcgctgtgttttactctaccatccttagcaagctgataaggactagtacgtgcactcttctacgccgtagagagcttttgaaacgcggaaccaatctggactggattttggtgtctagaaaaaactctgctactataacatcatacttcttcgcctggaagcgactcgctggccccgtgctatttccgttgagcccatcgtctcaatgacctgtagatttctggcctgaagctcttcggctgcgaga

SEQ ID NO: 10986 - DNA, 2535 bp, Emericella nidulans
gcttctggaacaaaaaagctctctcagagccagcgcctaccatagcgccatgagcctgcgctgcggatgtaactatcatcgtcagagctgaagtcccgaatatcgtcaaatcgacgtctccatcgcgcagttgaatgtgacatcaagtcggggagttctcgatcttcatatcttcttctccgggcctttgcatagatacgatcaccatcttccaagatctcacggtttccgtcttggatgattcgaggccgaagacgattcggtctgattgtagcccgtggcaagtcggtggttcggtacgacgatctctcaggtgatatgcgccgatatctaggcctgtcctcgacatttctcggcaccctgcgctcaaaaatgcgccgccggaattcgtctcgaaagtcatcgtcgctttcagacaactgatattcgttgcaccgtcggggccatgttccgtactcttcataatcgatgtcctctgcgaatcggacctgtcgtcgccctgcgctctcagtcctccctcgtgcttgttctggggtctggtgaatttctacagcacgcgatcttcgtctaactggttcgcgctcgactaccggcgtccgctcgcgtggaggcctgggccctttggggcgttccagtgagcgcgactgtcgagggttatcttcgacaaacacggttgtttctgtttcccttctcagggatggggagattgatctttgaggaggtggtcttcgaggtagaggcaaagacgtccttcgtggtgaaacgcacctgatttcgggcgagagagatcttggtcttccgctttttggccaagcatactgtatctctggggcggaatcaacgatgaaagggcgaggagacctatttcggcctcttggttcaagcccacaatcatctggcactgatggcacccgtctgattgtatatggcatgcgcatcttgaacggcttactccggatcggcgatgtatcccgtctccacaatgtgtttaggcttgtccgggatcgcaatggctcccttgtttcgattatgcggtacgttggtgagttcttctgctcgggccgtatgtgctggacattgcgtctgtagtagtattcgtctctgtcgaggactttgggacgcctgcatgtccctcctccgtctctgggcacgtatcggtgaatgatctttcttgttcgaatctccatttgggtatatatgtcagcgaatgtttctcaacaaggcacgtcccgtattctggtcaaatccttgaggcaggacaaaatactatggagtcggggaaaccgatatcggatttttcgacttgcacacacgcaattcgagtagtgaggtggtctcgagtacaaatataggcgaagggttgtttggctcgatcgagatatacttctttccgagccagatagtaccccgacaaagggctaacagcgaccaaaacataaagatcccacatagcagcaactgacaaaggatggaattaccttgaactgtttagtctgtgaggaaaatagcctccctcatagtgcagtcatgaatgaagaacatgtggtcgacgtcatgggttcaacaacaccgcctgattttgtatcgggatagaggtatcagtcagaggtttctttctctgtttatatatacaaagcgtgtatattttaagactggagtgagctggaaaaaagtcgtctttatatctgtttagaatagactgttctgaaagctcccagaaagatgccttccgaaaggtaaaaacgagatgcatgtaatctcccaccccgggaacaggccttactaggaccgggtacctgcctaacctcatataccactgcagcctagcatgcatcagtagcaggccgacaaggctgaagaaacaaaccccaacactatatacgtaaaagctggcagaaaatgacactagatctggcacagcccaccatccctggcagttttcagctctctcatctcatcttcccccacctggcttttgcaagaatatccttctacttccattaattgccttttagtcactaggtccgccccttcatggataaccgagtcagccgggcaaagttcatgagcgccgcagtcggacaaagagcaggtgacttaacaatgggggagcctcccttcctcagtgtgaggtaggactgctgagcctgaaactgaagatgtcacagtggactattattaccatttgtctcctttgaaactcaaaaatagaggtcagaagttactgagagagatcatgactgcagtatctggttgactgctatgaatctgagaagaagcgactggatagcgggacgagccgatacgcactactaaggtcgcccctggttgcatgtcattccaacacttctgaccgcaggtgagcaatgaccttgtttctcagggtgattggagaaatgcgcgtgtacctgttggatgattgggccttgtggttaggaccgggatgtggctgggggctttggagactgtgcacaggtgtccagggtcaaacatctacagtagatggcagagggatgcttggccgctataaaaaat

SEQ ID NO: 10987 - DNA, 666 bp, Emericella nidulans
tgcaggtcgactctagaggatcccccaatgaaaccacgtcttgtcaacgatattgtaagagtctagtgtcttgattcgatccatagcacccactccaccgaaaacgtaaacgttttcctcatccgctgccatcgaatggaaactacgaggagtgggtccttcttccaccggagttagcagtttccactcgtttgttgtcgtgtcaaacgagtagaaaccgttgtattggcgtgaaaagtctcggcctccaaaggtatagagggtcgatcctactgacaccatacggacacctaagcaagagaggtgtggaacgtctccggtggctggagcaatggaccaagtccgggtctcgaggtcaaagacgtaaaggtgtttatcgatgggctgatttggtatgagctcaccaccaaaagagtaaatcttgttgcctacttgagctatgccatgtgagcatcttagccctgggccttctccattttgctccaccttataattaattagtaatatttgttagctatttttaaaaggatttatattctgattagtaaatttccataattgtaaaataaaattaatcaaattataaattgcaaaactgtcattaattatctaacatccaatttttcctctcttttttttctttcgcgtccgtggtttagtattttg

SEQ ID NO: 10988 - DNA, 574 bp, Emericella nidulans
gtcgactctagaggatccccaaaagaaagcacgaaactgagaaggttcttcaaaattttgcacttacaaccacagaagcatccgcctgaactactagaattcctgcagttttatcagctgttccaatttttgaactctcttgatgcattacagaacgtaaaaccttcatggcagcagatgctggaccagcctgagagctaacagcataaggcatcccttcttagctttgttacagaagaacaaccaacaccgagaaaagcataaaacctaagaaagataagggaaatatacagtgccaatgaagtacaacactctctagctgcaaaacctctcataagatactctcccgctccagacacacaacatccaactagaaatggagctccaaatggtcctttagaggatgcccagcaaccagaaccatatgttgccgccaaacctacacggccgctaatctgaaatacatgatcagaaagagaagatcagttttactttcagctcaaaagaacaactaagaatttgttgatatattaccttcattgcaataccgccacttgaggaccacacgcaatgt

SEQ ID NO: 10989 - DNA, 3142 bp, Emericella nidulans
ccgaggttcatactgaagaggtcgtgacgccagcgagcttgtgcagttgagcgtttgccgttgagcgtttgccgttgaatccgggcttagtctgtgactagtgcgaattgcactccagtttcaagatagggacaataccattctatccgctgagagtggctggtcctgcttcaagttcaagtaaagatatactaaagacccgtggtatgtcgcaccttgggagaaacaccggtctctgtcattgacccttggaagacgagcatgtcctgtcgactaaacacatctctattagttgggccgcactcggtaaaatttcaggcacaatagttgcaccacgttggaccatggaaggagactcgggtcccgaataagtacagcctcaaggcttcttctcagtgcggggctgccgggataaatagctttgagctccccgccgccatcttccgacccctcaccatctcaattcctcaaccagctacacgattaaccatcgattaaccatcgcaataccagcaccatgtccgaattccccagcctcaagcccgctttcaccatccaggcatgtagctacaccttctgctccctcgacaagcatctaatttgctatcacagatcgaactcgatgccccgctagcagtcggtaagccgacaccacgaacctcaaaacaatggaaagagcaccctcccattgacctccctaggcaccggagtccgcgataccaacctgcaggttattgtgagtatccgcagcatggaacttgacgagaagggctaagaccgaatcagcctttcagcaaaggtgtttttaagactgcagagggcttcgaaccagccttcgaggcgcaggttgtgggcaccggcaacgactacatccacgccgaccctgatggaaagcatatgcgcctgaacgctaatggcgttatcaagtatgtctccgcttgaacttgacgaagtcgctgataatacggtgtttaattctttaattcccttcgcagaacccaggatgacgccgtaagtcacccaccggatccagagaaactagtcaaatgaagacctgacgtgaactaactgccgtcctgccatcagctcatctacgtgaactacactggcgtcgttacacttgctgaagcagagcagaaagtcctctccggaacagcggaggagggaagcacgccatttgggaattcttgtgggtgcaccatgacttcctttaacaaggataatgctaatcatatgatccgtacagtcacgcaccttactgtcgaggtgagaaaatagtctacctttccaggaaagtatcaacggaccctaactaatgttccgcgatagaccggccacgaacgctacaaggacctcgagaaccgtgtctttgtcggcaagggccgcttcaatgtgcagaagggaaagccggttgtggtcgagtaccgggttgctcaagttgtgcatgcttaattgagtacttttgaggttgagctcgataggcactgtactgagcagggatacctgacaaagtaaagaatggcatgaaatgagctgattgactcttctttttgcaactctcatccagcaagatctcggacagatctcgaccgcggttctctagagatcttcccacagaatatgcagctagctctacacgtcgttcagtaacgaggtcatcatatgccctaaataggcagcgtagagtggaactgccatattagaggtagctaacaaacctattctcttctcccgtcggtgtgcgtgtccgttatgcgtctacggcctgaggtaagagtaatctcgccagtcaccacctaatgaatgtgaccatcctctgcggcgagagcatcgccttacgcaatctcagaacctcccacctcttggttctgctgctcagtccctccagagacgcctattaagaatggcctttaaaccccctgatctccctcctccatctttcctacaactcctcacactggtctgggccctatacttgtccatgggccggccaccttttgtaagtcaaacagtcgtactgtagttgtacactatgtacttcttataacccctctctatgcccctcacaataccctgcccttcgtagtacacgaaccaagactccaacctgagggagcctgcctgcgacagatcaactggtagatagaaacacctctgaaacggcccttcagcttttgaacgttcatcgctagatcaaccagttgacgtagctttcgttccctattcgcacaacctcctaaaaccacacagaggtgcggtagattcaaacgctgtggcaaccatatctgcgtgaatactgcatggagtaacatgatccaagggctgtctatgccgaagatccggcgggctctaggctgaccactgacgtatgcgaacagtgctcaaacagaacctgatgtagttgcactgaccagggttatagtagcaaattagcggtcatcttagggtttggcgaaagttcagccctatctggtcgcaagccgaaacctccaataccctaccaaatctggagaaccagcggttagtccgtgctgtatgcagagttcctggaggcatagcggggcgacatatcctccccggtcgccatatccgcatccttacattttggcaactgttatagcagggtggaagaggtagctggaggactccgtggccaggagtgatggaggctgagtctgtacagatggcactaacctgaatccacttcagcagtatatacattacctttctcgcgcttgaagtgctgtttgtctgtcctcgagccatggttcgaggctgcgttctggtccaggaatgtctcgtgcggtagacaagcaggtttctggaggtcaggaacttatttagatcacctaaataatactgcagattgcggaactagggtcgggtcaaagctgggcagcagatttagggttagtgaggacgggatgccgctatacgttgacgcactcgcatacgcttatacagccgcagcttggctgaggcacccttagccatctggatgtcccagagagtgagtggtaaagcagtagagccacctagacggtaagtgacctggtgatacttgttcagaggattcaacaggggctcagacacagtgaggttccgtcggaatctgacagtgcaggggtaaatgaccatgatc

SEQ ID NO: 10990 - DNA, 1986 bp, Emericella nidulans
aattaccctactaaagggatcttagcttctagatagaatcggacttacgccggaagcgcatccggtttgtaagccttgttgtacgccatcgttgcgatgactgacgtagtgcggccgcagagacaagaggggtcgggttcaggtcagggacaagtgaattgaagcaggagccctttcagccggggagaagaagcatagtctttaaggagagagggtgaaaagactaataaaatttttggcctgaagcgaaataataaggagtcgggctcactccattcttctttctgaggctgttatcatgagcgggcggagacgtgggtcagagggccgggcattaaccaactgccaagacactctacccacagcccaaacagtggctttgtagatagttacgatatatatggttagatctgagccttgctgttattccaacttcactcgttgtggatatatggaatctatgcgttcgtaatctgctggattcctgactcgataaagcccactgttgggtgaatgcgcgtaaccatctacttaacttggcgcaatgacgatccatattccgaaatttctccatcttctcgaggatttgtgagactacggagtataagacgcgtataaatagcatccatccataggctatggatcagatagacggcacttattggagatagcggttggaccatggatgtcactcgtcagcctaagtaagcttactcttcaaaaggcccacagtaccgagaatggcaggcaggtatatatactagtttgcactaacgccggtgttggagtctaatacaacagcgagatttgactgttctttgagaaccgccatgatctctttccaagcttttgcttggaactgcttcccttccgctcccgtggtcagtgctgttgattcactttaccaagttagcctactaatctagaaaagagggcagcaaacttactctagatatccatcacttcgccaacgccttccatgcgactctaacccctggtatgtcgcactgaccagcgaccggctcccttgttctgctgtacgagcaaaaagcttatacattatccaaacgaccaatcggtggtgcaacccagtgtactgccggccaagcgacgacacgcagagccctggactgacggtattgacaacaaccgggactgtcccattttcattgtgcagttgcgcggctactgacttgagaacatactccagaagaagcttcgaaacaccgtactgctttggcccgctgaaccgtcgcgcatcattcagatgctccagcaacggcccatccgtccggagactctttgcttgaacacgaacgaactgctggctcgagacgacagtcaaatgggttggcgatgagtcggtcgagcaacttcgcagtttcggaagcagcagaagcgctagcaaagaggtagagagcgtattgacctgcaatgtctcctcccatccttccgtagacgtagtgaactctcgattccagatgccggcattcaggagcgcaacatcgagctgttttaaactctcaacacgggcggcaaaatctttcacgctctggaaactgctcatttccagctcccacacctgtacgacgcccagtctgtttgtccgttgctcaagctccgtcttggttgcttcacctcgttgtaggtttcggctgccgatgattaatgactcgacccctagattcagcatcttaatggcggcttcaaatccgagcccacgtgtcgcaccggttaagaccactgtctttcccgcaaatgagatgctgggctctgtaggggggatgaattgcgttctgagcagtcttatcaggcctgccattgcgggtaaaagcgtctggagtcgagatggctatgtttaccaagtcgccgaagaggactattgctgttatgcggagtagaccggtcgttatcacagaaactatgaaccttgccgcgacccgtggagaataatttagacgaagcctggcatttgcggacccgcct

SEQ ID NO: 10991 - DNA, 387 bp, Emericella nidulans
  unsure (1)..(387): unsure at all n locations
gctggcaccgggcccacctggatcgaggaagggcggcgacgtctgatccatcagggggaacggaggcagagacaatgatataaccgagtggaggactgcagtggaaggccccgtccccggggggacaaaagtgcactgaaaggaagaagcacacacgagggcccaagcgggcagacacccaagatatgctgcaagacangacggcgcgagagtcacgcgttaaagctgcagcgagaccaagatcagggaggcaagcaaaccgagcagctggcgcgccaggctatgaggacgagaccagcagaggagtctgagatcactagccgagccagccagaccgatacaggcgacaagatgctggagcacacggtggcacggaagcagaaaaaa

SEQ ID NO: 10992 - DNA, 603 bp, Emericella nidulans
  unsure (1)..(603): unsure at all n locations
tgcatgtgtgcaggtcgactctagaggatcccctatcatgctgaatttaagtaatattttgcttcttaagttttgtaataaagaggaatgttcaattgttctcatcgccacggaagcggtttgcaccgaaagggagtgatcaattaattgagggagttgagccgaagaaccgggtcacggggaaggctgtgcgtggtggtgctaaaccaccaaaaccaatggttgataaatgaagattttaagctgaaattgtcaagcgctggggaataaagcaacaatcggttatcttagggatttatggaaacaacatcggccggattttttgtttttaatggaaacaaagcaatcttatttatatatggaaatatttgtcagtcattttggttataaaaatttaaaaacggttgatcctattggttgtagtggcggtttagcacttttttataataatgattttaatgtttcaattcttttcgaaagtaatcgtctaattgatgttgcggccagttataaaggaaaacctattcaccttacctttgtttatggggatctggttccaaaaaagagagattacgtatgggaacggttnacaagaattggtgt

SEQ ID NO: 10993 - DNA, 600 bp, Emericella nidulans
tcgactctagaggatccccaaatggaatctccaggcctatacacatctttatccgtttgaacacttagagatggtttgatcttgcttccagaaacacccacggagtcattgacttcactggaactgccgatccccaaaaaggaaaaccttgatgatagcatcgcttcaatggctgtgtttcttaaccaatacaacaatgccttccatgaatcgcttcaatggtgctaattacaaggacgacgagacttggatggagttgaatcattcaagggttccagagagaggacaaacataaaaaattggcagacagtagctaacgaatggcaatcaattacttcagatccagagagaagacgacgcgaatcgcgcagatcatagaaccaatttgtgagatttcgttccgaacaaaaggcaaatgtttcgttcacagagagtgagcttctaccttggttccttgagaatgacgagcagaaatgtgaagacggtgccgccgggagaagtcttcgtgataagagagccgagatcacaaatgaagagaattgagcaaggattctggaagagagtttagagggagatgaagaaattagggagataagcaat

SEQ ID NO: 10994 - DNA, 1837 bp, Emericella nidulans
ggggctaatatccttgaaatcgtagccaataagactggctatgtcaactacaaagttgacacaacgaaccttagactcaaccagacttatcccggccctctctcgaatggggatttgtccgaatactcgccggtatggccaaacccattgaccgagggcgactgttcagcgggtcatgggatccttgacacggtcaaggagacatatgctgggactcagcccacgtataactacaccagccctttcccttacgattctaagagtgggtacaacgaagatgttgatgcgacccgcaaaagctcatagttccatagcaacagcgactccgccggttccttcgtcgaatgcggcaatttaccggaagactgcgctactatatgtgtatgctgtttttatgtggttacttgtgcaagatatcatatgaatcaatatataacggcattatcctgaagaaagacttcgctccctttcaatcttattagggcccagctagtcctcaatcgtagtcacgaccgtgagatggttttctcgtccgtcactcagtcaactataacttcaattctgatccgctcaagagctcatcttgatcaaaatcgtcttggtctcaaggaagttgtcaagactgtgcatgaagccctcacgcccaacaccactcatcttgtacccaccaaacggcatgtccttggcgacattaggacttgtagtgttgacgccaacagtaccagcttccaggagcttcgaggtacgcactgcgcggtctagatcctttgtgaagacggatgcatacagcccaaactccgatgcattagccttcttaatggcctcctcctctgttttgaaggtgttgatcacaacaactggaccaaaaacctcctctttcacgatgcgcgagtcctcagggacaccctcaaagacagttggcttgacaaagtacccattgcctgcatcaccacccatgctaagttttccgtcctgttcaccgatagtgatataagactttacacgctcgtactgcagcccatcgacctgtggaccgtgtgttgtgcctgattcgagcgggttaccaaggaccgcgcttccgaacttttccttgaacaaggccaagaactcgtcagccacagactcctggacgtatatccgggagttcgccatgcaggtctgtccgctcaggcactggatactgaactgtgtcgcttgggcggcgttttctaggtcggcgtcctcgaagatgagagcaggtgactttccgccgagttccatgtgcacaatcttcatgttcgatgcggcggccgctgcttgaatcctttggcctgtgaacgaggagcctgtaaagctgaggcaacgcacgtccatgtgtgatgctagcgtgctgccggcgggggtaccgaagccggacagaatgttgatgacgccaggtgggaagccggcttcggcgatcagcgtggctgccagggcggacttagtgtgttagataagagcagacggcatgggttttaagatgtcttacagtcaatggcgccttctcgctgctcttcagaacgaccgtgtttccagccgccagagccggcgcaaccttgaatgcgaaaaatgccatgggcacgttccaggggataatgcaagcaacgacgccatacggctgcttgacggtcatgttaaggtggccgggcgtgttcaagctagatgtcccctggaccgtccaaccagcctcagcgaagtaggagacagtatctgctgacacggtagcatcgaaataccgcgatacagggcttccagtggacaagggctcaaccgagcaaactcctcgttgttttacgaattagagcggccagttgtggag

SEQ ID NO: 10995 - DNA, 593 bp, Emericella nidulans
tgcaggtcgactctagaggatcccccgacatcacctgataattaatgcaacactcgtcaagacattgttaaagatttcatcactctgatgataacatgggacgagatctcaaataccttccaaactccatcacttgcgaaaaggataaactcagtctcatgatcgatattctcgtctcttatgtctggatctgagctcagatgtatctttaagctcttatctccaaacgccctagcaaccgctagttgtccatcaactcttggaacatcccctgaaaccattcaagaatcgtctataaattcctcttctcatgttttatatgtgatgagcaagtaagtgtctccatctacaaaacttacctggaatatttgatacaaagccaccacggctttctatttccttttgttccttgcttggttcatgatcaacagagagttgagaagcaacaccgttctttgacatcactgcacgtgagtctccaacgttagcaatcactagcgttttccatctatcagaatgcctgttacagccgttgatcacctttgccaagtttaagtgactgctctaatatcacagcatcggttgatatgtat

SEQ ID NO: 10996 - DNA, 2284 bp, Emericella nidulans
gttttctcgaccattttcttccaccaactgctcgttaccctcaccagtctccaatcgttctctgacctcttgcaggttactctccgacttcattagtttctctttggtagcctcatatttcgacctgatagcagcgtaatcttcgagatcttgctgaagttccttgatctgatccttcagctccgcttcttgctgctgggtcatatcacggaggcgaatcagtgcttcacgtagtcgttcgtttgtcttctccatctgcaaccatccatggctggatttctcctctgggctcatggtctgcccgaattcctcgttctcctccctcagcacttctacttccagctcgagctcctccactctcagcttcagagtctcacattcaagcttatgcgcatcagccatctctaccgccatttcgcggtccaaactcgcaatttccattagcgactcatgttctgctatcagtttctcgagctcctccactctcgcttcagcctctttaagctttgcttccaactcggccaagttacgctcgtgcggcttgtatttcacttgcagtgtatggatgattcctctcagtttatcacgatcggcctgcaaggcctccatgtcctttaacttctctcggtcttcaacccgcttcttttccatcactttcagcttggtcctcaattcgtcaagctccctgtttattgccatgttctgagactgtcgtggcgatgcagattgtcccgacaatagacgcgaggagctagtccgtgctggatgtgcaggctgcggtccaagatcctcctcaatgtcaccttcaacatcattggaaagggtttcggaaccctctgttgcagggcttggttcttcagatgttcttgtcgtaggtgttggtcgcagggtcggccgcttggacaagcctgaggatgtcgttcccgcagttccctgtaaactctgtctatttgtcttgtttcctggtcccgacaaggatgtacgagccgctcgagatgtggtagattgtgtaggagggcccatggagggcttcgtggtagtaggccgaggttttggtgcggctacagagggtcgtgaagagccgctgatagaaggtcggctggcaggcgttgcggacgtcaactgttttgtaggcgatttggaaggcgtctgtatgaaagagaatcagcgacgctgagataaaccggctgtggaagcttaccttcagagacagccgttgtgctgggcctttcgaagcaggcgtcgggctggaactagcgctgtttcgtttaggattcatggatgatatagagcccggtcttttcagtcccggcgctccagttataccgctctgagctcgacttctactttgggaaggcgcgttgcctgctgattgtttggctgctggtttggctgtgcggacggggcgttcaatgacggaggcgacggcggttgggcgaacaaacatgccgaagcctggttcgcagtcgaaataccgttcaccttggacggagccatcgttcttgccggtgtcgtcggtcaattcaaccccaatccactcgccgtcggcgaagctcgtagctcctatgaaccggacggtggcctgccgaccatccgtaagagcaataacactgccgatggtaagctcggccatgttgatcatgaactggagctcctgcaatgactcagaaggagaactccaggctgtaaggagaggcggggacggccgttgtgtttggaatgttgttattgaccgcgccaggggaactctcccgggtttgttgctgcctcagaaataaggcctcaaatctggtgcctgacgtatacctcaggctatagatcacgaccatgacttacctcccttcttgacgtccctggcaattggttccgtttatcccttcgcccctggacgtcggatgtccctttgctcaccttgaatagcaaaatcccgcaccgatcgaaaatctccccggttcatgagaggcagagagcccttcaaacccccttgcgttgactgttcccaagcttcaacgaagctatgcccactatgcatcagatagccaaaccttctggaggctggtcttgtgggggtgtcagtctgtgaaaggagctttctcctgggttacccctcgtgctcataacccttcgacctatggccaggttaatggccagtttcacaggcaaaggacgtgcctggtttgcctcgcaatggcgttacgatgagctcagcatagggtgactctaaggtataaaaggacgatgttttcgaatactttacgatgctcatcagatatctttgtttata

SEQ ID NO: 10997 - DNA, 2110 bp, Emericella nidulans
gatgagcccggcacgcgtgctgaggtagagaagagcatgaagcgcaacttgacgcgcggtgctcgctattcgttctgatctatatcatgaactatctcgatcgaaacaacatggccgctgcccgtttgaagggtcttcaggaagacctcaacatgaactacgacgagtacgcgacgtgtctgagtatcctgtatgttgggtatattctgatgcaggtcccgtcgaacatcctcatcaaccggatccagaggccttcgctctacatctcgttggtcatgactctgtggggtctgatctcgactctgtcaggcgtcgtccacaactttagtggaatggttgctatccgtttctttcttgggttcgtggaagctgctttcctcccgggagctctcatgatcctgtcgaagtggtacactcgcagggaactcaccacgcggaatgcgattcttttctgtggaaacctcatttccaacgccttctcggccctgatcggagccggtgtcctctccaacatgcagggcgtccttggccatgctgcatggcgttggctcttctggagtatgtcttgctaaaatacaccttctactcctgttttagcacagtcactgacatagtatagttgagggcgctgctacaatgaccatcgccattgctgctgcgatcatcctcccggatctgcccagcaacacgcgcggcttcacccaggaagagcttgaagtcgctcagctccgaatgaccgaggatgtcggcgaggccgacgttgactctgaggattcagggccgtgggatggcttcttcatggccatcaaggacgtcaagatgtatatcatgatgctcaccctgacagcttacgtggctggcctgtcgtttaatgctttcttcgtaagtgcattctatcatgatacaggataccattttaacaggcctcttcagccctcgcttacagaaaccctcggattcgcctacgtgcccactctgctcatgagcgctcccccatgggttttctcctgcttgttctcgctttgcgttgcctggagctccgaccgataccaggagaaggtttgtcgagcttagcaataccattaatcatatcgcagagactaacttttccagttctggcatatcgtcattcccatgctcatgggcctcgtcggcttcatcatctgcatgtcaaccctccagactgctgctcgctacgtcgccctcttcctccaagccggctcatacgctgggtacgttcaatactgtccctctccttcgcccacctactaattctcttaaccagcttcatcgtcttctactcctggatcagtacatccttcccgcgcccgccgggcaaagcgcgccgtcgcaatcgccatggttaacgcatttagtcagcttggcaacgttgcgggttcgtacgtatgggatctgaaggagaacgggtaccgcaagagttatggtatcgtcacggcgatgttgggagtcgcgaatgttgggtgtctgatcttcaagctcatacttgaagcgttgaataagaaacttgctgaggcggaggctgtggaggttagtagtggtgctggtgctgctcagcagagtggcatgcatggtggggaaggggacatggatgagagtctgaggatgcataagggattcagatatttggtctgagcgccataagcccgcttccttggcttatttgttacaaaaagtgcaaggcattgatctgcgtggtatcggctggcggctgcagcccagtagttgagatggctggttcttgaagcccaggatggcatcggatcatgtcatactatattcactgggtacatcagctgcctatttgtttacaaccctggacatgataatgaacatgaacctgaacaggaacatccccccatctactgcggtacgatatgcgacatagttgaaacacctaacacgtccatgcctcttatcaggagacttgtattaagataagataggatcggctatcaatgcgacattggagaggggtctgcactcactgtggggttcgccttgctatcatatcaccgttatcagtgcctggcggcgtactccgcatctacaccatctctcccctcacctgcaggcccatagtctaagcctg

SEQ ID NO: 10998 - DNA, 2642 bp, Emericella nidulans
catatcttcgatctgattgatctctttcgagaacacgcgaactcgtattcggggaaatatgaaccgcatgatgcgcatggcagagcgcacgggtgtagggtggaaggtctgggctgggttctttgctctcgtcttcttccttttcttctatgtgtggatcacttagaggccttgccttacccaagcgtggctaaaccagctgaaccgggggagacttgactcatcttgttcgtccacatatgctcctatggtgttgattttccagaataccgccgttacgtcatatttgtcctttcaataatctttttacagaggctacgcatattcggagttactcgctttttcggaccgcttatggctgatttgttcaatgatgatactactccacgccaatctgaactatatgtgctgtacataataatgctagacgattagggaagctgctttccgcagcacacggactgttaacatatcgactcaatatcctgatcataggatataaaagtcagcttgcctccttaaggtcatttctcatggacgtaatactgactgccattgccgtttggggtagacctgacaaccgctatcttcacctatatcgtgctcatcatgacgtcgctatctaaacgctgctgacaatgctatactttcatgcctcatttcattctagtgggtaggtattcaatgggtccaccgagcgtgaaccccaatgcaccatgtcttcaggtgtataggcttccaactctacttgaaaccgcatcctcccatcaattcattcggcgttataccaagcgaaaggtggccatgggaccgcgtctctttggcaagggtcatcaagagctaagatgctattcatctcgtagttgtcctctgccctaagcatgaataactgttgaaggagatcctgacagtggtcgtactaactcacctttaaaaaactttactatgccctctcatggtcactatacccttgtagcatcgactgaaggcacgagtttacaggataacgggatatcaacgatctcagctcaaatctacttttcgtcacatctcacgccttcgaccctggttgtagctgacccatgacgagccttcactattgcatggcctccttttacggcggctctcatacccacatacccttcatgaaccctggtgggacatcaagaattttggtcgattcgattcttggtatcgtcataagtgcacaatactgcttcgagagcgaggtgtcggagtagctgcttttttttcgcatccacgaactgtatcttaaatcgtgtcccggtcgtgatcgaatcttgaatcccagtgaaagagacattaacatcaaacaacacaatctagacaccgtgcgcaacgtccaacatgagttgcgtacgttttcgtaaggaaacatctcaagtactctatggccaccattcgtcccaactccatctaggaagacccagtttttcatgtataatgtccctgaactctgtgtctgctttgtgctggaacgtattgttcgggtatgactgccaattagattaaatctggggacatagatattctactgaagccttagttcaaatacagttaagtcagtgggaagcctcattctgcactccgtggtcgtatataaatgtcaagtcccaggggaactatagcccacagctacagccaatcaggggtcatttgtcaagattgagcatgaaacaatatcctctatattctattcacactatggtatatccgtttatgggcgacctatgtaccggtaatggaaagaatcgcgctatcaaaagtgacagcgccagaatacgcaaaacacgggggtatgtatgttacacagcaggcaaaggtaaagtatgaaggcaaagaagagaggggctgcaggagctatcatggaccagcaacggcacttctttgtctagcaagccaactcttctgagcgtccactagtccggcggagccatggcgataccgcgaggtaggaacattattcgtgctatgtagcttgctttgtagctcgtaccaggctgaactcatgagggcgagttcccgggttagggcatcgagctgtttctcgagggcgcgctggaagacgtatttgttagcacacggtgagagatatggtcccacaggcagcaagaaaaagccaactagaggcgagatcgctgactgtgccaaaaaggaacaatcacttacctcgcgctctttgctgacggtgtcttcctcacgttcagcagcgttggcttcttcaacaaccgtctcgagctcactgattcgttctcgcaatactttgatttgttcgttttgttggtggatgtactatgcccatgacgttagcgatgtccattccttccctgtctatactgattttaaaaactgatgaggccaaatttgaggtcaggatgatttgtccatggaggcttccatgagaagaaacccgctgaccgttatacctccaatttcgctcatcttcactgtcagctaggggtccggttctaatgaggcgtgctcagatccggaggggatgcagaagaagacgtggtctcctttgcgtagcccctgtcatgtagtcctcgacatcctgctcaggcgaaaattcttgcaaaacggtgcatgcgtttaaaagaagaagagatctcaaaagtagt

SEQ ID NO: 10999 - DNA, 467 bp, Emericella nidulans
tatgttaacacacaggcggtttaggtgacactatagaatactagggatgcagacatcatcgcagcagcgctggaaggcagcacggctcaaggaattcttaatgattcaacgacaccaatagcaacgtcgaccacccatgatacctgggctactatttccaagacgagacatatctgacgagagcgcacctacgacgacgcgctacctgagtcggacggaccgcgaaccgacacctctcgcggcaacatcctatgaattgctaggccacgactcaaatacgaccgagaccaacaccacccggactaccgctgcgcctactaccaggtcccctgcgccgaggagctgtatgctgcccttcagcccgtccgtccagagagcgacttccgcaccggtcgacccattgtcggacgagcgcttcataccacctcaacaagaccgctacatggagtaacccacactgaccccaa

SEQ ID NO: 11000 - DNA, 587 bp, Emericella nidulans
gcaggtcgactctagaggatcccctttttagtcatgttatgaatctctttcttacttatctcaagattatgaatcacaaggacaaatcttgaattttgaaacatggaccggaatctttatgcaatcatacaaaagtttttttgtgaccaatcgatatagatgttgcaactctttgtcatgctaactatggttgaggattatagcagacagaaaatctgaggacatttggctccaatgagttggccctcaaaaatgtatactgtacattgtaatgttgtaatccccgcaaaatgtgacagctaaaaagctagagtttcccacagttaaaaaaaaaaatcaaaagacaagagccatcagaccctggactgacctatgcaactcccaagacagttttcgtatccagcctgcgtgctgtactcagttcttacttgccaatcaacaccttgtgccaacttgccaagacaagttctgtttcagaagttaatggccttcaaattcaggtgatggctttacaagttttcaccatagcttgtgaacccaattgctaaatctgatgagatggagacgagcagcggataagaagagtg

SEQ ID NO: 11001 - DNA, 590 bp, Emericella nidulans
gcaggtcgactctagaggatcccccctggtcaaaaccaaaactcacttagaaattagctactaggaaattattttctgaataacttacaaagtgttacatttaaaccatatgcaatgacaacgtaccaacaagagtcacgaggtctaatgtgttgagagttttagcagcgaagtcttgcttctgcttagcaacggagtcgcttggtccgggcaagttcacgtctgaggcttgcgagattcggccgtcgagacgtcccaagggcacttcccagcgttgtccaccggtctgcataaaccaatattaaattaccgctaaacacgaccatatatatatgttatatatctccctcatgtgaaatacacacataaataagaaagtaagaaatcgaatgaaatatgtaatgcatgtaataatttcagtatattaccaaaacgacggcgtctcgggctgcaagggtgagaatatcagcacaagaaacggtacgaggacaagccttctcaagccgagccttagcttcttcaataacttcgaaccctctcaatgaacggttcggaactgcggttctctctgaggtgttacagcgaggaga

SEQ ID NO: 11002 - DNA, 655 bp, Emericella nidulans
  unsure (1)..(655): unsure at all n locations
gcaggtcgactctagaggatccccaatatagcaaattggttttaaaaataaggcgacgaagtcataatagcactttttctccaggtaaaattcagcagctagcacagagagcagcacaagtgagtgcactgagaaattacattgctcctcagcagcttcaggcatcttcttttcctgctcctgctctggtttcggctcctctgcaacttcagcaatcatcatttcctgctcctggtccggctcctctgcagcctcaggcatcttcgtttccttcttcagtctctcgtccatcagcccttcttctgaattttgcggtctgtccaatgcctcagcccagacagcctctcatatccaacatagctccaactccatcagttactcctgcaacaaatccaggtctgcgttctcctgcaccacacctaaactcatatagaccatcctcttcaactcccgtcgccacagctactccaacctcgtcagtgcctcctcaagctttgacatattcagctgtgtcaattcagcagcagcaagaacaacaaccgcaacagagcttgagcagtggattgcagagaacaatgaagtggtttgcntttctgacgacgagtgacctaagaggagagatggttagggtctttagtattgatttttagagagg

SEQ ID NO: 11003 - DNA, 2435 bp, Emericella nidulans
gtacatccacagctcgctctatgatcgcatgaggtatggatcgctccactgttttagcatatacaatggctaatttgcatagtactcgaccttttccagaggacattgagaagaaatggatcgctttccaactcctctgtgctctcagggattgccatgcggttgatgtcttccacggtgatatcaagacagaaaatgtcttggtcacggcctggaactgggtgtacctctcagatttctcctcttctttcaaacctacctttctcccggaggacaaccctgccgacttttcgttctattttgacacatccggacgtcgaacttgctacctggctccggaacggttccttgtcgccaacgaggagccagggagtaggaacgtgaactgggccatggacatattcagcgctggctgtgtcattgccgagttattcttggagtcgcccatattcacactgagtcagatctacaagtacagaaaaggtgaatacagtcccgagcatagccagctagccaagattgaagatcccgaaatacgcgctctgatcctccatatgatccaactcgaccctgaatccagatactcggcagaggaatatttgaacttctggaagatcaaggcattccccgaatatttttacagctttctacaccaatacatgtccctcatgaccgacccttcttctggtaggacgcaagttgaggctgggtcggcaaatcgaggagaagccgatgacaggatagagcgggtttatctggactttgacaagatatcctctcttttaggtgcgcaccttgagcccggcaaagacgggtccttgagcacaacttctaagcttacaagcggtaccttccctgtggagcttgacctgccgcgttacaaatactcggatcgcacgtcaactgatgacggggtgctgatcttcctgacgcttgttgtatccagtctccgcagcacttccaaatcatcagcccgaatcaaagcttgtgatatccttcttgcattcgcagagaggctatccgacgaagcaaagttagaccgcattctcccgtacatcatgatcctgctcaatgaccgaacggactctgtgaagatcgcggcgatacggtctcttgcacggcttttggagatggtccaagttgtctcgcccgtcaatgcatatctcttctccgaatacatctttccgagactacaaccgtttgttccaaacgcaaactcacagcccagtccggctgtacgtgccgcgtatgcctcgtgtattgcatcgctcgcgcattcttcgcttcgattcctggatatgattcaagcattacgctcggacacgcgcctgccagcactgataccagctggctctgagccgagatggactgaggattccacataccataatctgtatgacgtagcaaggatagatctccttgactactttgaaactcacaccaaagccttgttgacggacaccgatgcttctgttcgccgcgcgtttctgggatctgtgtccagtctatgcgtgtttttcggtaccataaagacaaacgaagtaatcctaagccatctcaatacatatctaaatgatcgggattggattctcaaatgtgcgttcttcgaggctgtcgtgggcgttgctgtttatgttggcaccaccagcctggagcagtatattctacctctaatggttcagtcaatgacagatccagaggagtttgttgttgaaagagtccttcgctcgcttgcggccatggcggaccttggtcttttccagagacccaccacttgggatcttttacacgccactgtgcgtttcttagtacatccaaacgcctggatccgagaagctgctgtcagcctggttgtcaattcaaccaaatttctatccacggccgataagtactccattctcacccccctcgttcgcccgttcttaaaggtgagtatcgtggatttctccgaaggagacatactcgatgctctgaaaactccactccctaaagccttgtatgaccaagcgtttgtgtgggcatcgcaagctgaaaagggatttttctggaagtctgtcggtcgagatggtgcttctctgggtagcgttgatgcagcgtttcagaagagggcatcaaaggccttctccctatccgcgcaacctaaaaatgatgaggacgagcaatggatcgcgaacgtgagggcattaggattgaccactgaggacgagtctaaattgctcgccttgagggagcacatttggagggtctccatgcgtcaaaccaaggatcatgagagcgcaggggcttcgttgaataacgtggttgccttaatcgattatggagttacaccccaaacagtgttctttgacaaaagccaaaacgtcaaggcgcgaagaaatcacgagaatcctgtcgggaggccgcaattaacccgagccgaagatagtaaggcacat

SEQ ID NO: 11004 - DNA, 542 bp, Emericella nidulans
tgcaggtcgactctagaggatcccctgtccacatcagcagcgacttatctcgcgtatctcctcgaaatctttcagttaaggaatctgaaatcaaatcgtttgttttgttgagtttatcctcaaaaccaactgatcttatcacatctatcatctcatcaagaatatttttgcaatctcacctgacatatatgtccgctcatcgagttcgcctactcactcaatgggctggggggcaaatgttggagctggatttccctccaggaatccatctgcgaaaataccaagccagcccacaaaagcccaccaaacccaccaagtaggggacttacgcagctgatgagcccacatacgcgaatgggtatttgggccagataagcccggtcacctgatgaagggagataagcgaataacaacctaggaactgatgatgagatattcgcggacggacctgatatctcggaactgcctgccgaatatccaggaggatctcgcagatccggacagagctacacgtgcgtagactatataagggacaaggacga

SEQ ID NO: 11005 - DNA, 843 bp, Emericella nidulans
ggatcttcttcacggcgttcaggcatttgtcgatctccatcgttcctggtaaaaagatcaagatgcccccaggttgatctcctagcttggagtcaatataccgaacggtggaagctatcaactcgtagttaatccccatgccaacggaccgaaggattttgccaaatgactcgtcagatgctgaagaaggggctgtgtcttcttcgaggcctcgctcggcgagctctggtgcgaaccccgtttcacgaataacatcatcgagatagtaatcttccaccgggaaggttcgcccagggatatggaccaagcccaccgattgccgcccgccgaaatattgtgtaaagatgtctgcgtcaagtgttgcactcatcagaatcaccttgatatccttccgatggcggagaatatcctttaggagggccagtaagaagtctgtgtcgagactgcgttcatggacttcgtcgacaaccacatgcgtgacgtcggcaagagagcttgcgatatttcctgagtcgctgcttgactggatcctacgaagcaagacaccagttgtgacgaatgtgattttcgtagtcccaggcttagatttcgactcgcccctaatgatataaccgacctcgtcgccgacggatgagcaacgttcatcactgactcggtctgccagacctaacgcggagatcctgcgcggctgagtacagatgatattcgccacaccaccgagtcctctcttgatcatatcatcgaggacaaactgtactgattgcgtactcttaccgctacctgtctctccagatattattgtgacttggtgagtatcactgcgcgtatgattgcgtcttgggt

SEQ ID NO: 11006 - DNA, 929 bp, Emericella nidulans
tttttttctatgtccctcgcatatgcggtgtcggatgtgaagcgaatacctgcagatcttacttcactgaggaagaaatcaccttcaggcgtggacaagcgaatgtggctgcaaggaaacaacgacaattgatcgtcgcgaagctgtctgctgagcgctccgatggaagtgagataggatcggactctcaagacagctccctggaattgcaggcttacctttgactcgtccgcgatcgacgacgccacgcaaagcttgaagtcttctagcaatatctttaagagctgcgaaaccgggatacccctcgcccggaagatttcgataatcaggaacgccagaaccagaccgctttgctggaagagtttgaagatgagggtcaagccagcggtgaagctagtgctgatattgaggagcttgtgcataagctagagagagcagtcattcgtgcaaagtcacaacttgatcgggaaaaaaagctatacgcggaactgaaagctcgcagtgcgttcgagagttatggggaggaagagcccgccccagctttgaaagccgcagctctccaggtaacccgcaatgagcttgtacaatgggtagaggataagcttgtaggcagtggggacagtgaagaagctcctatacaggagatacctgctgaagagatagaggagtccgctcgtatccttgaggagcagaggatgcggattatacagcagtacacagtttacacggaaacccgcaagcgcctgttagagacagttgctcgagcttgccagcctgtgtcaacagttccgccaagactgcatcgcgacccctagaagtccgcacaccctccacggaaaaggagttaccaatcgagccgttggaggttctgtcctatgctagcgatgtccttcacccaatgtccaagattcagcggtctctagcgctac

SEQ ID NO: 11007 - DNA, 917 bp, Emericella nidulans
aacggcacatcacgctcgcacataatcactggatcgccatgaagatacagcagataacctgccctcgttagtcaagagcactcccgctctgacgggtcgtctttccagagcgccaacgatcataaagtcagcagccacggacttgactctccgcattcgtaacgaggcgaacctcatgactgtagtcagagtcgccacggccccaaacacggtcaccgtgatcaccggatcccgggcctgaccctctagatactaagtcaacaatgcgctaagtaaacgcagaatgatcgtagaaagtcaaaatatagccgttctatgttatcctaccggccgggaccagacaggaaatgcccccccactacccactccactctgctggttactggacagcacactagccagcaagaagcctagaaaaatagcagacaggtccagggacgtctcccatttctccctgagggtggaacaatgatcgtggcctggtaacagggggcaaaaggattattccatgaacagcgttaatcaccgcataaccccctccccatcgcctcgcttttgttactcaaataggccacttccagaccaccttaaaattggtccaaggcttttccctccttccttacactcgcgcttgatgcccactctcgaggatggcttatcctgcagacacatcggccgtagacgggctggagtcgcagatattcgactttgtggtcggaggaggaggcactgctggccttgtcgttgccaaccgtctctttgaggactctaaggtcagagtcctcgtcattgaggcgggcagcaacagcgtcagagatcctcgtatttcaatccctggtctcgctgccagcacctacttcgacccggatttcgactggtgcatcaccagtccaccacaggtcagttgcctcctgtca

SEQ ID NO: 11008 - DNA, 2232 bp, Emericella nidulans
agtagtatatgggcaattcgtctctgaatgtcatgacgatccatcatgatttggcataacaaggaaatagttggattaattattataagttctcataactggagatttcagagcatcctggtcaccggcccccatcccaaccattcagaccgtcgtctttaggtattattaccttttcttctccagctgagcaatcttacgtctccttcgcccacggcttcccagcccaaatgcccccggccatgctcaaccaataatcccgtcccttaatcagccagacaaggaaactcggcatcctgtaccccttggctgccccaacgcccttgctcttgccaatgggcacaagatgcgtctcagtctcatcagccttgaacagccgatcgtcgccgggaactggtacttccgcctctaccagtaaatcgcgcttcaggttcgcgcacagcacgggaatcgcctccataaggatgtggattgctggtcgggcgtagtcggacacatcacctaccgcgtaaacgcgcgatccggccttgtcgacgcgcaagctctgcgggttcgtggacacccgtccgtctgccgactttaaggaaccgtcgaggaagcttgtattcggggttgtgccatgggcagggatataaaggtctgcctgcagggtctcaccattgcttaacttaacctctgtctttgccgtaacttgctcctctttccctgaacccactggaatcacgctctcgaccttgacattcttgaggatttcaaccccaaactttgccaggtacccctcggctgtgcgggcgatagctggtcgtaactggggcaggatctctgacccagcggtcacaaccacaatcctcacttttggcgaacccgatctcgaactaaaccagcccgtcttcccattcaaatgctctccgagctcacctgctgtctcgatccccgtcgggccaccgccagcgattacaatacgcttcgcggaaggtagggcgtcccggaatgatttccacttggcagtcaactcaggtttcccggccgaatttagactgaataaaggcgagggcgttgacgagcccgtcgcgatgatgagagcatggtattcaagttcgacttcggtgtcggcgtcgagtcggtcgacgactaccacgcgcctctcatgatcaagccacttcgcgcgcccatgaatgaatcggaacctctccccgtacggtttgaactgcgcctccaaggagacgaagagcttcgactggtcaaaatacgagtctgcgatcagtgcccgcggagccgcaggtcggcacatcacctcgcgcgagctgctgacgatgacgacttggtacgaatccggcgagggaaggactgggaggatgtgcttgagcgtataatgggctgtcgagatgcccccgtaggagccgcctaggatgaggattgcttttgtctcggacgtcatgttcgaacttctccctttcgttctcaaccacgaagataatatattactgtgaacgccggttcaaggcgggaaggatagtggccttcaaaaataaccatctatttaagttctagggaagttcgcgtaacgaaggctttcgatttggttccgttctggctgaccttgcggtacggaccaaacaggggccgagctgccgtggctgcggtagccctagcctcagctttgtctactcgggcccgaaggatcacaacgtgctgttccttattagtcacaattaataatccgctctctttgtacaacgcgagttagaattatgtttggctaagcctaccaagcacaagaatctgagtactgacaatacgatccaagaataggtattaccgttctaggtaagcagtgttacctgagtgagcaaggcaagcagggtttgtagctattcatcacagtgtcttctcatctctttcaggaagagtgatagtgaatagtactaaagaaatctcctacgccccccctttttttctaggttattactctaggagggtagggtatctgcagccacgccaaagtctcctcccgcgggaggggaccttgagtttttttacgagtgccctgacgatcggtaagcctagtaaggctttaaagagtgcgcatagcaatcatccagaggacttgtttgcagggtagagtcttcaggcccgtatctataagattaaaaaaggccctttgcactgatttgttgccacacatttgcttgcttgtgaggcaacatacttaattgtcttatctacataaac

SEQ ID NO: 11009 - DNA, 2689 bp, Emericella nidulans
gtgctatttacggaacaacaggatttgaaacaggcaacaagggtgagcaattccagcgaggccgggccgatttattctaaacttatgcctaggcgcaaacgaatgccaatctaattgaatccagaaaaggtcctgcaatccgcaatattgtcagcggtttggagaccggattgagggcgagatttgccgtggactgacaaggatttagaacagccacggcactttcaggatcaaatacaatccctttcatccaccatgccttggctgcaagtccgctctttccagcccggtaaggagtgatgaggactcagcaaccaagaggagccgtgggaggcccacgagatcccaccatgaaatgtctcgccgagtatcaacttgggcggccatcagagctcttggtctgggctcggaaacttgtagcggccagatcattttggctatctacggcaaataatccgcgccttcacgtactccggaatggtatctcctctaggctatcatggtctgcctctagcccacagatcttctactaactttgtcggtggattgatcctagcgcgtaagcaggatgtatataggtggggctgaccagttgacctaaaaccccaaacaagccaaccaggagaatatacggagctgaagagaggatgacaagttgttatcaagaactctgatagtaaggctttgggaaagctttcatgcacatttcccaggaatgcactacgaagtggatagcttggtaatttgcaagaaaccttcagaatcgacctcagaaaacaattcggcgtgtttgtatcaggacgcaatggcagcttaagcccgtctataatccacctgctgttggataattactggcaatcatgaagcctccctccccgcggtatactcctcatctgtgaccgcatccaaccacttcgtctccccaagcccaacaacaaagtgtgtcatgagactttcttcatctgctccatgccagtgcgtcgtcccagccggcgctcagatcacatcccctgcctttatccgtcttggcttctttcccttgtcgcatatccagccatttccggtcgtgactttgatgacctgcccctcctcgtgcgtgtgccagtgaatgcgggcacacggagcgaacgtaacattggcggttgcaactttcggatcgcggtgaatgagctcgaggtagacgttgccactgaactttgcactagggccaactttggtggtttgtctggtgttcgagggagatattgttgaggtagtagtcattctggggtgatgtgctgtggtatgtcagggtgaggatagtcgacgaagaagatattcttacctcgagctcagaaggtgcgctcaggtcaggttcggtagtggtcgagggtagaagctttaatgagcgatttctggtcttatatagcatacttagggggggtggagttggtttactatactccaaccaatgcaagccgctgatctgtaaggatatcttggaaagccactatttcgttatccgtgctcgatttacgtgattggagtctatctccatctgaaaatgagcttggacgtgtttagcaaggggttagcgtcccagcttctcagaaaaccaatcgtcaattgacgactgccatgagcggcggcgagacggagcactagtccactgaatatacgctaccctccttttagatggaatatagtggcgcctagtaggtgttttctacacgagagaactgcgccatcgctgatatgctggttcgtgactcactcaccgtacggagtgcgcgattttggtcctatgacggacactgataacgagaacaaggcggaccgacgtcacccactcgtatacttacttgtgtgtgagaaacaggagattgccttttagtgagtatcagcagtaagcgacagtcctagacggactcgaataattgtcggacattactcaaaagctgggtggaactttcaggaacaagccagggcgccttttccccagaacaccttacaattctatttgcgacactgtatctattcatgatagtgtgttcttttcaaattgattgagcctatcatacaagtcctagatcaagtagccgattaccaaactctataagatagtaatccccatacaccaaaccatgattgctatactgccgtcgcgcatgctggttgttgtttgccgtgccattcttgagaatcgactcgaacgtacacccaggggtgctatcctcaacactgatattggagccctcccccacaagctgagctttctccaacgccagacatagattgatagtatccccgacaatctccaccgcagcgtctagaaagcgccgtgcaagcttgtcttgaccagtggagagaagcgcttgaaacaagaccagcatcccgttggctgcaatgaggccggctgaggaatctcgcaagggcgatgaagggtcaacaggtgcgtcgaagtcccaaagcgggacgtggcggccttttgtgcttctcctttttttgttaccggcagtggatagacacggagaatacacgtcaagtgggatctcaacgcataaaggcgctgtttcgagtctatgaaggaagtactccgccgtaccgcatgcagcatctaaaaagctggtgtccttcgtccacatgtatgtctgcgcgtacccaagtattgcccaagcctggccacgggaccaggttgagtcgttgctgt

SEQ ID NO: 11010 - DNA, 663 bp, Emericella nidulans
gcaggtcgactctagaggatcccccaagtattgcaagctgccgatcactgtcctgtattctccgggttcgtctagagcaatgccagagtagagtgaaagtttaggatgtgtcgccattggtgtggacaccggtttggcatctaacatcttcatcctagacaacaagtcataaacatatttatgctgcatcaaatgaagaccttgtgaggttcttgttgcctctataccaagaaaatataccaaatccgtcgggtccttcaacgagaatcgccgagaaagagcggtgatgaaagccattaccaacgcatcactacttcccgtgacaataatgtcatcaacatagaccaagcagtagacgatttggatgtcgttgatgtaaacaaacactgatgtatcagcgagagaattggtgaatcccaacgagcaaacaaaatttctcaactcttggtaccaagcgcgtggagcctgtttcaggccataaagcgccttcttaaggcgacaaacgtggtgtggtcgatcggggtcgataaaaccaggtggttgtgtgacgtacacctcatccgtcaatgtaccttgaagaaaagcgttgtttacgtctagttgtttaattgtccatgagcgagacactgccaattgtagaactaggcgaattgtgagagattt

SEQ ID NO: 11011 - DNA, 588 bp, Emericella nidulans
ctgcaggtcgactctagaggatccctaaccggggaaagcaagcgaaccaagagcaaatcaaatcatcactaatcacttccctatcatttgctttctaagacattccttacaatgattatatctctcaaggaaacgtgcaagaatacattgaaaatacagatagagaagatgaatatgggagccaaaacagatttaccaagggaggaaaaaaagtcaaatctgtatatggataggtcataggctcaccaagaaattgtggtaaacagaagctctgggttcccaagagattatttcaacccaacgctcgttctttgaatcatcttcgccacttctacgggaaaaaagagaaggaaaagttaacccgatcttgaagcacactaaattgaaattcaatattggcatgggatggtatcttacctctgaagtgtttttcggacaatagaagtgagatcattggcttttgaggatccggcattgttgctgggcacgagagaattcaaaggcgagaagaacaaaatcacgaaagtggacatgatcaatacggcgaagagagcgttgaatgcgaggatttcgagctgaaggacgatg

SEQ ID NO: 11012 - DNA, 1189 bp, Emericella nidulans
tacactatatcttcgctttcgctggagtacttgtcaatcgaccatgaacatagctgatttgctgaaacttgcgaatcgcctcgccccagagctccgctcgaagcgccgcatagaccctatcaccagtccttagtttagcacaccttaagcgattaggtataggatatgtacgcaccccatctttgctttcggcgcccacttccttcccatctccagtgcaacgtcgagcatctcgtctgggtcggcaatagcatgcacaataccatccctcaatgcctcctcccccgtccaccgatgcgcctcgaggagcatctttgcggcgatgtcgggacgcagcttcaaccgcggtagcgagccaatcccgtcaaagtgcagcccaagatttactgggggcatagagaagaagccgcgcttggagttcatgatgcggtagtcgtgtgccaatgcaaaggggcaggcaccgccgaaggtgtggccggtaagcagggcaattgtgggaaacgggaagtcgaggactgtatgcactagctattattcatgaagcagaaaatctcagccttgcctctcgggtccaggatgaagatacgcaccggatagaacccgtccgaattggcgaacgggttggtgtccgactcatcgagttccagcccggtacaccaaaacttcgcatcgctcccgcgcgtgattacagcgccttcactgtcaggcccaagaatcttctcgactgttcggaatgcgcggataagctcctggcaataccatgtgttcagccggttctcgggcggcttctgcatggtaatgatgaagacattcccgtagcgggagagggtgaggttgcggaaggttggaagatcggacatcgcgatgatagtttagataaccgtcagagttcgcgctgctagcattctagaccggaatctttattcttgtcggctgcgttgaggatcgccatgagatgcggggtctccagatgaagttatccgagtgccgacgagttgcctgcggggaagatatgctagacaatcatccatcattgaccattttgccttttgagcgcaaccgtcgcgtagtcgttggcgggatgataaatattttgaacgagaagcaaacctttgttgccagcagctgatggtgtctgtctcgccctccagatatatatgttatcgctcgcggtatgtccatttttcag

SEQ ID NO: 11013 - DNA, 140 bp, Emericella nidulans
  unsure (1)..(140): unsure at all n locations
cgggcccncccnngatcgngttggcgctcgccccttttcntttcgtgccgccggcngcccgcgccgggttgggtttcntttgnnccngcgccggggcgggggcccccgcccacngggnnnggggcngccgcgcgggccgg

SEQ ID NO: 11014 - DNA, 479 bp, Emericella nidulans
  unsure (1)..(479): unsure at all n locations
ggnnaaagaagaccgaaagnngagggagaagaaagaaaaagaagcagggaaacngaaaggaaaggcgaaccaggaaaanaangaccagagaaannccannnccgagagagagccacaaggaagcgggngaccccaacagganagaccaaccnnccaggccagcaacggagaaccaagaaggcacaaacaaccgcaaggaagagccccagcacaaccaaaaagagggggggcaaaaacgggaaaaaccaagggggagaaaaagngaaacaagggacaacaaacggccgngcaagggggggaaggcaaaaaaggaaaaaaagggggaaaaaggaagaagcngaaaaggacccacaaggaaacccagaccaaaaggccgaaacggaagggcaaccaacaaggggagagacngacaagggacccgaaaaacccaaaaaaggccggaccaccggaaggcggaacagaggaagacgcgacaaaaa

SEQ ID NO: 11015 - DNA, 544 bp, Emericella nidulans
tgcaggtcgactctagaggatccccccggcatattgttctgaccggttatatggagtcacccatatctaaaccgataaaaccaattgcatcagttaaatgaacatttggacacattaagtcctaaaccgagattatagctaatcagaatcttatatataacaccatagcctaaaattaaatacctgattattagtgaatgcacctcgaatttgaggaggatcatcgtgatcaagcaaactcgctgcattaccacccggtacgatcctgtaaccagccgggtttcctacccgagattttcggttcgggttcacaatgtggaattcatatgggtcatagaggctcaacttgatctgagcatctttctcagtcttggctatatatttcttgaccttcaagtaactcttccttggcgattttcctgttggaactctctgcttctctagatgaaccttaaccaaagaattattcatcggtccatcaatatccatgtctagatgaaacgttatgaaatgatcatgaacgactccaatcacattctcagag

SEQ ID NO: 11016 - DNA, 1054 bp, Emericella nidulans
  unsure (1)..(1054): unsure at all n locations
gagccctgggttagattatgtgtaaattttgtttgtggtattaggaagctgtctgagtcgaataaattttggggatgcggtcgaagggatcggagctagcccgaattgggacaaagtggtgtgacgtcaggtacaataggccagcaaccgcaaaagaaggcttggacactattcttaaatggacatacaacttgtggtaggtagatgcgtatatttattttacacacttatgctagggcgacttggttgctgtattgagaggtggagacggtttcgcggacaaatcatgccacgcgcagtgtcgttcaccggagaccagccagacgtctgccctggacttctccaagcgcacggctaccgctaataaatgcaacggttccagcggcagcaacggccgggaggatctggaacagggtccaggaagtgtagtacaggaagaagatgccttcaatggcgaggagcgagccaaggaacacggcgtgagggataggagccgacttcaatgctacggggagatggttgatattggcaccgaggtagagccactaaaagacaagtcagccacgccgcggtggttgcacaaggagatgtatagagggtacttaccacgccgccgagaacagggaagatggccaacactatcgcaatgaataaaagcgtaacggcaacgggcgggctctgaggatcgctcttgaagatgtggtggatctcagggagctgtccgtatcgcgagacctcgtatgtcggtacaggctcgttcggattacgggctagagacagctgaaacgcgggcttgttgtatgcagcggagcttccgaacgatccgatcaagattctcgcatcaagcggttcggaggtagagaggaactggacgggaaggtccttccatgtctaggccacgtcagctagttgtttccgactggagctacatnctccgtaccaattcgactcgagatttgccattgcccttgacggagaaagggtaggaaatgtccaatccagtcttcgggtcttgaagcatcaaaaagacctggggagcgctttcgcttacttt

SEQ ID NO: 11017 - DNA, 532 bp, Emericella nidulans
tgtgcaggtcgactctagaggatcccccgaagaaaacactaacgagtacgatcatgattatagccgtggttggactgaacgatgttcttccttcatcatcaaactcgctgctagcgacaacgacctctaacagtagtagcaagaaagaagagtagaagcttactcgtgacatgaccaccatcgatggttgcaaatggtttgacgatttgatggtggaagtaagtacttgggcttcccggtttcatgaggaccaaggcttttaccggtgaaggagctttataaaataaacaaaagcctcgtcgtttatttctttttgtcttgtttttttttggcttcgcgaaagaaaccaaaaaaagtgatggtaagatcataggagatgatattataagaacgtgtgatacattaatttaggggacggtttgctttgcttaatgcctacaaagatggttgacttttcagatcgtacaaaaggcactactattgataaattatattatatcaaccaagcaaatctcttatgaagagatatata

SEQ ID NO: 11018 - DNA, 290 bp, Emericella nidulans
  unsure (1)..(290): unsure at all n locations
cgccccgggcccccgccggggggaacggcgggggcccgccncgcaaaaccagcacaaggacgncaaaacggggcaagccaacagnnaacacccacagggggaacacgaagcagngcgagggggcgcgcncaagaagaccgcanngngcannnngcgcnaaggcnnanccaacgaagccccncncggaanccncgacaaagagaaaaanacaagccaaacaggccgcgagaaaagacgcccccaaggaaaggcccgaaccggggcgcgggggnccaggaacccacgcccac

SEQ ID NO: 11019 - DNA, 1217 bp, Emericella nidulans
tcactgttctgacgcaggtctacttctgatgtgcatatgtcactgttcgcgacgaagtggcttgcatttggagcgctaatccttgtacttcccagacctctgtttttatcttgttgcaggggacagaaagctaaaggtccctgcatgaagctactcgctgtagtcagcctataagtcaactcgttactggatcctgtaggcgcctagcagttagtacagacagaacaactgaactggatgatatatataggccgagctcaactcagcagcgcaaatgggagattattcaagggttaagattgtattgtgaatacaagactaacactgagagatgcaaacaaaagctgaggtaaaggacatcatggacttaaaaatcccatatctatccaacttttaatgaacagcctcgctgtctctgcactgaccggtcctagatttgcgagagttttcgaatgctcgcgcgatttcttcgtttccagcaaaaggcccccacaagacatgcggatgaaattgttatcaaggaaatcgaccagcagaatcgcaggattgtctccctctgcaccctcaacttggcggggatagtccttgacccgctgaatccatttctcgaatggaatgatgttcgaccggggtatatgcagcgcatctgcaagtaccacgttcatctccttccagggctggcggactgggttatcaatgtgatagatggaatacggggttttatcttccggaagcaggaggagatccacgagcgtgctggccacgacatccaccggggtccatgacagcacaccatcaaagtcaggtagggcatttagagtctgagacgatttcactagaaaagaaaaatgctccatggtattccaatatccactggtgcttgagccggcgacttgtccagggcgcactaccatggcccggaatctgtctggatatttatggagggtctcgtcgatcatgcgttcgcagatgtattttgcgtccccatacccggtgggaaggaccgactcgatcgccatgcgctcctcggggacgctggacttaccagtccaaatctgccagtggcccactgtcgcgatggatgagatgaattggaaggagaccttctccataggtcgttgaagggagatcccgtaagcgagatccagcagattccgcatgatctggagctgaggttcgaacctcctaaggggcaatttggcattcatgagccaggc

SEQ ID NO: 11020 - DNA, 294 bp, Emericella nidulans
  unsure (1)..(294): unsure at all n locations
tatacgccggcacaacatttttgcttcggccacgaangnngnannacaacacaacgagagccgncccagaaaaggcaaggcggcnccggagacanacgccacacangaagccaccaanccgagacaggagcaaaggcanggagngagaaaaacagancagaagagaccngcgaaancggcagaccgggcanccaacgccaagcgaggcagcgccganncgcagaggccgcaagaggaaaaacnccncacgccggaccncaagacgaaagnggngaccacgcgccgcagcnggca

SEQ ID NO: 11021 - DNA, 418 bp, Emericella nidulans
ggagaagggagaaaggggggttatattatttaagtaaatggtggaggacggtagaagaaaaagaaaaggaaaaagtaaaatagggaagatattggagttagggagaaagaaagtaaagaggggataaagaatgaaaaagatgaattatgagttaataagaggaggaagaaaaaaataaagggaaaatgaaagagttagagaatgaatagaaggaaagggtaaaggaggagatgatgtaagaagaaagttaaatttgtatgagtgtggtagaaaagaaataaataggaaaataagataatggtgaagagttgaagtgaaaagggtggagaaattagaaaatagaaagaaaggaaggaaaaggatgaaatttaaggaagaaaatatgggtagaagagagaatgtataaagaggaaagatt

SEQ ID NO: 11022 - DNA, 598 bp, Emericella nidulans
gttgcaggtcgactctagaggatcccctcgccatgaaaattcttttggattgctagaaatttgctttctaatttggttgatcgtgcagtgaggatctgcgtttcgctggttgcatctgttgcaaagaaagagtcataaccttcagtgtaaatttctgattgaggcgagatttgcttcttttgaaagctaattttcggggcattccgtggataggttacacgccacgcagttcgtcggaatcttcctggaaattgatttcaaagtcgactggttttgtaacttttgaccagtgtttcgtcttgctgtatctgctggagagaagcgcatgtcactttcggcacatagcttcgattggcacaatattggactatatggagagctgtctgtctgggcaatctgtggatatgtttcctgtctcttggttcgcgggtcgtacaatgtcggacaattgctcacgaagttggtcgtttgcaagtggtgtcagtctgaattgtcttggaaaaacgatcataactctcaaaccataacctcaaatcgtgatccgcttttttctgtggcttcgtgtgactgttgctgattattccagaaaatatcgtaa

SEQ ID NO: 11023 - DNA, 508 bp, Emericella nidulans
  unsure (1)..(508): unsure at all n locations
ccgggccccccctcgaactttacgcaagaaaccagcccaatatttacgcacccaggncgctgccgcacgggggtggtattaaaacatgacccgcggacagcccctaatccacaatagtggaagggactgcagcgtgctaaagacctggcaggcccaccacaacggcctgaccagcgaacgcacaaattcacagcgtccgcaagaggtggaccagcgcaccgatgggagccgcgcataagctaatggtgtcgagtgaaaccgaggctagaaccagtgacaccctcgcactaacccacagaggataccgggcaagagaaacgcaggagaggtaagccaggcatagacgaggacccacccacacggggtagtaacctcgctctagtcaacaaagcaaggcgctggacgtggacacaagggacacttgaaaccaaaagaagcacgattgatacgccaaatggcaactaaccagggtagatgagcccacagactgacggaaccctacccggaa

SEQ ID NO: 11024 - DNA, 461 bp, Emericella nidulans
tctgcaggtcgactctagaggatccccttcctctacttctgtgtctgtcatagccgccacagcggcagactcgacataaaaattcttctcaaaaggagtcaaaccatctaaatctagcttccttggagattcattgccatcgttatcctttttgctagatgtatgactacctgagcttccatatgatgaagtcccaccaaaccctgagtcactaagataaagcaaatttgaaaatgaagcaaactcttcttctccaacacacccatagagaatttgataacgcactattccacgaatttgatcaaaattcagtggattttcttcatattcgttcaaatacatagccaaaaacaacgagactatagttcacatggagtctatacgaaaggcaacacacttaccttcgacggtcacggtacgaggtggaatcgccggtccggctatcgtagcgactcatgatg

SEQ ID NO: 11025 - DNA, 2847 bp, Emericella nidulans
ccagccaacaaggacacggccgctttcatctagaatctgcacgttcccctgggagacggacttggtgttatatggatgataataggcatcgagcaatgtcgcctcccgctttggaatatcgaggtagattgccatcccgtggctcgcgaggtcctgatcagaatatgcatgggccgcgttgtcgaataaagtcagagtattgctctctgcatgccagcgagcatcatgctgccaggagaaactagtcgcctcaccatcggacaggtcctgaaactcgttcgttcgcccgccgagagtccagagaatctcgcctgtatgccgggagatacatatcaccgcgtgcaggtgccttgcagaaatgatatagttcccctcgccatctttgtccacgctgttaatatgaaagaaatcaaatgcagaagcccgcttcttgcctgatccgttcaaagcgttatacgagctgtttacaggaaagtatttagatgcccgccattcaaagatcaagtcgccagtcgcaatatcgatctcttggaagagacaatcgtatatccagcccacctccggcccgccaatcgacgagagatcagccagagtcgggtcgtatatcgtcaccagagccgtctcggcggaggtgatgtggagttcgtgcaggtcgccgccgtagtctccgactgggttaatcacgtagcgaggagtatacgtcgagtcgagctgccaacgttaataacagagccatgtctaaacaatgcgcgccacggtaccatataccacgacccataccctctgccctcaacctggctcccttcccagtaggtcagataatcctcgcctcggtaccgctggactttgaagtcgtgtgttgtgtcccaattgtgcttcatccataccagctcgccttgcgcatcgaggatcataggcccctcgtgcgcgaccgagtcgccgcgtggcgcaaggaacgtataccggtcgtcacatccggtgctattgtccgtctgggagatctgcactagaggcgactcatattcgaagctcacatagccccttgacggcccgaaaccgtacgcgcccaggtcataccagctcaagtctgcacggaactcgaatcgaacaagctgcggcaccacgaacagatggaacaagtagagtaggctcactatcgcactcgttccggcaatccacagcagcggacgcctcgggtcgacgcaacagcgctcggtgtcccaagtcgaaggagacatcgggcatggcgacaccttgtctacagccgaagctgcgaacacctgctgttaaatggccgtttggacgccaagatgccgtgatgcaggcgctgacgcatgccccccaatggcccatctcttccacgcggaagagcactctgccaggggtaccggcatccacgcggcaaacagggttggtagtctaatggacgtgatacttgattctcattcgttcttcacaaaacgttctccagaatagcctccagaggacggggcggatctccatagctccactcccggtggcgcagcccatatcatgcactgcatgtgcaaaatacgcaatcccgcaatttggagacggcagtgctaaatagagaggcgtttagtgctaagagcacaccataatgagcttcaagggcaaatctacaggggatatctggcgggttagggtggaaatgcagtcaaagagtacacagtagtacacagtatgggtggactccgcttatggagcaacgtcttggttctccaccatgttaaaagaattgatatgaacgattggataacgctgagtcaattcgtctggtctataaggacggtccactttgattggaattaaccagagtagatattcaggagacaggggtgtctccgcacattaatagaattaccagtggagttggtgatgggtacgcccatccaatgtaacatagatcaaggctcaatttggaataattttggagagcatgtagtcagtgagacaaggccactggtatgatacgtatagtacataatcggagtatattctccgttgcccttggaggttatgttagtacggtgggccaatttatttaaagcggtcaaattatctgtgaccgcctactgaattggcggtcgaaatgaagctaacgataccgccaagatcgccagatctcgacgaccttgggtggtgagccagcgcctgccagccagcctttacaatgcctactacgcctgagcctcccgagcccccgaaccagaaatctgctcgtcttagccgagatgatcgacttcgaatcttgactcttcgagatgcggggttcacataccaccagattgctacgcagctgcgactgacccatcgacaagttcaatttacgtgccagtcacaacaagcaacgcccaaaaagccacggtgaacagaaacccaaacttttctgaggaggatggtcgatagaattctcgaggtcatcttgtacttttgagggaaccccgccgtttggcctattacagggttattcccagagctggacctttcctgtggggacaacagccctaagcttgagcctcttgccaagcgagggctatacagaaggcagggctttttgaaaggccgcctcaaactggcttctaataactttaaatccccctttgaccaatgggtgtccccccttctagcttgttcatataaaaggaggggcaattgactaaacacatattttcccaaatgcgacattgctctctctgtgcttcccttaaggaattttcctgacccgaaaggaggtgaaaattcaaggcgtttgggcccccccccaaaatgggaaccgtgggaaacaataagggttctcttaggcccatctctttggaaaaaagg

SEQ ID NO: 11026 - DNA, 431 bp, Emericella nidulans
gcggcccccggggcggcccgaaagacaagaaggaaagcaaaaaaacgaaagagaaggagacgaaacaaggaaacagaacaggggggacagaaggaacaacggaccaaaaaaagaaacgagctccaaaggacaagagcgcccccaaaaccacaaacacaacgaccaagagggcaaaagcgaaaaaagaaagagcaaaacaggaaacaagaaagcgaacacatagaccaaccgggaacgaagacccagcaaacagacaaaaggaccgaacaaaaaaaagaaaaacaaaccaaagagcaatggcaaagaacgggggccagaaaaaacaacggaacaaaacaaaaaacgggaccagggaaaaaacgaaacaccaaaacggaaaaaaaaaaccaaggcggaaaggggacagagcagcaggaaaaaaagcaaaaagg

SEQ ID NO: 11027 - DNA, 3099 bp, Emericella nidulans
  unsure (1)..(3099): unsure at all n locations
ttttctcgttggagtcgcacaatgtccacaatgtccgtgactgcaggtcgtggccttgtggcctcgaggctcgaggcctagtagcctatgcagcggttctacggagtaagataatgtcgatgacgatgatggtaaagtctatcacgctatctacgatctgctatatccagcatagttttctactgtctgggggccttgtcttccacctcacctgcggtctctccctcaaggccagcgttgcgttcgtattctggatcttgcgccaaggacgtctcttgggctgcaacgattaagtcagctttctataccagattcagggatagctccagagtaaggtttcttaccactccatagcttggcgtagatgccgtccaaggaaagcagtctgcgatgtgagccaagttccgctacctggccatccttcaagaccaatatctggcggcagtcatatatcgtccgtagcgatgggcgacgaacacgcttgtnncgcccttctccttcaaaatgctattgatattttgcatcaaggcctgctctgtatacgtgtcgagggcggaggtctatggaaagcatgggtgagttatcaagtcatcaaattcagtttgcactaccgcgggaaaggatgacttactgcttcatcgaagaagagcaactgtgggtctttcaggagcaaccgggaaatagccagtcgttgtttttctccaccggagatcatcattccacgttcgccaacagccgtccggtagccctcggggagtctctcgacgagttcatggatatgagcgcggcgcgcggctttgcggacttcctcatcggacgcatctagccttccatagcgaatattgtgttcgatggtgtcgttgaacagtggcgtatcctgggggaccacaccaatcgctttccgcagactttctatcgtgacgtgccgaatatcctgaccatcgaccaggatccgtccttcttgcacgtcataatatcggaagagcaacctgagaatagtcgacttgccacaaccgctagggccaacaatagcgaatttctgtccagcaggaatcgtaaagctagcattctttaggatgggacgctccgggtggtatccaaaggtcacgttctcaaagcggatctgcccaccttgtttgagctccaacggtttcgcatcgggtttctccttgatgttgacattgaccttctgcaagttgaataacgtttccatatcgagcagcgactggcgcagctcgcggtagacggaacccaagaagttcagcggcacggagagttggaagacaagctggttgaccataaccaggtcaccgacagtcagactgcctgtggcaactccatcagcggcaagatacatcatagcagcaagtgcgcttgagaagatcatgttctgcccggaattgagaaaagccaaggacgtcgtgactttgatcgaggcatcttcgtacgctttcagcgctttgtcgtaacgtgcaacctcaaacttttcattgttgaagtacttcaccgcctcgtagttgatcaacgagtctacagcaaccgtggcgccccggttgtctgctgcgttggcttgcttcctgaacttggttcgccatgcggttgtcgctatcgtaaaggcggagtaagccagcattgtcgtggcagtaatcgcagcgaacttgatgccatattgatgcgtctgttgcacgcgttagatgtgctgacatgcattatggcgagggcttagataccaggataccacaaacgagggagatctccaaagcggtgggtacgacgtggaacaccattgatgtcagaagaaagctgatgcctttagttccgcgatcaatagccctcgttaaacctccggtctgccgcgagaggtggaaattgagatctagtcgtaaaagatgttcgaaaacgttccgcgcaactttgcggattgccttttgggcaacactggcgaagacagcattgcgaagctcttggaaaaaagtagctccaattctcgttgcaccatctgcgaagcagggttagccactcgcaagctctgagaccgatcgaccaactcacaggcaatgatcatggatcccgccactgtataagcggttccgccgacggctgcaaagtccacattcatagaatcaacgatgctcttgaaatagaaggggacttcgacatttagaacctaagtccaacaaggtaagtcactgtcggaataataagtccactctgtcaatctcaccttcgcaccaacgagcaacgataaggctgtccctacacgaagcttagttccccagtcaccctgtatgctacccgttagcgaagcgtgtaagacagcgcatgagacttccactcccagagcttcacctttggccagaggtattttgccatctccctcataatagcccaatccgcctttctctgttccttgttcgcgactgtgctttcactaagcaagttcttttgtgcagtcgtcgcattttgggtcttctgctggcttggtgccgcagatttggcggatgatgaggacgaggatgtgtcggcttcggctgtcttcttgtcagacagcgtatttttgtccgtctgtgtcttgaccgagagcttcctgaactgagttcctcctaaggcagccgatacagggttcgatcgcggaaaggcgggccggtgagagacgaatcgcgccggggtgcgccagcaacgcgtttgagcggcttgacgcagcatttgggcggtgagtgtcttcgcagttacgagcacttgctgtttcgtttcaccctgtcctcaggggagcatttttgtagcgattgcgacgtttgttggtctcaaatctccttcgcgttgcggacgccgggattcggaggggaaaagaagagcggagttgttgcggcggttttgagggtctccggattaggtcaccagccacaaaacgcagagtaccttgaagcacttgacttctcctttgttgttaactattgagcaaggtagagttaactaccggagagaactatcccaagagaatgtcgtgatggtctgttgcaattatctcgaagatgatgcaatctaggagacctagtgctccgaacgaatttattggcttttgaatcagtatggaaggta

SEQ ID NO: 11028 - DNA, 1530 bp, Emericella nidulans
tcacgcccaagcgtgcgttcaaatccatggcgttcgagcctaataagtggtatcatatctgtgtggtgcacaaaaaaccaaaaccaccgtctcactctcgtgctttgctcttcgttgacggggagttcatcgagcagcagaagatcgaatatccatgcgtacctttaccgagtgctcagaatcgctcgccgcgagttcaagctttcttcggcactcctcgggatctggccatgaaactcggaaggggagtgtcgtctagccggtggtctttggcgaatgctatcctccttggcgaggcacatagcgacgatatgatagcggttttctacaaccttggccctcggtattacggtaactttcaagattgtttaggttcttttcagacctacaaagcatctgcaacactaaatcttcgtaacgagcacttacatcctggcaaggaagaacaatcggatatcgttattgcgatccgtcggaaagcaagcacgttggttcgcgaaagtggtattctgatcaacgtttctgcccggtctattcttgatgatgacgacagcaacgctatggacggatcccagcttgtcaagtctctttcaaaacaagcaaggaaactgcttaatcaattcacaaaaggcggaggtaacgcaatagctattaatggcgccacgcctgcaatcaatgatgctctaatccaacctcacggtgtcggcatcttgacgggcgatccagttgttacctcgccacactctctcgatgacatgagctggcgcatcggtggctgtgctcagttcatctgagtctcatttattcagcttcctccattgagtctactcttcttgcagttgaagcgttatacgaggcagtgcaggacagttggcgaaatagtgaagtaatggaaaaagaaaatggctatggaatcctcgctacaatacttcgagagaaacttggttatgggtgggcctcgaccaaagtggtcgccgcttgttccaacgatgagcaatggtcctgctcctgcctcttgatcttctacggctgactttgaagtttgttggtttccactttgtacagtcaacccccttagataatcactaatccccttctttatacggtattgcctgtggccctaatgatctggaaatcctgttccccttcttttggagtacttgtcttcttacaattttgcctcttgccaggttaagtaaatccctccgtttacttccaagtctttcctctttttatcttctcaaaatttatatctcaaaatttttcttcccatcttcttccctccttattgccctgctttttctctagtctttaccttccatgctctcttcatccttttctcatgttcatcatactttctcttttcttctccttttccttcactctctcttttctttttaatacttttccccctacattcttcttttctttcttcttccaccttctctttcgaactttattccctctcctcattcttcattcctccatcttcctcctctttatcttttttatttcttacttttcttcatt

SEQ ID NO: 11029 - DNA, 590 bp, Emericella nidulans
ataagctagtctcatcataacagttttttagccgccaacagaattctgacaaacgtggggttttttgaacatgattcattcggagttatcacctactgcaatgctaaacattaaaaaagatgttgaacgcttcttggactacataagacttcaacgattagacagataagccatattttaaaccccaaacatgccaaagtctgagcatccgttagaatcaaaccattctattggggcccatttgagggacagcggggcagaggctaaatcgtgagaagctcggaaacccttgtacaaactggacgcgtttaaaggtaaccatcggtgggcgttaccgacaagagaccttcttgggggttgaacatgctaaataccgcaagtcgactaactctcatgttctcatctaaagtagctctttccagacctacaattaaccatttgggttttccccaatcttctccttatgccacatctttctaggcactggattcataaaggctctgatgagttataataacccttacatttacttggttagggataatttagtatactattatcccttcctctaaattgccatatttacattg

SEQ ID NO: 11030 - DNA, 523 bp, Emericella nidulans
gtcgactctagaggatcccccaaagaaaaaggctcaatttccatcacgcttggatctagatgacaataagaacataccaacttagagtacttttttctttataataaaaactgaaacaatctcgaatcatcatctttgtttttggttatagaattagtgaaatgatgaatcatagagaacaaattgtgatgcgaaaaattgtacaatatacataaaacttgtgaaatgtcactaccaaatgaatcatttgattagaaaaatctcacctagagtgaatcatttttcaaacaagaatggagaacttatctgaaaccggacaagcttggcacgaacaggtcagtggctacattgtgtgaagtccagcgagtgatctaagcttctcgcatagtatgaacgtgatcatcgtttgtggcccgagccgtgcgaaaattgcaaagcctctgtgtcaagtaagacaacataatacatttttatttatctatgtactacgaattatataaatatcacttcatgaacaagacgg

SEQ ID NO: 11031 - DNA, 607 bp, Emericella nidulans
ttgacgcactgaatgatggacaggcttttatttcgacatggccggcgtataggaacggtgggtcgctacttataattacgggggtgtgaacctggcttgttcagcacatgattatatacagatctagcttagttggtcgcagattttgattatggagacagattgtaggaaccggaaccttgttctgatcgagcacaattatatccattctggtaagactttttgaaagataatactagcttccactcatggaaagctctcgaagatcgagggatccttttcggatgaatataagtggtatgcagacacgcccaaagctttttttgacattaaatttatctaacaatcgtaattgcatccagatccgtttccatttaacggaactaccacagacttctatcagcaaaaatcaaatgggcgttgatcttcttccagaacaagcactgacaggtaacaaactttctcgcaaaccatgtaggggttcctgcgctatttaaaaaaaagaaaacagtcttgtcccgtaggtcttatggacaaatggggaagtgtactttacagatatctgtaacaataagagcgcctattacctgctatttaaacaggtgga

SEQ ID NO: 11032 - DNA, 403 bp, Emericella nidulans
ttgactcatcgagtgctgaacaggcggacatggagatcttgcatgggtagtgagagggcggggggccactatgattcacgaggctgccgacggaggctaaaatggacgggacatagctcgatcaggatcgccgctaggagcatgggtgataggggcggaacacacaacggatgctctcctggatgacacacgaataacaccgccgagagaccagttataagactcgaaagcggtatccatggagacgcgtatattgtaatctagacactaagaggagcagaaaaagaatgcagtggcaccaaaggttggattatcatgaaattaacataacaattcttatcgtaggcagacactttgctatagaacattaactaccggacaatccatctcgagatatgttcga

SEQ ID NO: 11033 - DNA, 1729 bp, Emericella nidulans
tctggttgcttcctttgcaaggtgcagcataccgttcggaacttttacgctttgggtctccgctcctgttttcatttatctttcccattgcattctctgttagccatctacccgttttttcgatcgtcttccggtgtccaccgcttcgatccgaccgcgttttcattcgtcattcgctctactatcggcaatcttagactcggacttctcaagtgtattcggattattgaattcgccggttgtgatctttcataccgtttgaatcctgagttttggatttcgtgtggaaggcgccgatgtcgacattgaaacgcttcatatagtggctatatttacgtctcagtcaccgcggtttcccccagctcgtcggatctgtcgactttcaagtttatgtccggcgatagctggtgtgactggacggaaggagatgcaattatctcgatcaactagtcttacggagttcatggtggtctgacgcttgagtgctcgtcagattcgtcaagactctcctgcggattgtttttcgacaaccatctgcccacttccccttgtttgtgcatgtttatggcttccgcatttcttaatttccctccgcattgcaccgacatttgttatttgcattttcagactgtcattgtggcttattgacgtatgactggggacgaaggagacgaaggaacgactggcgaagaggggatgactagttaggggtgtggtggagtgtcgctttctcgcacgaatgctctcggtgatttgagccgagtagcagaatggacggtgagggcgatgtacgcgggagcacatctttggtattgggtgaatggcgaaggaaactggctagggtcgcttccggggtggtattacgtcaatctatgctgtttctcttagtttattaaacatccaactgtttgcgctccttcaatcctattcctatgtggatgagaccggctctgagagagccgtggctgtggcatgcggccatggttctcatcgggcggttatcttgcgtatagcctaatatattcaacattccgtagttatgactataccacattactttgaccctcattgatgtagcataaatctccatatagcgcaggctagccagggtctgagttgtaatgcttgagtaagcgctatgaatgcatcgggcgtcgggcagaggcgaagaagcagaaagaagctcgctttgaaggctggcaagatgataatcctgacaaaacatctgcaatcaatcaatctatggacaatgtcgttaactattgttcgaagacatgcgcatggaaggggcggcgaactgctcttggtcgtcagatcgatattcagctctggccggcggttctagacttggttcttatatatgcggcctctcgccgtcaaacattctctcgtcgcgacacagcacgcatcgcagactttgcactcgagacgccatcaagcctccccctgagacactgcgatgaatcaatatccctactatgggggccatcaccccttccagcagcagaattcctttccgctctacggcctacctacccctacccagaacagccacgggcgatgatttcccagggaccccttgacccactggtctgtcttcttgaccttccatatattatccttagaaggagacttaagcgctaaccttgcataaagaacacccacccccctttgacccaatcttcaccccgccggccgaatttggtggggggcccccccttaatcttcc

SEQ ID NO: 11034 - DNA, 626 bp, Emericella nidulans
gcaggtcgactctagaggatccccgaatggaaccaggacagtccaaggttctcggtgaagagacaaggacttgtttctattgcggaaagactggacatctaaagcgagagtgccctaagttgactgcggagaagcaggccggacaaagggacaatcgcgggggaaatggactgccgcctcccccaaagcggcaagccgtggcaccgcgagtttatgagttgtcggaggaagctaacgatgccggaaacttcagggcgatcactggtacgttctcacaactccctattcattatttcaataactgcatttgcattgcatcatacatatgggaaaggggaggtactcagcattctaagggaatgtgtagggaccttgagaggtggtgacgtagtaacgcacactctatttgattctggggctacacattgttttgttagtccagaattggttgaaacaggtgggttcaggaaagaaccaaacaccgattatggaatggtacgagcggccggcggacaggcaatgtatccgaccggacttgttcggggcatctcggttgtagtgaacggtgtcaatatgcccgcggacctaatcattgtccactaaagaacatgatgttacttagggat

SEQ ID NO: 11035 - DNA, 2572 bp, Emericella nidulans
aaacttggttagaagcttccgactgcgtatgatcaaagttcatcaagccgatcaagctcgagttcgaaatggtctacttcccatatcttcttatcaaggggaaacgatatgcaggtctatactggacgaacccgaagaagtatgacaagatggatacgaagggtattgagactgttcgcagagacaactgcttgctcgtgcaaaacgtgattgaaacggtgctgcacaaaatcttgattgaccgtgacgtcgaagccgctcaagagtatgtactccgcgactctttcctcgttctttactgactcctttagatatgtcaaagacaccatatccgaccttttgcagaacaagatcgacatgtcgaagctggtgatcacgaaagctctgaccaaggattcctataccgccaaacaagctcacgttgagctcgcagaacggatgcgaaagcgtgatgcgggttctgctcctacgctaggcgaccgtgttgcctacgttattgtcaaaggcaccggtgccaagaactacgagaagtcggaagatcctatctatgtcctcgagaacaacatccctattgacacaaggtactatctcgataatcagcttgcaaacccgcttggccgaatttttgagcctatactaggagaaagaaaagttggccaactgcttcatggtgagcacacgaggtccagtcgccatggctgcaccgactatgggaggacttatgaagttcactaagaagacacaaacctgcctcggctgcaagaagccgcttactgggaaggatgtaatggcgggggcagtgtgtgaatcgtgccgccctcgcctaggcgagctatatactaagagtatgaacaagatgtcggacctggaagtgaggtttgggcgactgtggacgcagtgtcagcggtgccaaggcagtcttcactgcgaagttatttgctcgtcgagagattgtcctatcttctacatgcggatgaaggcgaagaaggatgttgaggatgcccaaaaggaactggcaaggtttgattttgatgccggtgcttggtgaccatggacgatttctgtaataatattgggtcggcgttggtcggtttggcgcattgggatataccgtatggatatgactaaaatatagtacttgttcaccctatatatcatacactatcctagttcaattagtcttcactcggtacttggcataactccaatctggctggcccgtgcgtgattgtcgcggtaacgtcggcggggtcttggcgtggagatcgaagccacagcgaacacttcagtgaagaactttaacccaacttcatctcatcctgttcactcactcacaatgtccccaaatccctataatccaccgctgaaccctacagttgatggggttgacgacgaaagagagagtaatgataacactcgcgggactgacttccgtctttcctggcctcaggtgcgtgaatgaagtcattatttagtggcctaacccaacggaactcccattccgagtcacggctttgtcgactacaattggcaacgcactttactaagcagcctccgaatcaagtcgccgtgcgctaatccggtacttcgttaaacaaatagatatgcacgcagcatgactccgtcctgtcgtcgcatttgaacatgctccgatctcttaagggccaggtttcatcagatcccgatgcctaccgactgatctcctctatgatcgacaggacgcaaaaactggttatgcagttcgaaggtgtcaagagacatatcgtaagttcctgtcttgcgctgcgttttagcgttatttctcggactggtacggctgctgacactaggaaaggtaccgcgtgagttcagtgctctgtttacttggcgacggaaagtagaggatggttatctaactactgtacaggcactactagaagctcgggctccggttccggctctagctcaggcccaagaccgtcaagtgattctaggtctagggtagacagagctacagttcgtaaaaggaaaaagcgcatccggatttcgaacgagatcgatccggtaagaaagccgcagctgccagttctagaagtccaaccagcaaagcgcaagcgcgttgatatggctatgcccggcgctgatcaggacgttcgggacgtaatgcccgtgtcgctagagaccgaagacatctcggacgaggtgcaacggcggctcaagattaaggaagagcaacggcggaagcgtgatgcgaagccagagaaacgcaaacgagatcgggacagtcttgcatccaatgtcagcacatcgtcgctagccagctcgaaaccgaggaaaaggtataaactcaacgagcaggttggtacgtgaggaagaggtaagacgaaaatgagccgtcccctggaaaaaatcagcatgcatccacgggagttagggcacgttttcgggcagcgttaacaatttccacgaggattaagctttgtcatggcagcggagtgacattccaaccataccctatcccggtatactcctgacagaactcaaactatgactcttccgccatacactatagccacgtgctatccccgtatct

SEQ ID NO: 11036 - DNA, 507 bp, Emericella nidulans
gggtacttgacgacatgacgatgccagctgtgacggctgctgtaggggatgacctgaacactgacttgtccgttggcaagaatgtatgcattaagcgacatacattatctgatgctacatcgtttaactctgcttcctagcactctactgctcacgcaatctttcttcacctgaccaccactgctaccaatcatctttctgacgcttacaaaggactacattatgcgtgcgctggatgtcctaattgtgggcataatgatcgcataacacgattgagggctataacacacgctgctctatactacatacacactagactgacatagtcatgacatcaagaataccgtcatcgatgatgcgtaaacctagagttgcgagtatacgctatgtctacaacaagcaggatagcataggatgatttttgggttttccttcacccccgattcaactgttccacctatgccccaatgttcttcaaattgacatttcgtacgacctcaaaacaac

SEQ ID NO: 11037 - DNA, 612 bp, Emericella nidulans
  unsure (1)..(612): unsure at all n locations
tgcaggtcgactctagaggatcccctaaagtatttccagcaaattagttgcaccaaagagacctcataatggctctagtatgtacatatccctctttgttgttacactgtttgtatttaatctcctggtgatttgacttgtacaacaaaaaaataaaaatttggttaatgtctagatctcatctcatggttacaaatgtgaagaactcccaatttgcagctacaacaccaagaatccaggaaagctttatacagcctgaagaagcatgctagaagaccaaacaaatggtatggatttgttattattaatgttctcaacttcaaatacagcaggaatgttgaaaaagacagcagagaatagaaagtcatccatcagagagacatgaagctgcagcgtcttgctgttttgcaccgacggagaagaactcagagataacttcaaggggcattccctttgtctctggtaccttgaggtacacaaaaacccacgcgacagancagacgattgcataaatgccaaagactcctgcgatgccaatggatttgagcatgactgggagagtgtaagtgacgattatgtcacagatccagaaagtgagggcacatatggtga

SEQ ID NO: 11038 - DNA, 320 bp, Emericella nidulans
gttgcaggtcgactctagaggatccctctcctgttttagtttcgatggatcagtgtgttaactttgttgagtatacgataataatatgttaagattttggatcatgctttttctcttgggagaacgatgcttatgtttttgttttgaatttgtaatctaatgtagaacgaaactactgaggaggtgaagaagtttagatgttgtgtcattttggaaagacaatgcaacccactttaaagaattgtcatcaatggtatgtgacatacttagtattcctatcacaattgtggcatcagagtcagcgtttcgcatcaaaagtc

SEQ ID NO: 11039 - DNA, 325 bp, Emericella nidulans
ggtctacgctatcggtaaggaacgtcccgaacatctgacgtctgtcggacacactacatgtagaggggccgacaccgtaccggggctccaattagctcgatctagagcgagacaaattacgcgcgctgactgcggttaacagcctgcacactgtctggatattcccgatggctatcctactagcctggctgtacatacatgtgacgcgaggtggcataagattatggaggaccgaatcgagggcatttgctaactgtagagcaacctggatggtgaacggaacttgaaagcccacatttttctattggaccaacatgggattaat

SEQ ID NO: 11040 - DNA, 608 bp, Emericella nidulans
tcggcctaacgtgttctgtttttggagtgtctggcttatctccacctcagaatgccttgatcgaggccaggcttccaggacggccgacaagaggtgactgccaaatctaataatacaagaacctgctgatgctgctgctgagatgtttcccctgcaccccagtcaacgtcccagcattttcctgcgagattcaatccgacatcaagttcaactaattcacgtacgttgaattgcggctcaatggtaggctcagtggttgaggcgcaccggcaatcggttgggtgtctccgaaacctgtcacagcttcttgcctgggcatctaataccagcgggggcctgatattttattctcgagaggatgacgtgctcacgtccactcgtatctcgtacgctgagcttcttgcagatgcaggcgagaaggctcgtttaatcggccagattacaggcctctcgtctgaatcgatcattctgttgcattttgacactcagcgagaggtcatcgagtggttctgggctgcgacacttgctggctatctgccagccatctctactccctttgtagacgatacagcacggcgcaaagcccactggctacacctgcacgcaca

SEQ ID NO: 11041 - DNA, 445 bp, Emericella nidulans
  unsure (1)..(445): unsure at all n locations
gcaggtcgactctagaggatccccgtagtaccgtgatggaacgggtgaaaagaacccccatcggggagtgaaatagaacatgaaaccgtaagctcccaagcagtgggaggagccctggctctgaccgcgtgcctgttgaagaatgagccggcgactcataggcagtggcttggttaagggaacccaccggagccgtagcgaaacgangtcttcatagggcaattgtcactgcttatggacccgaacctgggtgatctatctatgaccaggatgaagcttgggtgaaactaagtggaggtccgaaccgactgatgttgaaaaatcagcggatgagttgtggttaggggtgaaatgccactcgaacccagagctagctggttctcccgaaatgcgttgaggcgcacatgttgactggacatctaggggtaaagcactgtttcggtgc

SEQ ID NO: 11042 - DNA, 1709 bp, Emericella nidulans
tttagaaagcaggacattgactcccatcaagccccaggtcccccatgtactcatacgacggatcttatccgaccagacttgctcctcgtgatagcgagaaaggatgctgttggtgagactggcagcagcctcttccgactcgcgctcggccgctgagagcgcttcctgcgtttcattttcggcaacctcatttgtatgatcgttgcggtatagatgtgtgaatcgttccagatccgccggcgaccaggcgtgtttacgctgtagtagttcgtttacctcacgttgcgatgttgaccgtcggttgattgcggctgcgtaagcttctttcgctgttcggactcgatggcgagcggctcggaggcgtttctctggtaagggtttagcagcggccgggtgaacaacactaatatgggttacgatgaccaaccttgctcctgtatattccttttgagggcttcgatggaagagtaaccagtcaagtcgttcagccgctggcccgccacgaagacatttgactgcagattgtccatccatgtggtgaactgcttagaaaattgcgaccgacgatcctcgatatatgaagggaggcctccattctgtgttgagccgggctcatcctccttcttcccttcctgtccctgtgtgtgtaccgtgtctgcagtctgcgaagtgtcctgggcccccgcattgggctctgcttgagtactctccggtgcacccaaggcaatcacaggttcttctattttcttgtcctgtttctcatctgttgacctcttgatttcatcagagcgaagggatggttggtatcggaaatggcatcgtaaacagactgagaagtttcgccttgctgttttggaatgaactttggaaataggagctggagaaattggcgatcgaccgggaagggatgttctcgataaattcagacccgtccgtagagattgtctaaatagccatggcatcgattgcatcgtgactgtgaggtcacaagaaccgtccggttcgctgttggtgaccgcgacagatgttccaggttgaaaggccgggcggctccgcggggaccacttcggctgaacggtcatcgcaaaccgcccttacattaatcctacgaggtctgttaatctactatgatagtccaggcatcttcaaaatttaaggtcaatgaagttgcatcaaattatagttttaagaatgaaatagattaagactggtcgtatgaacaaaagctcactagcacaatcaaagctcgaaaacaacgataacaatattggtagcaaatcagctcataacacattaatgttcattaactagtagtttgttcaagggtcaccggttcacaaggtatgggtatctaggtgcaaatgcgagtgagaagtatgatcgattctttgggtgatggtctagtcgtggttctgcactttgtgatctcccttaacagcctcggcgtacgtaggagggctggtatcctcatttgcctgactgctgctaccggccgtattgtgttcatgttgggatttaggagcaggcggtctagacggcgactgtgcgtctgaagcatgctgggaaggcatggtcccgtatcctctttggggtcgggtgggagcaggctggtgagagacgtagtaatatgttacgtgcccgttctcgacgtcccccctccggttaggaactggctggtatgacgggtcgtcatagtccggctcgggatt

SEQ ID NO: 11043 - DNA, 594 bp, Emericella nidulans
gatccccttccaatgtagcagataaagtaatatttctgcacggcccgatcaatagttcaagtcacacactcccataatccattatctcttcatagaattcccttcaactttttatgtcaaaaaaataataaaatattgtggagttgaagggaaatatccaaatacatgttttatttttttaataatccatatttatagcaataaaatactatcgttccttcaccaagtaataagtaagtacaaatacctagaatctatattatttatcagggaccagaaataccttgcttacgtatcattaggaaatgcattaacataaagacggccgtaagaagaggtaatacaaaagtgtgtaaactataaaaacgagtcaaagtggattgtccaacactagcacttccgcgtaataattctacaagaggtgatcctattaccggaatagcgtcaggtacacctgttacaattttgaccgcccaataaccaatttgatccaaggtaaagaataacctgttacaccaaaagatgcggtcaatacacccagaaccacaccaggtacccaagttaattcgcgaggttttttaaaccaccggtgag

SEQ ID NO: 11044 - DNA, 3396 bp, Emericella nidulans
attataggagggttgaggtataaaaagaaagacgcagaatgaacaaataagaaggaattaaagatagtaagaggtatgtaagaaggaaaagtagagagatgaagggattaaaggaaataatagaaagaagataaatataaaatagagtgaagaatatactgatgtgaaggagtggaatgatagaaaatcgatgatttacttttatcggcagaagtagaagagtaaagcccaaatatagaataccgagagataagaataatatctaccctctttaaagagaaagggaaggtctctcacagcaccagagttctgtcgtttgggattattaagacaccgggtaccaattcacgagttggggggggtgggtgtacagggcttggaaaataccctggttcaaaaagaggtttttaagaaccggtaaccccccgttagaagatagagagggccctctagccctccaaaaccgggttcggtcagggggaatgcaaagcacctctcaaggctcagtgtcacagcaccccaagtttaattacagtgtgaaaccctcaggcctccacgggcgtgtctttatatagcccacggggcgcttcagcacagtgcggtgacaaccggaaaagagcacatgtctagcaaggtcgctatacaccgccaaaaatcggctgcccctcgctatagtcgccgagttcctctggcgtgtgaaacatgcagggtgttaaaaaccaaatgcagtggtgacacaccgatttgcagacagtgtctggagctcagggtcgaatgtcgatacccggtttcgtggcgtgaacggacgaaagggtaggcctagtctaccctacatattgtgcgtggatagctgatttctggttcgatacagacaaatatctaagctctcggccaagtcggatgactatgaaaagttgctccgggagatcagccaaatcgtggacggccgagcggcggagcgaatcagatacaccctcgacaaagtgcgtgttaacttctacctgagaggcttagtctgccgctgacgtcgcgagcagtactcagaatctggagctgaacagcataatgatcaaccgtccgccaactctgaccctgcctccggcatcgatgaagggattgacccagaggtggaaagcctaccctcctctattgggtcattagacgccattgaccgtgtggatgaggacctcaaccgcagcccgaacgcccaagctacgggatacatgggaaagaattcggaggtcacttggctgcaacgcttgggaagagaagcagataatcgcgctcgcaatttatcagggttggctgagccaaggccggatcgtgagctgtccatccattctgtaaattatcatttagacgacgtggatatcacgcccccagggccagtccacctttattggatgcctccacggaatattgcagataagctgtttgaggactacctggatacagttcatcctgttttcccaatcatcagccggtcgctcttctcagcacagtacaggaatttctttgataactcagcgcgaccaggtgataaatggctggccattctgaacctaatattcgccatatcttccagtcatgctcaccttatgcaggcatcttggcgcggtgttggccgtgatcattttgtctacctggcccgggcccggcgtctcagtatgaacagtgacacccttttcagtcatcctgatcttcagcaagtgcaagtggaagcactaacggctttttacttacttgcaactaatcagattaaccggtaggttttacactctcgtgctccacaaatagtttcagtcatttgacaaagcatcagagcatggagaattgcgtcattggctcttcgatccggcatatctcttggtttgaacttgagaaatactagcgaagtcacgcctgacacgtctaaggaggctcggtatagagtctggtggtgtctttacacgcttgaacacatgttagggacaatgaccggacgcgtgacaggtatctcggacggtgtatgcaccactccgatgccgcttcctgtggacgaggaccggttcaatgatccagccgcggcagagctgctaagtagtttggagcttcgtcaagagcgcgtcgagttagctctcgcgagctgctatgtccgacagatgccacagaacgtacgacgtaatcgagagccgaacgatgcaggcaaaagtgccgacgttgcgaggctgcaaagcttaccccccagtacggctctcttctttctttactacgttgatctcgccgtcatcagccaggagatctttaaccgcatttattctctggattgcattctgacaccttggggagagatcgaggatcgcatgactgagcttcgatcacggattgagtactggctttcgaatcttcctgaagcatacgactggactcgaggcaaccagcagaatctagaattgctacgtggcagtctttgccttgcttttctctattatagtgtgcgcatcacactagggcgcccctgcttgtgccgtcgcgatgttcgatcatccgaatctccgggtgaaagtacagccttcagccacgctatatcggtgtcggttcttgaatctgcacagcgactaattgccttgattcctgacatgcctgatgcgtcgcgcatctatctgctctgtccctggtggtgtatcctacattacctcatgcaagccactaccgttctgcttctcgaaatttcttttggcagcgtgcatttacccgcagaggagaagagcattctcgaggcagctaagaagggaatccgctggctcttcgccatgtccgaattcagtctcgcatcaaggcgcgcctgggagctctgcgacagaaatctccgccagctagccgacgccggcggctcgactatcgatatgagcgatatgccaaccgcagattatcaattcgataccaataataaacagcagaaccattctcagcatccacatgttaactctcgtccgcctgtcaccaccgccgttacccaatttccgactcttgcttcgaccccaagcttccacatctcgcccccaaacaacaaccacaagcaagggcagagtccgtcctctcagcatcaaatgacagcattggctctgcaacagtcccatacagcacctctcacacaatcttcgcgaaatgagggacggctccatttcccttatgacgccaccacgtccgccggattttccaacgacatctactttccctatgaccccatcactggcgagtttatacgatcgttcttcccgaactcgaacgaagaagagtcctgggagcattgaagtaacgatcagtcctgaccaacgtgcatatcctttcctcatatacatcaatattcttctcctattgtctttttatactcttccccttgacttgccttcacca

SEQ ID NO: 11045 - DNA, 657 bp, Emericella nidulans
  unsure (1)..(657): unsure at all n locations
gattaacttaaaatcgccttcctggcactattaataggcttcttgcacttatcgagctatcagcagcttctctaatatggttattcgttgctaagcctcgtcgcatcagccactgtaccgctgctctgagccatgcccctggttccctctagcaccccgcctcctttcttcttcgcctgccccctcctgtctccccacgtttctcccctcatatctcttattcctccgtccccctacctcctctactcctcctccactttccccctcaccttcttcttctcctcctccccactctcaccttccctccctatctaccacctcttcttctccccgcctctcctcctcctcttcaaaccctcactctctgttccctcccttctctctccctctcccactctccttcactcctccctctctcctttcctcctctatctctcctctaccctccttcctccctctcctctctcttacaaagccttccctccgctactgtctcgcctctagtctccacctcacacatctctgtgtctcccttactcaacatcctcttcttctcactctccactcttcctcctcctttctccttcgtccctccctctcttctcctccctcacttctcttactccctctaccatcatatcctcanccatgtctacc

SEQ ID NO: 11046 - DNA, 626 bp, Emericella nidulans
ttggcactcacgtgcagggggtgtagttctcaaataaacaaattcaattactctaataggtccttattaataactacccacccatcacaaaccccattacaaaataatccctcacacatctaacctaatacaaatttaaccaccaacttttcatatcatcaaacaaatcacattataactgcacctttaaaaaataatacactaattatacaaatcaaaacaaatataactttataaaacaaacaaaacacttacatactaatcaaccactccaacaatcaacatatactaaattacttcaattaaataacaataatctttatatattaataataaattcatataccactccaattattacttaaatcatatctaaccaacataaactcaatcactcaaatttaattacaatttacattcatacacctattcactctcacatattatacaacactatataaactactatctaaaacaataactctatacacatcaatactactaaaataataaaactaaccttctatacaacttcttactaactaatattatacctattataaataatacaatattatttattaataaaaatattgatatattctctttactatatctaaaactta

SEQ ID NO: 11047 - DNA, 2529 bp, Emericella nidulans
  unsure (1)..(2529): unsure at all n locations
aatcatgtccacgagaggcgcgactgcaggatctgtgagagctgctctggtgatgcagttgactggacgactttggcgacggcagaaatcatctcattaacttggggcatgttgccgtccacatagcgtttgacgtgtgcggactggagaaaccagagtttctcgaaggcgacagtggtgttgccgcgggtgaatttgagagtgaactagcgagtcagtctataaaactgcagtcgatgggttatggtggccttacacggtgctccagcttcttaaggtcaaagatatcattcttctccttgtgtgaccaccccaacagcgcggcaaaatttagcaaaggttcaggaaatacgccctgatctctgaaatgtgacagatcgatatcagcattgcgcttgctgagcttttgccctgaatggtccaccagcagaggtacgtgggcgaagcgtggcgccttccagccaaaacatttatataacagaacatgcagaggagtcgacgacatccattcctaggcgcgtcaatacccgcccactagcttttttttttttaaacttacagtgccacgaataacgtgggtaatttccatgagatggtcatccacaacattcgccaaatgataggtaggatagccgtcggatttgatcaggataggatcatcgtaaacacggtcgataagatccaacttggtgggcgggcccttgtgtcctgtctcgccatacacaagatcatcgtaaacagggtatctgtacgggtggtcctcaactctcaaccgaatgacgtgcgactcccctagagctgcccgttcttccgaatgtgcaggcaacaggctggcgcatttcctatcataccccggaggaaggcccgcttggcttcgatgtctcgcgtgggcgtccagccgctccggggagcaaaagcatcggtatgcgtggccgcgctgaatcaacttctcggcgtacttgcgatgaatttctgttcgttcagactgaatgtacaatcagtcagtccccacggtaaagataataaagttaataatgaggcgccgagaaaactcacctgtctatacggaccgtaatcccctccaacaatgggacctacagctccatcagcgttggccccgccagggctgatcgcagcattttgtaccttcatcccattgtaatccggcccaatgaagatcatcatacagtctttgttccgcgtcggggatcgtccgtttctaatgtacccaatccatcagcgtccgattctcatggggtatcgctccgcgcacctgatctgtatcttcaatccgaagtatgaacttcccatttgtgcgcttggccagcaaatagttgtataaggcagtgcggagagatcctagatgaaggtatccggtcggcgacggcgcgaatcggtncctggctggcatcgaggggagcttggatttcttgccatgcgatatggcgggcgtggaactgttgtaccagcggcattgcatgcatgtccaggaccggcgggcgagaagcccggagcgtaaactcctcatcttaaatatatgcgcgtgaaattggagcgaagtcctgcggccgatacgtagaaagccgtcggtgatcggtggaggcggcgagaaggagcaaaaaagataaggcggaattttcgggcttagcatccaacaacacttcaatccaactcattcctcaaacagacgtgttcccttctaccctatttttgtatataattactcttcgtcactgttctagtcagatttctctcagacgctttcagtatgatccagcaaccgaccaaactctacgcctgctaacgatctccagtgtcttcagctcaagctgacctctacggtatttagttcacttggcgcgttttatttctcgactaacttaactgcaatagaggtcctacaggtatcccgcgacgcgtcacatgatgaaatccgaaaagcctaccgcaaagtacgggtccgaacgtcgggtcaccacaacagctaaccgaatatagggccgcctagcataccacccggataattccccgaagaagacgagatgcccggtttgtcggttttagaagtcaagaagctaccaatttttgcgccatgacagcgcatttcttggacccatggatggcgccttaaccgctcgtgaggccgaataccgcgcccccaccatgtttctctcccaaatttgaagggggatggggtttccgtaggggttccggcctctaaacccggaagataaaaataaccttgaaattctggggaattaattcggccaaaacttattttgttggaggcggaaataaatcacacaaaaatctttttctggccctcttaaatatcatcttccttcttgattatttttcccaattctacttctacttgtttactatttctcttcttttcttctttatacataaatttatatattttcctgacagcgttttcttatacgcccctcccctcttctcctctctatatcttctcattcctatactcagacataatttttcttctcttttgatattctctttatc

SEQ ID NO: 11048 - DNA, 3176 bp, Emericella nidulans
catcttttctatggctggatacgtcctttggggatagtttgactatacgggccgaattcgaccaggccggtgaggccgcgtcagatacgatcctagctgagatggccccctgcgcgaaggactatgttgataataggtgcggcggaggagatcgactaccggctctggagaccgtttgtgcgaactgggaacggtgcatgaaccgcgatccggccaaggttgggcgggctaaggtgtcggcgcaaaccatggcgatcatcataaacagcttcatcgacccgatcagctggaaagcgatcgtaagttacattacttcaccgcaggccaagctaacatgtgcagttattctttcttgccactatatcgaccgtcacctttgtcagcaactggtccttccgctcgtttagaaaccgctacaatcacgacttcgctcctccaccccccgattaccagcgacagtcatccggccagcatcatcccgtaccgccgcagctcccggaccagcatactcagtttggatatgggacccaccaccaggacgatccaaccgggttcgtaaaacaggacgtcccattactcctcgagaaccatccccaggcgatgaatatcaccgatcgtagccgggaaaggtcgaggaacccccgcaccccaagccctgtcaagcggggaagaaagcttctttaatttcatccataacatcaaagcatcagcgaccggaccgggcgtttaattgttaccttcggtgtatttttgtttgatttttggcgatagagtcgggtttcgggacagggatttatcatatcatgagagcacttcgtctgtacatattgagctgcatcgactgagattatatttttctttccccttccccgtaagacatccggcagtaaggtcggtttgacgggctacactaaacctgtatgatgctacccagcgacgagggtcgagtggattgatcccatcacggactacgatatacggtgaaggcggggcgatatgattattgtggactagacacgtgcccaaccgtgagcaaccctaactttgagacggatattgacccttatggcggcttcaatagctggcggagaagatacagctggacggatgattatcctcagctaaccctgattcaaggacctcatgcggaccactgcagccgtcacggtttagctgatgcttctggaatgaggtcgacaaaattgttgacgacaaaagccatatacagatacggtttgctgaaagaaaagaagacgaacagattaatttcgacatggcgactgtgccttgtgtgatcactgtggttacatggcttagggccaagaagcgctgatcgcccgatcaatatcgcagccctgtccaccgtccaaccacggccctggtcgtcttctgcagcattgtaacccaagccctgcaaactcttggaccgatctcctccgcgaatcgttatcacgcctccaaataatccacccgcagccagaggagagctcctctgttatctcctcgccagcggggaatatgcctgataaagaatgacctccttcctatatcgcgatagtcgaggtagtatggcaggtggcatggtgccttggctctctcaatcacggggagatgctatattgtctctggccgtgtttgaaaatctatataaggccggtgagatcccgtgaaaaacttcagctgtcatcatcgccttcctcgattctcctcaagtccctcattcataatgaagctctcggccctatctctgctcaccgtggcctgtgtggcaacagcgtcaagtcatggcgccgagacaatggagtatctcatgtccctgaagcagcaatctcgagaacgtgcccgttcacagggtctgtttgatatcaaccgctaccccgacgagggagccaagaagtgcaagaacggcaaggcaggagagtactcctgcgagaacgtcgacctcttgtccttcctcagtcaccaggctttgggtagtgtcacccgtgagggtaacgacgtctggggtgagcactcaacgtccctcaccaagggctgagctaaccgacgtaggctggacttctgctgaaggtcgcgagtttggcattgtcggccagactgacggcgtggcctttgttgagattctggaggacggtagcctcgaatatgttggccgcctgggttctcaaacggaaccatccacgtggcgcgatatcaaggttatcggtgaccatgcctacattggctccgaggctgcagggcatgggctgcagattttcgacctcaacaaggtatggtagcttcccaatttataacgagcgtctgctgacagccatagttgacaactgcgtctagctcaaagccgaccgttttctccacaaagaaggacttgaccgcgtggtataggggcttcggaagctctcataatatcgttgcgcacgaggagaccaatatgatctatgctgttggaacagcccgcaacctcagctgcgccggaggcctgtggatggtcgatgtgtctgacccagccaaccctacctcgccgggttgtgtcaacgaagatggttatgtgcatgatggtaggttgagggatctccgcagttgagaacacgagctgacctactcagcccaatgcgtcatttacaagggccccgatgagaaatatatcggtcaggagatctgcttcaactttaacgaggacacactcaccattgccgacgtaaccgacaagaagaacccaattcagatctcgaagaccccctacgtcggcgccagctacactcaccagggctggctcgttgacgaaaacgaccattcctacctcctcctcgacgacgagctcgacgaaatggacggaacgggctccgccgctaacggccacaccaccacctacatcttcgacatcaaggatctctctgcacccagcacactggtacctaccagtcccccgtccggtcaatcgaccacaaccagtatgttgtcgcgggtctctcttaccagtccaactacggcagcggtctgcgtgtcgtcgatgtcagctctgtctttgaggacccacggcatctagcttcaaggaagtcggctctttcgacgtccaccccagaggatgatgcggttggcggtgaggtggagtttgtcggaagctggagtgtttacccgttctttgcgagcgggcatatcttgctcaacagtattga

SEQ ID NO: 11049 - DNA, 684 bp, Emericella nidulans
tgggccctggaattgcagtgcgccacgaatatttcgtccatgaggatggacagagtctgcatgcgcggtactgcctgcgcttgattcagttcactgttggctcggcagggatcccatggacagcctgactgatcgccgagggcgatttttcattcatttcttttctttcctttgtgcttcaaagtcctaacagacccacttgggagtatacttattctagcttaccctcctgggaccccgtgtatataccctaccaacctagagggtcgcttgctttgtggtggcggcttaaactacatatcacatatctgattatattttgaaggacgacggatgatggactaaaaatcaccattagctggcatgaaatgcatcaacttggccagctaggcgtagtaaagagtggtttttattctgccctgcaagcgatggccggggctagaacggccaatccataaccgtatagaggaaggtcggaggccggggatggacttcactcagacactaaaaaaacacagaccaatactatcgagtgacggtttgattctactattagacttttagtggcggccatgcataggagctgagctgagctgatcctgttcaataggcagccatcttgccgagtgcagcaccggatgtgttgaacccatgacgagcaaaaccctactcctgtctaggcta

SEQ ID NO: 11050 - DNA, 557 bp, Emericella nidulans
gatcccctccagatgaccccgatttcgaacctccagagagtgacattgaagccgacgatggaagtgatagtggtgatagcggagtcgaggaggacgaagccaccggagttgagggagacgacgtcgggatagatggagacagagaatctgatggagaggagaatagagaagacgatggtgatatagcgtctgatggagacatcaatctagaagacgatggagacagagatgaaagtcaaaagaagaggacgagagaagagaaaagaaaggaggaagaggctgaagaaggtcaaaagaagaggagaaaacagaagaaggatgagccggaagaagatttggccgagaggtttgagttcgagatagaggaagcagtagctatgtggtatgatgagttaaagattagaaggaacgaaataccagaaagtgataatgaagaagaagatcatgtgatcactagagataggaagattaggttagcttcggatgataggttagctataggcagaacattcttcactggttttgaattcaaagaggttgtcttgcattatgcaatg

SEQ ID NO: 11051 - DNA, 993 bp, Emericella nidulans
gatacagaacccgcattgcacggtttttttgagatcgaaacctgttttatcggttacacctaactcactttcaggtaatatcctcatcactgtggagccatcatacagaactaatgatcatcacagagtagcttccaggctaggaataatcctatgactgaaacggttcgtgaaatgcccctgcgaacttgctgaaatggacacattcttacggagcctggctgcactgctggaacgagcggacagcacgcgagaacgacaccaagaattgctcaactggctccatgcgcactgcgtccattaaggctaacctagagagcacgatcaacgctataaaagcaaccgatccagcgcgacaggtgcactctgtgataaagccccacgaatggtttctcggtcttaatttctgtctacaatggcagtacgtctccatccttgggtctcaatagcggatttcccctgaaagtttgaaaagtatgattgaaccctagaaaatacttatgataaccttaaccgattccggggaaattatcgtccatcatcccacttgtattttcaatatttaatcattgaacacatattaatcctacctgcccaacctgtaataaaaaaagcttttaaggttccgagtcttttcccaaggcaatggtgaactttgagtgtttccaatacttttttgaaaatatattaaatctccgtttttttgtgattagaaaaaatatatttcttccttatcctcccctaagcctaagataataattattttcttcctctaaacaactttttttaatttctatttatctcgctaggtttacttatcgtttatatttttatattatttttttattatattttcatattcatgatataatattctattgtattttattaagtttaattatttattattaataatttatattgtttaattttttttccttattattttgttatcttatatttaattaatttttaatttaactataacgtttt

SEQ ID NO: 11052 - DNA, 2029 bp, Emericella nidulans
ctcaagacgaacggagtttactcgataattacagacatatgaaaagagcatatatctataggggaacatagcaatcacgataagtttctgactgaaatttcgccggtctctggatctatcttcaaccgagcaggctggccccatccaggagagtattgctttcttgtgctggagggtgcccttgccagttccattctttcctcacgccacttccaaaagcccattaaagtggccgccggacccaagataagaaggcccaggaacaagcaagccgacgcgacgagaaggggttgttggacgatatttgtccggcgcatgtcccacagcgtaaaatgggaccatgccagaatcgtcagagaatgacagattaaccgcgcgccgtctacggggagatcaaaattcttcagcgagtggataatggccgaatacccgagagaaccatggactgcactggcgaagaggatcatcagattgtagaactgacatacatggtgcatatcccgattgtcatagagtaatttcaaggtgtccgcctggcatggtcttgcctttaactgttgcccgagatacacagcgatagggagtgtcaaaggtatcaaggggggcgcccagttacccataatctccgggcccctttggagaagcaggatgacaatgagaagagtaaccagggcgcaataaggcagcgcttcagcagctcgtatatcgatagcgcgtgggtctggatagaagaaggaccgatggcgactttggtagatgtagagagcgaaatatagcggcacggtaacctcccagccggccactatggagcaaaccgcccacagaacagcactagttatattaggaaagaggcatgaatttcataactggagggaattacctgcacaagagcgtaccgaaaaaacccggtcgataggattccacagtccacaagccacacacggtcgataaagtgagaagagtgtaaccatgaatgggttgatcctcttcggccctctggtgcttttgccaaactgcacccagggaagccatcccgagcatcagtataatccagagcactgtggaggaggcaggtcgatgttccgggttggcgactacatccttgttcagtggtaccatacctcgctgtggcagttggggcagatatcgcatgctatggcctgtagaaaaatcaacggcgacgccgagagccagcttatcggcggtagccctttttaagagctttaggctcataaactttaacaatgggttctcgagggctgcgaggctctgaacccgatgagcgtcatcgatctgtgatggtgcccttgatttcgtgcattgctggtatgtgaagaacgctgtttgaagcatctcgtccgtcggctgcaagctcttctccagggcgtgcttaatcaaatcaccgagaagagctgctccttcgattgctagatttgctccacggccggtgatggggtacaacctgcactaatgttagcatcgaatgctatgcgcactggagtagagtagaatccatcctcataccttgtgaacagcatccccaatcatcaccacccgtttatagaagcatttatcaagcagatactcctgcagcggtacaagggtacaccgtgtccgccgcttgtacagatcgccgaatgtaagcccgggtacgatgatgtcgttcgcatgcgccgcgacgtctgcatcttcatcttgatcggaataccgagggatcgcgtcattgacagtctttgcagggttcttaaagaatgcaaggaaataagctcttccagagtcagtgggaaggtacgtatatgccctgttgtactggaaagctagatatgcagtgcgagcaaggctgctgtcgccgtcatctaccatcccaaacacgcagcgataggtacaggcgattgctgcacagaggtaatgtaaggtcgccctaataatagtgggggtatccattggagaaaaaacttacatttagccagctgttgtgacccataactcgggtctccagcgtcggcgatttacagatcaggggggtccg

SEQ ID NO: 11053 - DNA, 608 bp, Emericella nidulans
catattatattgatatcaccaagttcatttgatattttggattcttgcagctgacgtcttttcagacataagaccgctggttaggtcagtacttgatgggtacaatgtttgtatatttgcatatggccagacaggatcagggaaaacttatacaatggtatgtattcactgttgtttctgagagtaagatttcataggaataacgctgatgcgcttttaccttcgttccctttctttcagactggtccagatggatcaagtgaagaagactggggagtaaattatcgcgctctcaatgatctttttaaaatctctcagtccagaaagggaaacatatcgtatgaagtcggggtgcaaatggtggagatatataatgaacaagtgctcgatctgctgtctgatgacaattctcaaaagaaatatccctttgttttaaatcctggttttgtctttttgttttctcattgctagtgttattgtagccattcctttttgtttccttgaccttcacacaacactagggatcctttctacaactcaacaaaatggcctggctgtgctgacgcaagcatgtacctgtgacacaacttcagatgtgattcattgat

SEQ ID NO: 11054 - DNA, 509 bp, Emericella nidulans
gtctcagagtgatcccccaacaccctcggctttctcccttcctttcgtatatgccatgccagctgacagggagatcttcgttgttcagcttatattagagtcgttctaccttctatgggtccaagggaaatggggcagttgttccatcttcccatgcctggactaccgatagttccctcttcttcctcttattgtttccctctttcgtacgtacacacgtcgtcaagggattgatgctaaacaaccaaagctgccttggctgctgtgactgcctctccttgcctcctatcctttaagtcgagtacttcgttccttttcagtcgagttatcgctttcgcttcttttgatcctgcagaggcaggacaaactcccggcgagcaaggtcaagatgccgatgctgtcggtctgcaagctcctttagtcaacgaagcgaactggctgaactctatgtcttttggcttcgtcttgctgaaagaaaaagagtgaggaaacaaagcaacaaaagagag

SEQ ID NO: 11055 - DNA, 501 bp, Emericella nidulans
gatccccctcgcatggagaagatccttctgatattggtgatggtaactatgatgatgattttgaagaggaagacatgtatgagtctgatgaagacagggactgggaaactgttgatgacggctttgcaagttcatttgtagaggaagggaagcttgatgctctccgagcagcgtttaatgctttggcagacaaaaatggatccgtatctgctgagccggcaaagtccattgcagcagagaatcaagaggctgagcaggtaaaaaacaagttttctccaggaaaattacgtgttcttccactttatgctatgctatctccagctgcacagcttcgagtgtttgaggaagttgagacagaagacagacttgtggttgtggcgactaatgtagcggacacttctctgactattcctggtataccgtatgtggttgatacaggtcgggttacagtacagccttatgattctcagactggtatggaaagtcatgaggtagattgga

SEQ ID NO: 11056 - DNA, 569 bp, Emericella nidulans
tgtcgagctagactcatagaggatatcttgacgaccaagcgctccctgacaattgctgtagtgcacacacgtttctttgtgaggagtacttttagaatgaaggtatggggtaattactataagactataacatctcggtgaaactataaaatgtggatggtttgactggacttgctaaatactatcaaaagttgtttgaaatctagagagattatttatatggccaatagttgggaatgtaccggagtgtcagccgaggtctggtcatcatcgcagcctgtgaaggagaagacttcaccgccactcgtacctttccacattcctgttttaggccgatggtcttcccattcatagtttccgagcctaaaacgaaggatcaagaaaagaaaaaaaaatgggttacatgtgctatgcataagcagtttcttatttgtgttagttcatagggtatagggtttataccaatataagaactatatggtcccatttgttttttgtttttttaacatttctacaagctatcgaggtctgcatacacacgtacataacaagaagtcaataattattga

SEQ ID NO: 11057 - DNA, 969 bp, Emericella nidulans
ttgacgagtctgatgagcggtttttttagccccttcaggctggcagatccacctggggcttagtatgcgcgcacgggttggcacaactacccgcctgacagtggagtccggttatgccccctaaccgcccaattggtgacacaggtctgacaactagaatgggggaactaggctacttttgtgtgtaagtaaggatgcccactatcccccccatgttagaataggtcagtcagtttgatgacaatacaataacaaacagttcagtaatgctaagctgcattattttgcatgcatgcgggatcttattcctagaaactgagcttgactatatcgttaaatcggagcgtttctccacacaataattggggaattcagtatactccttaatgaacaaaaaagagtccacctcgtaattgttttggcgcgtgcgataaagggtatccatttggcccctggaaactatagggtttctcctagtcttcatagttcaaaaacttgatatttaggctaggcaacgctttggagacattcccataaactgtatcgtgtggtttaagggccggatccttaaaacggtgtcaatatttgggggtattttcctggttatccgttaattgaaaaaggtatcgttaataagttatctgtaatacttaccttatgcttttaaattgatctataatatattatataagttgataatcttgtggcataattttatgatttttaatgttaatatatgttcatttaaattgtttctattacattttctcttgtcttctcttccttttatttttaatttaaatcaattattcattctttctattttatatccttattatatgttttaatgatatgtttctttagttatttagtccattttcttttttatagatctttattttttttttttataattgttattattattctataaattctacttgtatctttattatcatatctttccac

SEQ ID NO: 11058 - DNA, 524 bp, Emericella nidulans
gtcgactctagaggatccccctgagaatgactattgacatgtcctaaattgaaagcacagtcatatttatgagaatctgaggactctaggatacggactccaagttcaaagttcccgtttggaagcgatgtacagtgcaatgcatcatcaatatccttgcaacctgttagcaccaaataaagttaatctgcttgtgcacaactaactgcagactctgggagacatttaaatttggcttgaatcatatatactttataaaatgtaaagctctagatacatacccggatgtaccacactaaagacaagcaaatgtcgtaagtcttgcctaacaggattggatacgtcttcagaggatacagaccaaggtaagggtggcaagcatgccagaacttgagaagagaacggcgagtagtcaacatcattctctatcaacacaacctgcagcattcacaagaaagagtattgatgttatattcaattatctaaatcagttacttctctgaagaaaggaaacaatatacttt

SEQ ID NO: 11059 - DNA, 872 bp, Emericella nidulans
cttttagcgagtgttattaagcagttcgtccagcgatacgatgttggcacaagcgatatgatggagctgttcaccaagcacagcaaggaaggaacaagatcctcacgtgcacagctacagtcgacacttgaactcctctacagccggttcacaaaagtcttcatcatcctcgatggactggacgagctgagatcggagaaggagcaactgccgttgctcatgagcctcgccccgaacggctcgccttacacggtgaatctgatggtgacttcgcgtccagtgccgaatattgtacgccatttccggcattggccatcgctgggaggcagcataatctgcgatggttgtaacgctgagggtctcgctgtgcagtaccactgcgcggattgtgaggattacgacctctgccagagttgctataaagccggtacgcgctgcgggtataagggacatacgtaccacctcgagtttaacgctcgcacgattcctattgccgccgtggaggaggacctgacaacgtacgtgcactggcgaacgagcgcttccgaaactttgcagcaattcttggagatcaaggaagggttgatggacgcaatcctagacacagtcgtgaagaacaatgagggaatgtttctattggccaagttcaacatggacacgcttgagtcgacgctcagtataaagcaactcatggcggctctcaagacgctgccgcaggagctcgatgggacgtacgaagacgccatgctccggatcactgagctgaaagcgtcaacgagggaaacggtcatgcgctttctgagctgggtggttcttcgccgagcagcctcttcaggagaaagcaatgagcatgcgctcgcattcagcgatgg

SEQ ID NO: 11060 - DNA, 496 bp, Emericella nidulans
atgaatattttggtagaatatcctgaaatatcagtctgtacggctggtatttaccttcccccctagacttttcacccagtaactgccagggctgctacaacgaaaatcaatctggccgttcagccctaatctatagagatctttctcttatactcactacaactttgatctttcgctctcggcgttatacatggctttcgacgagttgctcaatgttgccatgggctgcttgcaatactgctctatcggtaatcgtatagcattccgtcgccattcaagcggcggaatgagggggaattcacatgccttgttgaatggaatggcgtctgaaagaatcagctcaggcgcggtagaacctgtaaatgatctgatttccagtgcatctgcgcataatatatagagaaatacaggagcttggagatgttctgtatagttagtccattgactttggatctgtgtgatcatgacatgtcattcctcgttaaaaggcatcgag

SEQ ID NO: 11061 - DNA, 127 bp, Emericella nidulans
  unsure (1)..(127): unsure at all n locations
atattacttaagcctggttttggtatncatcgataccgttaatgctgcatggttccgganaaaatgtaatcggcactttcagtnaggtttatgccntagtgtcactagatgagttnggtatcttagt

SEQ ID NO: 11062 - DNA, 159 bp, Emericella nidulans
  unsure (1)..(159): unsure at all n locations
gtgccgcctattcgttacctcacttccacactgtccacncaccaggatgtccgactcgcgtaacagggttctccaaggcacgcngagtataatactcttagacacntatctaggtatcngctgtaacnacttccnaanggaangagcctgcaatatagg

SEQ ID NO: 11063 - DNA, 4139 bp, Emericella nidulans
aaatacaaagagataagtaatttgaattaaagacagaatataaaaaagaaagtgaataggagacaatagataatagtagaattcgaattaggataaggttgaaaatcgttgaataagatataagaagtataagaataacataaatctataaaaaagatagaatgaatgacgaaaagataaaaataaaattacataaaataagaaaacaagatagttaaatcaaataatgaacagaaagcaataacaaaaggagttaaagaacacatatagaagagacatagaatatagaatgatgataaaaaacacgatttaactaaagaatgtgaaaaaacaacatatgaaaataataataaaaaagtaagttaaaacccacctaaagacgtcaccgctgattgcaagcgagtaattaagagcattacaagcaattccaggtacagacaggtccgcttcgccgcggtcaaacgagggctatttactgtcagctccttttatttcgctaatcaggcgaaacaagcaaaccatcaacgtccgtgggtctaactgtaggtctggattgtcaacacactcccaggataggagctgcaactgttggggacctgctcgaattaatacagataagagcaaaagggcaagagatactaccctctataaatcgcggtataaaacatggttcatcggcgcccaagatcccacattctctggccacacttattgctgttaggatattatcgccagtacacatgatgtttcgaatgtttgcctgtttcagctccgagattgtgtccgcagacttgggcttcagtttattctcaaaaattatgaagccgatgaactcgaggttagactccgcatctgtacgtgtcattttctggattctcatccaacttaaccttcgctcatatcgagccgcgcaagcaataacacgatagccactgtgcgtatactggcttaggatctcctcgaaatccgacggtactgtgcagactggttagtacagtacaagctggtcacggggaaaaccgacagctttctggcgaacatatatctttcacgctttccggtgcgcccttgacaaaaatggtagccccgctgtcgccaaactgtcttacgataacacttgcgcggcgaagctgagaaacaaattcaaagctgcgtagcacaccaagctccacggttccctaggaattcagcaatccgcagtataactaagccggggttcttacattcatagcatccaaagcatcacagtttacgtgtgtgtaattgggtggacgggcaatggatggaactatcgtttcgtgttcgaggtttcgatggtcaggcgtctgatctctaccttcctggaaggaccaccccgtgaactgaaacatctttacatctaaggggtcacccaggagttcgtcatccaccgctctcaaagagtggcatgttgccatgatgcgaattatcacatcatatgtctcggaacatgccatatgagtggatggtgtaataaatttgggtgatgcgtttggaataagttcagatagcctgcacgaatcagtcacttcacacaagccaatatcatatccctagcccaaacctttgatgctgagtcattactcgaattccaaggacatctaaaccatcctcggtgagggttccggttttatcgaagcaaatcacgtcgagcttaccgcccacattgaccctggtgtgtatgttagcacagagtccgtattagctagatgactctgacctttgagggctaatgcagaagatttttttgcctttcaggcgagagagggcaaaattggtgccaatcgtcaacgtagccggaagtgcaggaggcacgacaattgtaattaagtctagagctctgacgataataagtccccatgaaagctgtcggatcttggtttagcaggagtgatgaacctgaggcggcggacttacacctagccttacaaagttgacgaaggacgcaacgaatccgaggacggcaattatgcccatgacggatatatagcggaaggagtcgcgatagaatttaaaccccgacggtttcgggaaaagcattgagcgaatgagagctccttttgttgttaggaaccctgtcctcataacaattgccagcgcaatggcttcgtcatcgtcaaccctttgcgggcgtcgtgccctaataatcttcgtcccattgaagagaaaatgcttggccacgttcggatgaactgaaggggcgctcaagtcgagatggtcgagagcatcatctgtcaagggggtcttcgagaccgggacagattcacctatttggtcagcacctatatcacgcgagaaaagatattcgcacctgtgagcatgctctcattcacaatacagtctccagagagtagaatacagtcacatggaacctggtttagggatggatcagaaaactcgaatacatcaccaggtacaagttcctgcgacggaacagatctccctagaagttgtcagtggctgccaagacagtactgacggtgtactaacaaaacccatttctaagaacacggatgtcacactcgaaatgagacatctgttttagccgccttgtagtctaggcgagttagactggcaacgagtggacgggagtggatacatacagaagtagtctcaataattgtagttcctatgctaaaaacagatatgaagaaaatgcaaccagcataatagtagtaagtatcgagagtccagagcaccaggctagcaagctgaaagatgtagaatgggtggaaggcctacacttgtgagcagcgataaacgaaaccaaaaagtggacgtacttcatcaatcaagagttgaaagagagacttttgttgtatattaatggcatttataccaaaaatctgctcacaggtatcgcgctcgtcggcattcagcccaactctcatcgtttttgcgttggtccatgatggatctttccacccgctaatcaagaggaatttgtcctgcaatgggtgatagaaaaaccgcaggtacctgtaatctagatacctcagatgctcaacagtagggttgcgttcttcatcatacgtgtatctgtaagagtccgcaaagatcgtggaaagtggtcgttcatacgcttggtcacgaacttcgcaaatgctgagctgtccccattgatcctgctacagttagtagttattaaggcaacatgaatattgctcacctcaatcacggcccattgacattgactcagagatgaatattttcccaacaacttaatcttccaccttggaagccatcggaagataaggaaagcgaacgcaaggctcacagtgcatagaaagaaatacaaaacagctccggttgtagctgttctgaaacctgtgatgacgagagtcgagtcttccgaggcgatgtggatttcctgctttattctatccttgctcttccactcgttattactagagccaaacgacaatgaccgccgcggaagtagcggatcttcaatggaactcctgcggtaggcagattgcctcgacctgtaagaaaacttggtagatccattgtcatcaatgtcgggagaaattgtatcgtcaacctggtcttcgagatccatggacctcccgcgcggccattcaatcgcgtcctcctgctcatgatgctgcgagaaagtgatggtggaatttcttctagagcggcggcgggagaatgatgcaacgctggatgggatactttccgaaattggtccatcaaatatctagattttgaaaaggttaattgatggataaatgaaatgtacagtgtaacgtacctcgctgcgagccatccctacatccgtcacaacactataactaaaatgacattagtttcccgggagtatacagatagtgaccttccaacctgcttctcagtgagtcacgtcgctgtggcatgaaaatggcagcttgcacaggcgactgagcatcgctggctgtgtaagagtgttccattgtgcaatttagatatgatagcctttgttgatgtcttcatcaattgtcgtgaagccgtgcttgtattgttaagatagacatcactgcatgaagatccgtgatctatataatataaaagatgacctgtgttccacggtcatatatgtacttatggagtagcccgaccgtatccagtagcaagtacct

SEQ ID NO: 11064 - DNA, 1208 bp, Emericella nidulans
caataaatgcataagctgacaatagtaatgcaagtcatgatggatggaaaaccacaagagaacatggaatggtagatggaagagaacaaaaaaaatcacttttgcagcccgattctcaagctagcattcagcaggtggtcgaactttttagcggctttggtggctctgagagttcaggaggcacagttccagataaacatggccgtaggatgaagagctcggcgcctgtatcgcgcgctaacatcacactgttcgctcctaatgagaattgaataaccttggcaagcattgactgtgtcgcccaacccaaaaacaccataaaaagtgaacattttctgaggaaaccgctgccgatgattcgtgctggggatcataaacgctagactcttaaattcattgtacatttgtgcactgagattggaccaaaaattcgaccatcggtactgaaactttgtatcgtggccaccgtatgaaattgccgtcatgtattttcgtcgacacttaatattgtaagtgtgaagtccacagagtcacagactgggactattgggaatgtgcatgctcgctcaaccagttgactagatgagctcagggacgtggtcgacggaagcttccttactaagagagtgttagcatcatacgaacacgtcggtatcatactaggaaagccttacattcgagacttcatttccagcgtcgagaccgttagacggcgaaaactctggggcagcggatgacaatgctgtcttcgaggggattgtgccattgggcaacgatgacttggggacaaagccatttgtagcaccgtcaagttgactctgcgaaacagtagtatcggtttgaccagcagagagaataggaccggcattctgagctgaagggtcgcgctgctctatagggagaacccactgttcccacctctcccttggtcgtagcctgtctatgccatcctcaccagcgtgatattcagcggccttcaattgccgcgagcgatgacgaagtaactcaaagtcttcagacagttgcttgactcgcttgaagttggcgatgacattcaacgcaacgaacccctgagagtccatatgcttgcggagatagatatccttgcacagattgtcaaccgagaagtagtagtcgagctgcaaagtgatcatgccgatcacagaaaatgattccatgtacggttggaaaggcatcgcgacaatggg

SEQ ID NO: 11065 - DNA, 1777 bp, Emericella nidulans
cagatcgacaacagcttaacatcaacaagggcctgcgcatctcgcgtcagctcttcgtcgacttgaccaacaagggaatgccaattgccagtgagatgctggacactatctccccgcagtttctggcggactgtctctccgtcggtgcggtcggcgcacggacaaccgaatcgcaggtccatcgtgaattggcctctgggctctcgttccccgttggcttcaagaacggtacagatggctcgttagacgtcgcggttgatgcgattggatccgtaaaacaccctcatcacttcctgtccgtcaccaagcctggtgttgtcgccattgtcggtaccgttggcaatcctgattgctttgttatcctccgcggcggcaagaaagggccgaactacgatgctgctagcatcaccgaagcaaaggagaagctcatagctaagggtctggcaccccgtctgatggtcgactgcagccacggcaactcacaaaaggatcacaagaaccagcctaaggtggcagctgttcttgcggagcagattgctgcaggcgaaaccgcaatcatgggcgtcatgatagagagtaatatcaacgagggtagatacctccccaacctaatcctaaacctttttccgctaacattgaactctcaaaggcaaccaaaaggtcccacccgagggcaaggccggcctcaaatacggcgtcagtatcaccgacgcctgtatcaattgggaagacaccgagtcaacgctagagacccttgcaaaggctgttgcgactcggagagaaaagctcgcccccagttcatagtcgcatcacgcccacctcatctcaattaccgctctctcttcactagattaagaacatcggctttggcttgtattccgggttatttaaaataagttcgatttagcgcgtttgattgtatattctgataaacaaaagttcggctcggacggcggtcccagagacattggcaatactctgattcttggtccttgaccctatcatactagttaggcagctttaagtttcaatcatgggttgatacatatatcttatctacgttgttcgagaatcttcactatggccgcaaatccgagcagatacccgcttttaacgttgaggggcgactagtctagaccatgctcaggttagggattcactatgcgcggacctcctctctaagctaattgtgatggactggatcaggtacaaatcaatgcaccagcgggccgttgggaaggttcccggctcttaggtttctcgaacggtctatggatcagattaagtcatacgatggttaattaacagcgtctaatatagtttagaatgggatcagacttgtaaattaacctagttcaaaagaaaaaaaaaacctagctacctgagctgaaatggagcattccatagtgtgtgtgggtttgtttattggtaagtaggaattaatcaattgacagaaagtgctacatgttagagcaggtaatagaggtgtgaatatgaagctcataaatccggaaatcgtcactataatgacaagtaagaacagaaagttaacgttagcttgtacaaacatgagcgccgtgctatgtctgtcattggcaagagattgtgcgattatatatgtaaacattagtagacaacttcgggctgtgcatgtctgcctcctagctcgggtatgctgacattcacaatttgcgcgtcgaacacattagccgctgttgcatcgcgcccgccgtccgacatggaactgctatatcgacaaagcatgtggcgtccagaa

SEQ ID NO: 11066 - DNA, 1285 bp, Emericella nidulans
tagcctaccccaggccgggggtgggctcagctagtaatatcttaacctcaacacagggattgtgtatcacacatgacttagcctccaatgagaactgcgttaagccaataagtagtccctccctcacctagttgatcggtggctcccatctgatcataaattaaccatcctgaatgatgccaagaagccaccgtatcaattttaccgtgcccgggctcaggtaacattcgaacgtcctccttctattcttaagtacattgggctttaagcaccagggctcttattatcgccgattattcggggtgcactgtctcttttacatcttctttctcgtctttcgtggtttcgtggcttgtatttgtatttaccccggcctataaggtggacggatgtcagtcgcctgagcattaaacatcatgttgcaagatgtcgtcagtgaggggttcaatacgccatcctctcggactggatgtatatctgatatgaagagtgaaactgtatgaagacaaactcagttcaacctgtgtgtgattcttggactctatggtgcaatcgactgggtttggagatgcggatagcatataaacctctatcttccctcgaagcactaggacaacatatccacagccataaagccttttggagaaaaaaaaaaaagtacgagcacaagagcctgatcatggctccttctatcgaagtcgcctcgccaacccctgcgtctgccccggttgaggcgaaaggcgagtctcagaaagccactgcatcgggctacatccgtgaaccactaaagtacagcggctcactcgacgagtataaaagtttcgacgtcacgcccattatcggacgcgaattttctgatctgcagctgactgatatcctccacgatgaccaaaagctccgcgacctggccatcaccggtaggctgcgctgttgcctccagatctatagagcgcacagaacttacaaagcctgtcgcagtttctcgccgcggcgtcgtcttcttccgcaaccagagtatcaactctgacgagcaaaaggttctgggccagaaacttggtgagttgacggggaagcctgccacgtccaaggtcagtttttcctagggtcgacccgcagaagccctaaactgatattgacatgatagctccaccgacacgctgtcaacaacgctggcagaaagctgacagtgaacgagcacggcaaactcgacgacgaagtctccgtcatctcctctgagacaaaccgcaaatactacggcgaccgcttcgccaacaatacccgccat

SEQ ID NO: 11067 - DNA, 1074 bp, Emericella nidulans
ttgaagacccttctcagccgactttttattccagtcaagcgggatgatccagctgggggtgatcatccacgatacatgtctaataaatacccttcttatagagaatacgtacattatatcattacctcattatttattcaacacactcttagagaccagatacttgggcacaatcaaattaaggactgaattaagcgagcaaccattgcctactattcaactgatagacacgcaagcctgatcacttattccttatacatccgagatgaaatcaaacttatcgtatacgtatctggatagtaagatactttcacgtacatctacgttttcatacatagctttaatcaaatcattttaccctctcaataattggaaaacacgtgtatacctctttcaatattcaatatgacttcaacaatttttatttttaatacctcgttattaacaaataatccaatgtgcccatataaatcctattagctttcttatttagattattcatataaccaatattcattatccctaaaacaatttctataaagtttttttaatctaattactttaaatataatttcttgaatttccaaaacttatctcaacttggtgtttcaatcacatttctttttctataaagtccaaaattctctcaagttaaatactttttctgttttggtcgtaatcttcttcttattattatatctctttataatgaatatagcttcgttgctttctcttaatataacttattatcgtctttaaatattaatctttatttaatacttttcacctaattactaattcctctcttaattctacattatttttaatattctctttaactaaaatctataactttgtcttctcttatgttattatcatatcattcccttatattatatttcttattaatattaacatactatacctttcatattcattcaaaatgattttcatatctatatttaacaactctataatatattctattctttactttatcataaaattaatcatatattatagtcatataatactagtaatctttaatattaacattaattcattacttccata

SEQ ID NO: 11068 - DNA, 112 bp, Emericella nidulans
tgagtcgtgtgcgcctatctgtgtagcccgggcctcttagacatgcttcacgtggggctcctagctcacatccgtattactatgccctcgttcggccgtaggctttgttgtt

SEQ ID NO: 11069 - DNA, 275 bp, Emericella nidulans
  unsure (1)..(275): unsure at all n locations
gtccctggatcatggagcaatgagcattaggntagcgngcgcgttngntcaccatatatgtcaccagtgccgatccgaggtcctgacatctatatgctgttcggccttggtgggtatacctctacctctatccgatgagtctggctgcctagctagaagccgctaatgttgcagttgatcgaccacggtttaggcctatgcgtgctgggcgtttccaaccgaggcatttgggaagctcgctccatctgaccgtctcctgctgtccatccagtgtc

SEQ ID NO: 11070 - DNA, 2919 bp, Emericella nidulans
caccaacctcagtgcccggctcgggagctcaacgtagacgacatcacctagggacttggcggcgtattctgtgattccgattttggctgttatgggcgtcaaaggtcagtattaagatttcaatttgtttgtgatgttaaaatattgcagggttgatggtgttcggtcggagctcaccagtcttgccgtcatcagcgagctcaatccattcgtgagactctgtgtacttcttcacttgcactacataccagagagagacgattagtacaatatcattataaaatcacagcgactaaggccaatgcctccgtagggacaatttgtgggcgattcttacagaatgtgctctgagaaaagctgcggactgttccccgcgggaaaccaattgcgggcgagactctgcggacggagctcaaaggaagcttctgtgcaagggcgcgggaggcaaaggggcggataaatcgagcggcggcagacattatagagatttatgatcaagatatgctgagaacgaagaaattgagcagagaggagaggtctgagagaggtggaagaaggaaacggtcgagatgatgtcgacggagagtagataaagcgccaagaccaactgataagcgcgtcatgctgcagttgcttcggagtcgagtcgggaaaatcttcacctccggctctagcttttctgtctttactccttccccgacccgacaccaaccccactttgttacggctctgcttgtcgttctagcctgtcgcgatgctgtacgagttgattgctattgtatgtttcatttctttggtcgattgggttggtcagaagttgctggtactgactgacttcccctaggtccgcccgggcagtcttaacgaggttcgagagtacgtacactgaagccgccactatccttcttgctacatcactacactattatatctgcatcactttatagcacctagaattactaacgcctccctcagcatcgcccgcaacgccggtaccctcgtcctccgctccggcggtgttattcgcggctacaccaactggggcgtctttcgcctccccaagaccacaacgaaacaccaagcccgctatacagacggccatcactttatcatgcgatttgatgctgccgcgcctgtacaaatgggtatccgccgccagctagcgctcgatccgcggatgatccgcttctcggttgtgaagcttggcgataagctggacgaggtcaaagatgttaccgggaaggttgagtggaacgacacgagaaatctgtcgagcacgatctaagtcaaatgacggagttttgttaaagagtgtgatgtacgaagctctcatatgctattgactggattcggtttcggatgtgtgggtttattgttatgttgggactggatggaagatatcactctgtacattatcatgggcatcatcggcgcatatgctttttgcttgttttcagatctttttttcttttgggatatggctccctaagtgtgcttgacgccacgtgatcagtggtttcgcaggccaaggcgagacaactaagaatgacttttcaaattctctcccgacatacaagcatttaactagggacttgccttctaataaaaataaaaatagccagtaataacaaggagcggtattgatgaatgactgcaagtcgcgctttggccaatatcgagcggagacaccgaaagggcgtatcgactatagacgattttctgaaaagaaacgtattagagtacggatacgacgattgcgtctgggatcagatgcgcaatgatgcaaaattcgacaattctttaattcaattcatttaatggccgcgcttcatacctgggaaccgacgatggtgctacgagacactaaatacatagatttttcaattcgattctgtcacttcagatacattagtgcatatatcaaggcaaaaattaatcaaggccagatgatcaatcaagtccagaagatgacgacaatacaaagcaggagtactaggaggaagcggacaggaaaagcaagccctacttctccaagtccgcatcctggcgcttcttcctcccagaaccccgtcccagaaaacttgacggctccaagtgatttaaataatcttcttcccgatccagccgccaatgtgtataccagaaaagatggcccccaaagaacgctaataccgcaatgaagccgtagttccacttcaacaacggatccgcactcaaactcgtcagtccctgctggatcgcggcacttaccgcgttcgtgaagaggtacaagctttgtacaatactcttcatgttgcgcggcgcctttgtgtacgcgtactcgtagccggatatcgaggtgaatatttccgatagcgcgatgagcacgtacgggatcgtctgccaccagacgcttatgggggctggctcgtcgcaagaggaagccctgttatggcacgggctgcggacataaatataatgctgagttactgtggctgtgatcatggaaaaagaggcgaccatgtaccctgcgtagatgcgcttcaagggtgtgaagttaaaaccgagcttgcgaatgaacggatagacaaattggtccatgactgggatgaaaattatgagtgcgagaggatcgaggttattgattatatcgttgggcacaccgttgagttccattgtggcggcttgtgatattaggttgctggtcatttggccgtaggcaagccctatgttgcacagaagagtcagcagcctgtttttccattgagaacctatgatggacggacagtaaatggggtaccaggcaaagacgccgcatgctttgacggccctacgaacttcatcgacccattgctcgtcaaaggtcatccaggatggtctgtggaaaagattacagggtttgacgtttcgccagaagtcatcacttttgcggtttttcgg

SEQ ID NO: 11071 - DNA, 979 bp, Emericella nidulans
tttaagaatgtgagcggcattgtttttatttatcttacggacgagcgtcccgacaggggttatcctgatacgagcccgtgtgatacctaccttacaagcaatggatatactcattaccttcgaaaggccaaggagtacacagtttttataaaccaaccattatccaaaggcctgattctgggaggggataagcaaggagactatttttaatctaaggaaactcgctttgtggctgtaggactaacaacagtatgacatcagaagtataaatggatatatgtaacggcgaagagttgtcgatcgcattagaattggccttgaaattgttctataacagtacgttgtatgagtcacttatgtgaatcatgtgaaatcgttcattactgaaaatgaggtttcctacttggactctgtgaatattctaaatctggactccattagtccacatttaattatggtgatatgtatattatttattacttatattattgtatttatagtaatgttcatctttcaaatatatcccattaatctgtgttcttgtattttatgtcgaatacatctaatcttactaatttgtgactcaatttattttatattgtttaacttttatttaacttaagaatacgtattaatctcttaatcctataaatttttaattacttttcctatttaattatttatgaatatttatataattataaataataaatttattatattttttctaatcaattatcatgtcttatcataattttactgtatctccaattattttaatctaaatattagtttatatatatatcttcttgtgtatattttttacattatttatatgtcttatattgaccttttgtttattatttatctattttttcttataatattttatattattattatataatttgtttttattatatttttttatatttatatttattatataatatattattatatctatctcatctcatat

SEQ ID NO: 11072 - DNA, 163 bp, Emericella nidulans
gtggaaccttacccccttatagcgcactaccctacgcgacctttcttcacccatctcgccccccccttcgccacttgcccgcctgatcccgacaaatggatcccctacggattagttaatgagcttgcttcactaccctcccttggcatacatcatctccctc

SEQ ID NO: 11073 - DNA, 137 bp, Emericella nidulans
  unsure (1)..(137): unsure at all n locations
cggaattttctcgtctgcacacgttcatgcgatggcggcgggctctgcacccaggcactcgtcgctccgtactcctcctcacagcacccgacttatccctaccttcagcttgggcgacgatcgcntctgttgcgcgt

SEQ ID NO: 11074 - DNA, 570 bp, Emericella nidulans
tcgtgcattattataggtaccgtagtaaacgtagctacaggctttgaaaggctcggcaaggctttaaatcacgcccctcttttcacccttggattggtggttgttaggtttttttggattttttttcttgggtttttgtgtggggtggggggggggggcttttattttttttttttttttttttctatatttttaaggctattttattgtgttgttttcttctttttgtgttcctgatctcttctttccatgggggtgggggagcttttttcctttcttatttttttgtcttacttgacattcgtcgtttcttgttacttggggattgagtttttttattgatttttaagaggttgcttttcctcttgtttttaagtggggtctttttacttgattgttattttttcctctttacgttggtttgtgttggtgttttttttttattgttttgtgtatagtggtgttaatattaatttgttttcttcttattcattgggttgtttcttttttgtatattaatagtgatttctttggtatctgtctatggtcctctttttcggtgtggcttca

SEQ ID NO: 11075 - DNA, 907 bp, Emericella nidulans
tacaaaaggccaatatttacgctagccagcttgcgactcggtcttatttggtcgagaagtactggagtctgcacgaagcctggaaaatgtatcaaaatcagagccgccagcccactcccgtcaattctccattagggggtaatggtattgatcccaccgatcacatcagcaatatcatggttgaagagcgccaacttgtgattcgggacctgtttgtccttctacaatctgtcaatgaaatcaatatggagcctaacggcgcaagcgttgtaagtggaaatggcgacgtgagtatataggtcaatactaactactgcttagacctctaagatccgccagatcgcatcgaccttattggacttatcaaagtcgtcaacaactgctccagttacagcagggccccaaccgctcaccaaagccgaagcggaggcatatctgtccgcattcattgacaccctagtccgcttggaaggcctgggtccaagttcgaaggggccatctagtccccagacgcaagggcgggctatgagttatcttagtgaccacgatcgtgatgaagaggaattgcgacaatgggctagtttgaaggcatatcaggccaaatttgccgaagcgggcggtctcctatctgaaatatgactctcgatactcgctaattcgaacagtgagagtttacaatgggaacaacaagatgcctgcagttattgacttagaagcaatcgaaactgcaaatcaaaattgcagggtttttcgtggattgagggccaacagtttccgtgacacatcccgccatgtctagtgagagttgtcatcgctcaccgtgggtttccacaaggcccgatgggcttttgccaaagtctgacgcgaaccgcatcccgggctaacccggtacgaagctccacgaggg

SEQ ID NO: 11076 - DNA, 1424 bp, Emericella nidulans
gaggacgcccggaatgtggattgaggacatggttttgccgatttgagtagtggtaaatatcacaccagtaaaagcatgtgggaaggtgagaaatggattaaggacggcatagtggtggtcatataaccatcccgctcggtggtttgatttccgaaaggccggtacactctgtcagactccggcggagtccggagttgaagtccgaacttgcctctttgggcgacgctgacgctattagagtatttttgaatgacaaggctattgtttcgagatgccgtatataacataccgctccaaagcataggtactgccgcgtctcagtttcaagaatctgaaagcagcatgtacctgcctcaaaataacaaaaaaaacttcaataaagcaaatagaatgatagactgttcgtaaacgaaatagactgatagaacctttgactttggaaacagtgtaggacttgagaatgcaaaggaagccaaagtaggctggatgctgcttttgcatcagtccagccacgcttctaccgcgggcctcaatgcctcctgtagccacgcctctttattgtaccgcaagtctccatcgaacccatgctcaccgtcgtgggtaatgagatgaatcttgtcgttccctggctggccggccgttaccttagctagtcgagtgataaagggctctgaatggtgcggcggcactacagtatcgttgagcccttgaatgatggtaatacctcctctggggatctgaactccctttttcagttgctgaacggggtatagtgtttcagagtgatgggagtctcgcgcgtaccaatcccccaggtacccgtattcgatcgcggccagcatcagagggaggtaatcaccggatgttgaagtgataggcccgtctggagcggtgtctagaatcgcgctgatgatcgattcgtcgaaatgctgcccaaagggaggggtcgtacgaggctcagtaaaatccgtggagttcatgtctacagttgggtacatgccaatggcagcgcgcacgggaaatccgacaaaatctgaattcgcaagctggagggcagaattgatgctcagcagtccaccagctgactctcccgtcacgaggatgtgtgcaaggtcgatttcggtgggtgtggtgtacgtcgctagaatctcttccacaactggagactgtagccatgcccagaagtcttttatgtcgtcatagatgtccaagccagttgcttgaggcatcaagcggtaattggcgctgacaataacagcctcgtgctcaagggcaagatcggacagccagtatggaaaccagtccatgtatagagagtcacccattacctagtcctggtcagcatttgggattggattgaggataaagccaggaatcgagcaccagtccaccaccgtgaaagcgggcaactataggtcttttcc

SEQ ID NO: 11077 - DNA, 150 bp, Emericella nidulans
gggttgtccaggcgcacatattatcatcagccaactctcttcttgctgggtactgacgccttactttgcgacgccacgggggttacccttagcctcatccccacctagtttcagaacgcagttgcgcccagtagtgtcttagtggattcc

SEQ ID NO: 11078 - DNA, 380 bp, Emericella nidulans
ctgggcctggctgatgcccttaacttaatcctaaatacggtctgcgactgatccttgtacaccttgctaatcgcggactggatatgaaccagagctagcgatacccgagtgcaggctgtggttgatcttggcgtctgagtaagctcaacaagacacagggaggagcataacgatcatccatgatgtgatgcgacgcgaagcttgcggtactagataatacacgacagtcagactgaaactgggctgtctactattcctggcatttacatatcaccatggaaaagaggtgacactgcggctgtcaatgcggaacagcctgactattggtcagactagcacgagcactcgctgatagattacgcctgcgctgcctgtctgga

SEQ ID NO: 11079 - DNA, 2109 bp, Emericella nidulans
tccatgggaggagcgaatctggctttgagctggattgtattttcggattggctgaagatgttttgttcacctgctgatgagggcgagccggcggaggacggctcggtcttggtttggcggccagcggcggctcctcatcttctatgatggtaaagcagcagaatgtatgtctggtttgtttcttctttggcggaacattgttaggcttctctgaattatcatttatatcgagaacgcccaagcggtccattaatgtgtcgatactggagcgtcgctgtttttgaggatccgaattccatgttgaccgtcgtagaattgattcagcttgatccttatgctgccagcagtaaaaagcagttatgtttgtgtttctacctgctttggccttcactcctgctgtcttcgccggcgatgagttgggctgcgacgccagtgatcgacgacatggaaggccactagcagtaattcctcggcatgtggttgctgggtttttagaatccgagcgggatacaatggattcaggtgtgtttttgaaatgcggcattgagctagttatagcgtgtgcggtgttgaaaatgttgggcaggcctgtataaatacgatggaaagcctatagcaagcctcatctgcagattgttattcgcaccgccacatattggtgaaacgcgcacataccgaatgcagttttgtagggcctccgcagatgtttggaataattttcatgtttcactcttaattgggcagcatttgtagttgatcagttgatgcctggatagcaccgcctcagtggctggtgttcgcccatcgacccaccaaaagctattaatatctcacagttggctcgagtaattcaaggaaagaaggatattggtaaggttgcgagacgtgattttttcttcaagaccggtatagtaagcaaattgccatattggcctcgcaaagcttggcagggacagaatccgaagctacagtcatggccaaatgaatcttcatattcgtcgttgacttcgtcgagttattgatatctatcctgtataatcaagccagtcccgcggcatttgacccagaagtcacgcactaactggagagtttgctgtctggaacctcgtgcggcaaacaaagacgctaggaagcgctgcctctcttctggggaagggatccgggcgtggggatggccaagatgttcagtttctaagtccgccagtgcggcagtgagatgcgggcgcgcatgcccctgctgcttgaaaacaatccgtctgagcacatccgtgagatgctcgatatccgatcgggcgcaccgacccgccagttgcgtaaccaatacacgacaaagtgcaggcaaacaattatgaattgtgtgctgcacggcctcggcctcgttagggagattgaaaacgctcacccagaactgggatgctgagcgcagagggataggctctggcccttgcagcgaaaggagagtgaagtttgagattgcttgaatgaccggcggtcgttgcccagctccctggggtgtatatgtaaggctgaacaggtaaggatagtatttagggagcagtcgagtgagaaagtcaaggccgctgttcgcgagttcggggtcataaagctccggcttctcttgcacccaacagaaagtgccgtacacatgaagaattagtgcgacagcctcctcacctaccttctctgggtgtgcgctgtgggaagctagaaaagcagaagctgtacccatcaccaaatcagccccgggggttcccagcggtatgcttttaacgaagtcaacggtcaacgagggagggaagacaaaagggcccgtgctttcagtatagccagccttcaaaacatcacacgcagcttcgataatagctgcatcgaaggggaagtccgtcatgagaaggcgcatacattgcattatcaggttttgtgatacagcgccgtttcccgagttccagaatgtgggcggatacggaccttcgtctttgttctggttgagatccaccacttcatctgttcttaaaccttttcctatgctcgcaagacaacgaagaaccatgtggccgcgcatgcgcgcgggttctatagatccttgagcttgttcagtcctagctatct

SEQ ID NO: 11080 - DNA, 726 bp, Emericella nidulans
agaacacaccagggaatctatctcaagcactctatgctgcgaaacaacaagacgatttaaattaaatgtagtgttgccgtgtcagcagcagtgtttatgtttttctttttttttttttcccttatgcaggacacggctcgggtcaaccgatggaatggtcaggcaagcctgaccggaaaacggcgactgagaagcttactgcttctcatgctgctcctgcttctcattgctgctgttgtcgctgctgagaccaagctcagcaacctggtgatgagaatcggagttggtgtcgagaccgagctcacgggcctgctggttgatctcggcgagagagagcttgggcatgtcgttggcgacgcggaaaggcatgcgcttctcgacgtgggccttggcgtagatgatgtcaatttcctccagctcacggccagcggtctcgacaaagaagaagtacgcgacgggaacaccgatgaagttgatgagagcgaagaagagatacacaccccagggagaagtggcagcgaagagaggagtgaacataacgaccgcaaagttggtgatccagttggtgcaagtggaggcggaggcaccggcggtacgggtacggagagggttgatctcgggagggtagatccaggggagcggcaggagggtgaaggcgaagaagacgatgaagaggaagataccgacgatggcacccttggagttctcctcgttatccttgatcaa

SEQ ID NO: 11081 - DNA, 121 bp, Emericella nidulans
  unsure (1)..(121): unsure at all n locations
ggcattatcttttgatatctagaccgagtttcaactcntagtgtgcagctgatcgcgctagccccnggcacgtctgggtcagactcatgcatcctatcagatactacctggctccagtatg

SEQ ID NO: 11082 - DNA, 3459 bp, Emericella nidulans
ggttgccccaatttctggcggcgctcggctttggagttcaggaagcctaggtgtgcggtgcggatatgttcttctagagctaatttgctgccataacgctttccacagccatcggcagcggaccaacctgtgactcgttttgatgtggaaaggtctgtttccccgcagacgaagcgcttttcgccgtcatgtacggttcggatgtgcacggttaagtttcccttttttgtgaagctgcggtcgcagccggggactgtgcaggggaagattcggcggtcgtcgaggctgacattgccgtgggcgacttcgagatggcgacggagttctcgtgctgttgagcaagtgacggagcaagtggggcactggggaggatgcgcagtgcgtatatgtgcctggagtaaagagtatgtggggaatgtagcaggaggtatcattgacccgtcctctacacgctgggagcattctgcgcagctgaatcgctttgccgtatggactctgctttcgtgcgcgcggagatgacccgctgattcaaatgccattaagcatttgtctcccgtctgcgggtcgatatgctggcactggaacggcttttgtttcagatgtacagacaggacatgtttctgcaatgtcgagtgcttgcgaaaagtctcattgcaaggtggatactcggtgcaacggaacttgtcgcgaccatcatgagctgctagatgtcgacgcaatcgggagccggtcacgaaactcttcccacaaccctgggcgatcacagatgtagtctcgtactccagtgtgggcacttttgacatgatggttcaagtgcgaggcgcgcaaaaaggtcttctggcatcctttgtaggtgcagctgaagagcctttcattgttgtgtgaccgcagatgttcctgaagccgggcgggtcgattgaacgctttggtgcacccttcgaacgggcagcggtgagttttcaattccgatggatatctcacggaagttgaagccgttgagaacggcgtcgctggcgtgtcatgaacgctgctagtgacgctggaatcatcgggagagtaatcgacatctgaatgtgcctcctcgtagatcggatctgatggtaatcagagatgctcttgcataggatccaactagcttaccagtctcatcggcggcttgtttctggagccgtttagggctggggtagtccccagacgacgaccttttctggcccatgctcaaagagcatacaagcagatgtaatatagagtctaagacatgtacaaaacgtcagaaaggaaataaattgacggataaagatgtaacgactttcgataaattctcgataggtcaaaattttgccaaaggcggtgagtgttacataccaaaatgggctagcggcatcaggaactttttccgccgccttttttgatgtcgcgacgactttgaatgaattcttcaaaaagaacacctctgcgtcccgcctgtccctcccttcgtcgcttcttgcattactctagcgccagccctttaaggtcatccgaacctgatctgccagaatgtccgactacggcggcgaccacgaagctgaagaaacgtaagatttcagcttctcttgcgctccagcttgacgaattgcggaggctgcattttcgctttttgactggcttgagagcaactggtatactaactgttcacggcagttatgactacgagcccgatcagacctacgatgacattgagcccgaagacttcctgaaccctgaagacatcgaaggtgaagaaggcgcggagggctatgaggagggctacgggggcgctgtgaacggagaacgtgtggtcgtttctggtgacccgaatgctggatattcaggaaaggtggttgaacaggcacgggcaaagaagatccccaacgaccagcgcacgacgactccatacatgaccaaatatgagagagcgcgtgttttgggtacgcgagcattgcagatcaggttcgtttgcgactgttttgacgagatgggtgaagcgctctcattgacatcccattagtttgaatgcgccggtgcttgtggatctcgagggagagacggatccgctgcagattgccatgaaggagcttgcgcaaaagaagatccctcttattgtgaggagatacctgccggatggaacgtaagtgataagactctatgtgccccatgatgttctcatcgatttcgtcctggtattgactggttgataaagttatgaagattggacatgcgaggagcttctataatctaatgatgaatttgtatcttatattgggcttcgattcttgttatttgttattcggttgaactttgcttccgcatagcgtttggagttcaggagtaggacatgggcgacggtcagctggccgggtcctgcaagggaaaaaacaaaaacacccagtttgtcggtaaacatttagaagaaaaaaaattgaaaaggaagtttgttgttggcatctgatggaacgtttgcggagtatacatagagaggctgcgtatggccgaatgcttcagtcaccgcaagcaagggccatagatcacggtgccctgatgccctacagaccgttttcaggtcgcctgtccaagtacggcatactcaaggaaactgtatgtagtacgcagttctcggccgcaggttcagaggcacaatatgcttatatatctagtaatttatagtccacgcatggctcactcaccatcccagtatcgcgacctcacaggaaaccgcgcctgatagcaaatcactaatcaaactgccttggaaacgatatggcagtttgtatttggcccatatgagtcagaccgccgaattgggcaagagcagaagcatggctcatcagagtttgcggctgatctgtagtatagatatactcagtaggaaattcttatatgtatttaaatatatcacgtgacgcatagatttgtgcggggatcaaagagaattagctgccggccgggaccgtcgtccgatatcaaaccgtggagctgtggtataattcggtacattagaggtttgccagctcaacaagagttatttcatggttgcgacctggaaggataaagaatggacaactgctgaggcgtatgcgtactcgtacctgggcgtcagccttccccgctggataagtcggcacagcatcacgctaacatcctagtccagattcccctccgcaggtgactgagctcgtaatcgagaattaagcagtcatggcgggcggaccgagctcggctgtgaccttgagagaactgccgagaagcgacgctagaggcctgaaaccctgatattggatttgtcagagcttgcaataaccgaatcatggaggctaaagtgcgacccatagggaccgttggtgcctcttgggggctcggacgacggttccaggttcacgccatggtggatctgtccccggctgtcggcgtcctatattcctaagcttagcctaccaatgt

SEQ ID NO: 11083 - DNA, 1944 bp, Emericella nidulans
cggagatcttcatctactgggtccgtctgtgtggaatcattggccgcatagccaagtatctctctcgaccgcgcgcgaacgacagcaatgccggcgcattccccacccacctcgcaacgcagctcatagactgggtccattccctcccaccacatctaaccctccccgtccattccaaccgaacgacatcctttaaccgtgatgtccaccagctgcatttgccctaccttgcagtgatcatactactccacttgaaacaacctcaccataccccccttgaagcgtatcagcctgcgattctcgcggcctcttgcctggcgagaatcctgcgggacatactttcccggggctctacgcaatggcttatggcaatcacagggtggtacactagtttagcgtttattgctcttctccaggcttgtagagtcgacggactcgccgctgctgctaacgaggacctcgatatcctgacgctagcagtcgaccaactgagagtcatgtggccgacggcgaatatcttccaccgcgggttccagcggttgaggtccgatgctcgtggtagtggaagtggaagtgcagccggggcagaggcattgctgtctctagcgagtggtgagcaggcgcctcatctcgatactggcactggcactgctgctgctgcttctgcccgcggtctgggcggtggaaacaatgagacggcgcatgggaaccccatagatggcatagactggattgattattttccttttgcaactgcgcagactagtggaatcgcagagagactgctcgttccccagacggatgagctccagttcagtgatgccttccctggcacaatgatgcagtttgaggacctgttcggaaatcacaatttctccgatttgaatttattcatgtagctacagtcagctggctatttaaattctcaatcatcctggccctggcacgccctggatcggttaagccatgttcaaatcttcatacccccggtgggcgacatcgtctgccctagccctataccctggtgcaggtccattgtacctcgcaataatccgcttctgcttatgcgccaggttcttgttcactccggtcatccagctatccacattgttagccaacagcccttcagcacaagcatgcacgtgctctgtccattcttcaactttcttccccgtacactcggcatacgatatacctcgttcgcatgcattctggatgaaccgactgacccagcctacagcatactcgatcgaccgcgggaaattgccgaacatctgatgtggacccatcaccatcatcatgttcgggaacgattcgacccagagccctaaaaaggtccgcggtccatctttccatttgtccttgagcttcacgccaccgacaccttggaaatccacggccgtaaacgcaccagtgaccgcgtcaaaacctgttgcgtagatgaggatgtccaagtcgtactcgctatcccgcgtcttgactccctttgcagtaatccgctcaattggatcgctcttcacatccacaagttcaacattaggccgattgaaggcctcgaagtaccccgattccagcggtacacgcttcgtaccgaagccgtgacacttgggaataagtttctcagccgtaacggggtcgtgcacacgctctctgatcttgttcgcaatgaactcggagtagaggtcattcgcctctttatttgtgaagatgtcatggtagttcgaaagccacttctcaaatcctttcgtcttgtagagctcgttccagaacttctccctctcttctgcagagactgaaaagactgaggtcgggttcgatttatgcagaaagcacgagtacgactccctacatctcttgaagatctcgggatacgctttgcggatctcttgcatctcatcggtcgaaatcgggccgttgttcaaggggcgcgctccaggttggagt

SEQ ID NO: 11084 - DNA, 106 bp, Emericella nidulans
ccccgtactcgtccgtctggtgttggttcactggcttcgacgacccgtctgccgctgtgtccgtggttggacccgccatgtgtcatcctcgcttataagtgctctg

SEQ ID NO: 11085 - DNA, 246 bp, Emericella nidulans
  unsure (1)..(246): unsure at all n locations
ggatttctcgagacgtcgcaggccacttggtgaaccagaaccgntctggccaagtaccggttcaaagtagtttgatgttacnacncgcttattngagtgatacaggggtancttgtaggaacatgtatacgctccaatgcggaccttgctgggtcgcgtgctctgaaagtaccngtctagtgttgtccaacctcgtcgggtcttcatctcgtnacgtgcccatcgggtcttttaaattctatacct

SEQ ID NO: 11086 - DNA, 903 bp, Emericella nidulans
atctagagcgtagcgggcctctttctttttaaaatccaaacctctagaaccccacctcgcgcgatgcacatgcatcccgctagccaagcaacggaccaggctgggactacaccatccgagagccttaaacactctggcacaagataacagcaccattctgttggggaatgcccactgcagaaccattcaccctctggctgggacgaaagccctacgatagcctactatatgatgggcgcttccgtgggtgaaccaaagcgacttgttgtcagcaagctgaactacccagattgtgcagggcacctgaacagaggaccggtgcagcaaaagcacctgtggctctcagggaacatcatgcggtctctccgtagggggagagctaccacagcacgatcctgagaactgcagactaccatatagcccttcaatgcatcgcactagcactcgatcttaaggctacggtccctagtttttatcatccactacacattcggtttgactagttaccctgcctctgggaacgataataataccccaatggcctttatccttctgtgaaaccggaccctgacgaaactgccttgggggccagacccagaaactgcgggagccctaacattccccttaggttaggacggtgctatgtgacctattccccgtcccccttatcaacccttaaggggccgttccctccatggccagttaaccgaatccccctcgggcccaaaaaaaaacttatcctaccgtttttccaaatgcctttcgaaacggaattacctccgaattacctttgggacctcccacaacaggttttttgcgatggaacgttcattttttcttctagggacgaaagccccccctccccccttggggagcgccccctcattatcaattttttctttt

SEQ ID NO: 11087 - DNA, 922 bp, Emericella nidulans
  unsure (1)..(922): unsure at all n locations
acataagggaacgaagagggttctcttcaaatggcacttctgggtctatacggactactatacgtgcgtcgtgctttcttccttgatccatattgtccctttgcggtctgttacccaggagaaacgctaagtttcgagtcgccagcttcttcatctgctccgagaacatcggcagctacatgaacttttggctgaagagtctgaaccggtactctgtgtaccagatgaacacgtatgccaccgtcactaacgcgatcacgatcctaacgagtctcctctacggctggacgagcgaccttttgcagattccggacccgatcgtctctttctcgctgacggtctgtttctgtgccgcgatgaatctggccatctgcgatggtgtgcccgttgagctgaagcggtccagttaatatctcactgggtatgataggccttttactgcatagaacctgtgctgagggcagtagatgtcggcaaggtactggtccagatttttggtacctgcctatgcttacttgtcctgcaaatatacatgaaaagtggatatgatcatagacgagggtcaatgaacgctgcccgggagataagacccagcgcaagattattcctgggtcaacaaactggatcgcgatggtttcccctattgtcacttgtttaaagaaacccttngttaactccctgggggctgattttcgcccgccctacgggtgaatgtagagccccttacgctgtgccttagtgtacaccactgcccccgctagggaattctacagggatgtttttatggccctggttgttttttctgggccgcccgttatttgtggcaaatgatggcccctgccattcatatggtttttattgggtgttcctcgtttcctcttctcattcatgtatcttgtttttttctttccctccccccccc

SEQ ID NO: 11088 - DNA, 1749 bp, Emericella nidulans
gtctctcgcactaggaggaagaatgcctgaaataggaactttgattttagctgtggaatagagatggcttgtttgaggacgcttgtcgcttggcgcagggacttgaatggcagcttgtggaaaccgaaggcgagaaaagtcgacggatactgtacgtggttctattgccagtgcggtggaagcttccttctcatatagttcaatccttctttgaatctgtttgtttcatatttggactgtttcattctctgcttgcgcattctcatcttcgagaacgactgcagggattgttggttctgtggagctgatgagcgcgccttgaccacccttgttcttgttttgctcttttgttctcatttaacccgtttctcccttccaaccctttgaccttgcaacattgtctcccagcgcgttgccaaagcgaacttgatatcagtatagtatgaccaagtagtctaccaaaataaattttagtacagtattgctagttatacaagataaattttgtacaacaatgattatgcagagctggtattctgtaaggagtaaattcatgcaggtacagagcgtccacgtcaggcacacgcgctttagtgctgggtacacattatgctacctttggggcaaggtgctattctaggtagggtatgcctagcaatgccatgatcttatgacctcagtaatctgaccttggatttaagatcggagttctcaaaccctgcgtaaccaattcgataaatggtaccgtcacgtaatttcgagtaccgtactgagcggttttaatccgtagcccaaatattaagcgtctgtaccaaatgtgcataggacttagaaaatagtgatttaattgtaccgcacgtaatgtcataaaacacataaaacatgaatatcaatatgaaccgttcttttctcttttatgatccaccatacatgtatgattagtaggtccttcaaaacgccaaaaccctgcccgacttcggagcgtctaagcgtcccatgtctcaagacccgaaacaatgcattcctcttcgccctcaaccttgaccttgagctcaccaacctggtacacagtctcgccttctttctcgagaatatccttaacggcaccctcagagcctttttcgacgacaataaccatgccaacaccgcagttgaaggcgcgggtcatctcatgagcggagacgttgccctgctttttgagccatgagaatacaggaggaagcacccaggtcctagcatcgatgtgtgctgtaagagttgggggtagcatgcgggggacgttgtcgacgagaccgccgccggtgatatgggcaagacccttaatggatgactgagtggcggagagagctttaaggaggggtttaacatacatgcgggtgggcgttaatagggcgcgtcctagtgtgaggggctcatttgcactcggaggagaggcaacagggcatggctaagggaactgggtcattgtagctcagcccggagcgctttacgatcttgcggacgagagagtagccgtttgagtggggtcccgaataagccaaggcgaggagaacatcacccgccttcatggatcatgtgtcgggtaggatggtgcgtgcgttggggccggaggtgttgattgcaccaacggcggcaccgacggcgtagtaggtgtcgtcgatgaacaagccaggcatttaaagaatttcgcccccgatgagggcgcaccctgcttgtatacaaccgtcggcgacaccggtgaaaaggccc

SEQ ID NO: 11089 - DNA, 1256 bp, Emericella nidulans
tggatcctccagcgacagcgatgacggtggtcgagaagttgggcttgattttgatcgaaacgccgtcgagccaatgttctgtgcaggccaccattatctcagccaagtcggtgtcatcactcagcagaggaaggagagtctgggtttctgggtctccgccgcgaacgttgtattcgagaaccttagggccgttcttggtcatcatgagaccggtgaaaagaataccaacgaacgggaatcctattataaccattagcattaccagtgacaagaaagtctgacctttgagcacgtaccttctcttctcatgccgtcaatagagggttgcacaattgtgcgatcaatctcttcgaggacctgcttcgaagagataggagtaggagcgtagcaccccatccctcccgtattcgggccctgatctccgtcaaagatacgcttgtgatcctgagcagcggggagggacttgatgctgtaaccatcgctgaaagtcaagacactaagttcgtcaccctcaaggtattcttcaatgacgacctcatttcctgcatcaccaaattggcggtcgagcatcatttcgcgaagggcctggtgagcctcttcctttgatgttgggatgatgacccccttgccaccagccaatccatcggctttgatgacaacgttatgcgacacactatcgagatatttgcgagccttttcgtattctgtgaaattctcgtaggcggcggtagggatgttatggcgtttcatgaagtccttcgagaaggctttggaaccctccatgcgtgcagcggccttcgagggaccaaagcaccggattcccacttcatattccgttattgatggttttcttgaagtgaaaaggaacaggcgcaccaaccagcttggaaatatccctgaataccatctaccagaggagcctcaggaccaggaaccacgagattgactccgttcttctgggcaaaggctaccaatcccggataatcatcccccttgacattggcattctcaatcttgctgtgggttcccgctgcagtaccaccatttcccggggcgacataaactatgtcaactcgaggggactggctcaatttccaggctagagcatgttcgcgtccgacgttgccgacgatgaggacgcgcagacgttcctgagccattgttgaatgcaatattctcgagataaatctgttaatcctatgcaagaatatttagatagggtttcagtgactcattacaagcggcgcaaaggtgtc

SEQ ID NO: 11090 - DNA, 150 bp, Emericella nidulans
  unsure (1)..(150): unsure at all n locations
tgctggcctatcgagccgtgcctgacgtcactaccttcggcggcgctgtgctcgtcttgagcgttccggtgtgtgtgtattgccactgatgtcgctctggtagctcgttgctgttgtgcggctcggngaacattgcctctccgccgtgcg

SEQ ID NO: 11091 - DNA, 1117 bp, Emericella nidulans
acctccgtcttgatatgtcacacgccgttgttgatgggctttccgctctggtcctgatgcgggacctttttcaactctatagcaaacagaagctggccagtcgtgtcatggcctaccaagactttgtcaactaccaatcacggctgcctatgcaagaatccatgacttactggtccaactaccttgcaggagcccagccatcccatttcccattgtacggagaccagttgagtcgcgaagaccttcgtaccgtcagatcaaacattcagctgggctctgatgtcctaggggaattctgtggtaagttcaacatcacgcctgctaatatttgccaggtagcatgggcactagtgctcaggtcctacaccgggttggaagatgtgtgtttctcgtatgcaacgtcggggcgggatgttcctcttaaaggaatcaacaatacggttggagccttcctaaacgcagtggtctgtcgcatcaagctgccgcctactgcaacagttccgcaggctttggtgaaagctaggaacgacttcgtggaaagcctctcacatcagtactacttagccttggatgatgcgcaatctggggactttgcccgtttcaagagcaacacattaatgtcatgccaacgaaaagctgcaactgaattagcgggatctgggcttgcttttgagcttgttgatgctgccaaccccaatgaagtaagtagtgattatatcccttacagtccattcgacgctaacaagtgcgcaagtatgacatgtccataaacatccaagtagggcatgagggattggaagtaatgattgattactggaactcacggattggccagcgcacggtggagagtgtggcacaatccttccggcaggcgctcctgaacatcgtcaaagaagaagatgccgtgctgggagagattgatattagtaccactcaagaaatcaatcagcttcgtgaatgggccaaggagatcccaccaaaggcagactatcgtatccacgacaaagtgtatgaacagcgactccgccgacccgatgcttgggctgttcagggctgggacggcgacttaacatatcagcagctggacgacccgccgaagtagttgcaacaacctcat

SEQ ID NO: 11092 - DNA, 459 bp, Emericella nidulans
actcatacaatgctattattccaaatctaaaagctttatattttgaacatacgtcgatactaatccttcccgaggccattggtagcagcgaccagatcgggttaagtctgggattgcccgcagtcgcccaaacaattgaagagcacgagaataatcttaaacataaaatcaccagcaggctgcgggatactagcctattaggtacgcatttgaagacgtggacaattgtagtaaggtatgactgaccgatccattagtgagaatcgtgccttttgtcgggtctcttttcttttcgaggaccgcgagccattgcgggcataacgcgacgcttctcttggccgcggtatagaccgtgttttaaagcattggggccaacgcaatagcattgaacatatataaagagtcataaataattcatgtggtgagattatcaatggcgtctgacgcggagagaggttt

SEQ ID NO: 11093 - DNA, 435 bp, Emericella nidulans
ctcagttttcttgtcgctgtcgttgtcgttgttggtgtctgtgaacttgttttctttcccgtgaccgagctgggagcatgctgtttgcttttggtgttcttctggtaatacagtgttggatggacgtgggtctagcggacttccctccaatacagcgtcacagaggatgctgaaagcgccactggctttggctggaacggcccggtccccggagcgaaaggagagcctgaaggttctttgctgtgagagatgtggatttgaaaacatacgcgttggtgtggaagcgatagagctttcggaacggcatcgcgcacgatgcgctggagacttcgggggtccgttgcgatcgcggcgccaggggttggttttgagcccgttgtagaagcgaaataggtatagacataagggcagctgtctggaaacgcgacgtacatg

SEQ ID NO: 11094 - DNA, 201 bp, Emericella nidulans
atgacacagagcttcttatcacctcccagttcaaaattgtgaagcggacgatgatcgataaggtagcgaaggccatcaagaacaccattgtacagtaagtacactcgcgttaatgaggaggagtttgctgatagcaatggataatccagagaaggaatgcagcgcgtagttgctcgaggggatgtagtgctaagccgagct

SEQ ID NO: 11095 - DNA, 456 bp, Emericella nidulans
cactctgtgctgccaagttgattagatatttcggcgtaaagatcaaccaccaagttgtaatactgctgctgtgcgcgccgcttcccattgtttgcagtcgctttctggaattggatgcgttcgaaggtgtgctgtgtcggaggttgcggctgctgcggagcaccgccgtacgttgaaccatactccatacctaacccagcggactgagacatcagaggaaatccgtgctgagcactcgttgatgttgatcccagactgggcaccattcctggattctgagtgggctgtaatactaccctttggggtggcctctctgattgtttgtcgcgtttcggcgtgtgctgcacaagctcacggaccttggtatgttggtcattcaccatcgcttgtattgacatggagaaatgttgaattcttttgctgcgggttgtcaaaatttcaggaagaaaggaccct

SEQ ID NO: 11096 - DNA, 3053 bp, Emericella nidulans
tatctaatcgaccgttcagcattacagctaaccggggcatcccacgacaataatccacctccatatgagatggtggccgcttccacaaactctcgagtccttggccgcatgaaaacatcagctctacctttccgccacaacttaaaggatgctactgttagcatcctcgttgaatacaccccaatggtacttgactcgtcgtctgaacctccctatcccggagatgcacggcttgataatgtgcatcagacacttgatcagctggtccagaatgcgcgggtctcccaccttggactactgaacttccttgggtactacattgatcgacccaattcccgttacgctttcgtctatcaaatgccaatcgactatttcccgttcctccagaaccctaccgaccttctaaatgatctgaagcctaagcccttggtttcgcttctccaaatgggagacgactttccggtaccgagcctggagactaggttccgcttagcttatgacctccttatggctgtattgcagctcagaagtcagaatctcgttcacggaaatatcaacagccataatgttctcatcttccaaggtctggcaaactcaaatcaaaaccaagttggagtgactgaaaacctccgtcgtccttatcttacctccttcgctcagttctccgggaacaacccgtctcccgagccgctttcttcgaatatgtaccgccatcccgacgataaggaggctgatcgaagatgatgcagcctgggcatacgatctctactctctcggcttggtcctgatggagattggcctttggacgccgatcagtcgcctgtggaagttcaaatacaacaactctatgttcaagcaaagggtggagagtatgtatctgaggaagctaggccccaagtgcggtagtgcatacattcatgtggttcaattatgtctcgatgcaccaaatttccacctttcgacccagccatttgatgacctcaacttgagaatacctcagaccttccactacccggtcttggatctttcggcacccgagagcacttttgctttctccatgaatttcgtttacaccttgtgtaaaataacttggtcgtgctgcaggattgacattttttctgctccagcagctgaagagctggacgattgtcttcctctagcgcttgtccctggttccgaagcagatgctgcaaagcaagctgcgcgagaatacaagggacctgaacaagtaacccgcttctcgcaaccagtggctgtggctcttacccctgagaccaaattaatgaagatcgggcttgaagaaaaaaggctgaggaagcgcacattcaagaaacttacaacggtcgaaattcctcaagaacacctcgatgagtggaacttccgcatgctgcccaaattgaggaagctgctgcagaaggtattgaaggattcgtctgaatcatgcggtgtcactctcatgatgacgggcgacggtttggaaaatgcgaagacaacaattgtgtgacttgtgctagcgttaaaaggttagggcggcgctgaaaaagtactttccctcttgatgacaaagaagactgggacttgcttgtgcttcgcggagatattgagcgatccaaagtcccgcgcaagaagcgccgccgccctgcaaagactggacctcttagcactatcgaagcccctcctcctccgcaggaccctaacccctgttttcagccgaggcctctctgcggtgcatccatgggcgccttcatgaatgaagaacatctccctcctgtgtcgtacggtggtgccatcctagttgatggtgttccctacggtatgacagtacatcacatgctcgaggctcccagcgatcaagaggatgcggatgatatacatgaagctttggaggatgctctgcttcggtcggccggaaactggactcgcgatctggcttcccagaattcacagctcatgtcagcttggaatgatgactcctctgcacatagtctcgaatttgaagtctccgatgacgaggatggcgacgactactatgatgactttgcgctctctgaaggatattcatctgacgagggcgacgacgactttgcttacgatgacgatgacagagcgtcgatcggagacacagctggcatcgaacctggagaagagcctcccgtgtttgtaacccagcctgccattgatgacgttcgcgaagatttctttccaagccccgaggacagagatgacgagcatctcgcttcccacactttcggatacgtttatgcttcctcaggcgttcgacgctggacacgacagggcatcaagcatgaaatcgactgggctttgattaagatcaaccaggatcgcttagacgcgaggaatattgtctacgacaagccgtcctactctttagtggcctcagcgagacggagaccgggtgaaccgatgcccctacaacaacggaaccccatcctcttgaatgacatagcacggtttgaggagcttggtggcctcaatgttcactgctgtggccgaactagcgggttgcaaactggacagatttcgaaggcgttgacgatggtgaagctacatggtcggcacaccttctccacgagctttggggtggatgggaacttcggaggtgagtgagtgttgcttgccagcattctcgttaactttctcccttctcatactaacctggctctttagttcccggtgattctggcgcttgggtctttgaaaaatccactggccgcgtttgtggagctgtcctggcatggtccgaggcacttcgcatcgcctatatcgctccaatggaggtcctccttgaagacatcgctcgcaccctacacgcgacccatgtcacacttccagatggccctaacgagtctgtgacctttcctatgcagcacccgtccgttcccccaaatcctagatacctcggcccgcctccattgccagatcaacttcatgttgatctcaaccgacaactgcatcttgatgatcagagcgttggtgcagtcaacaccagtcgtgggctcagagagccataccgaaatctaccgcctattctc

SEQ ID NO: 11097 - DNA, 161 bp, Emericella nidulans
  unsure (1)..(161): unsure at all n locations
cacaacatagagaaaacaatagaagtgagccaaaacacaaacacaagatagaacaccagaagataaggttaaacatagtaaacagatacagataacatagataagacatacanaaacaatacagagaagacacatagagaacaaccatagatagaagagaa

SEQ ID NO: 11098 - DNA, 831 bp, Emericella nidulans
aagaccgctttacatcagtccgacctaatacgtgtcagcagacgacttgaccaactaagaaatacccaccgaatatatcagtagtttcgatctgatactgaaaatctctctttagatgacgggacgcatcccttacccatgggccttgtttgatgtctttaacggtgttagaataattcgacaaaataatgagacaggggcggctcactttgggctctcctctggtataaaagaagctgccaaacggcacttttatccccaaaaaggatatgaaagacagcttttgtgctaagattaaactccttttctgccgcgagatgcagatctccttgtggaacatactgcacgggttggttaggaagcctgaacttgggggcgtcactaccagctctagccctgttcaaatccaagttcttgtcaatgtatattgctgattggagagtagccttcttggtatcctcggcttcgcatgttttatctcccacagtaacgtcctcccagctgtccaggctgggtgttcgtgtgaactgctctgtcgccatcttgtttagtgtcttgaaaatggcttctagctccataggttcaacagctgtggaatcgtggatcaagaagtttaaccgcttttgtagaaccttgagcggctccagaaaagttttcaccgtgattcgaccgggggtgtcattcccaggggggggaatggtatgtaggaagaggaagtcacagtctcttccaggagccccagtgacttccttgatcttctccagagaaacactcgtagtaagtacaagccgaagtagtggctgtaaaagtagatgttctgcgtagtaacat

SEQ ID NO: 11099 - DNA, 1353 bp, Emericella nidulans
aggcaaggagaggcggcgaagttttgcgtcttatacccagaaggcacaaccattatgcgtcgcagtaacacacgtgacgacacgcagaatacgacagttgtgtcgtttccaaacatttgaaaaagaaagaaaagaaaagaaaaaggacatggcttggtgtgcttgttatccgccacatcctgcgaaagggcctcacattatgagggaagatctgcttcgggagctctaaaatgagtcttcacatatttcgatcacgtataggacagccaatagagctgacaatccttctataagagaagataatttaattctcaccgttgaggttagtattctgtttgttgtgtcccgccataaactggaaagcatggggctgagacatgcgcagttctctggctgttggcatgctccgttgcgtaaggaagactaaacaccaggattctagcccgccaaattttaataagctccgtaaaaccatatagggaaaatacatcattatggattagtataccctctacttacagagtcgcctgaatttgccttccatgtcatatacagggagaatcgtttttagaccctaatcacatgatttatgcagatagccatgccctccaagtagatcatgagaacaagtggtagttttcgctcctagtgctcttggagtgtagcacttaaaggtgcactagctggagtgtttccgtaagttgcctgaattcttcttgctgttgattcagggcaagacaatgcacgtgacgtcgaataagtctggcccaatctcaaggggagaacagtgggttcaaaatagataacaaaagaccattccaagaattccatgttattcaagaacaagtccttagccacctgtttctgtgtctgcaagtgttgctggagagtcgggtgggcctgccgtgtgtgccatttagtatgatggccgtcattgactgcacctaagacatgcagcacccagcctttcattccaactagtacgaacaaatatcttcttggctatctgtctcattgggcctaagagttccagcagatgaagctctctgctcttttctttgttgacagcaaaaacttctgccattgagtcaccctttttattagggtccattaccagggcggacagcatatatagagagttgtgcggccaggtgtgtttccctcccttccactgcatttcactgagaatcgtctcagaagaaaccctgatctactctctattcagattctcacttttacactcacaatgtctcctgtcaaggattcctcctccgcaatgaattctgctcccatcgttgttcggcggagcaagaccatgcccatcgacagcccaactgccaagttcctttacac

SEQ ID NO: 11100 - DNA, 572 bp, Emericella nidulans
aattctttactgtttgagagtagcgcatccttttatttctcgtacgactcgggactctgatcatacaataaagtaaactatggcgataatattggataagctgttgttggtacacgtctttcgtctagaccggtaggcgtacatctgttgaactggtacagatcgggggggcatcatgactcggatcgttataaccattaagcacgcatttgcgaggtagacatttaccgtgtgtgtcaatacaatatttgatttggcctgatagtatccggagcacaataaacccgttttataagacatttcaagaggaccgctgatgcactgtgattgtaaagagagtgatttgccgcggttaagtccctgtgaaactcgcagcaaactattttcacttaagcggggccccacaggcggaggaattgcgttagcctactgtttataattggtacctgcatggggcatcattagctactatctggaatgttcgaacacaaaatatcgtttcccgtgtcgtttatccccagtgttttttttaccttccaagagtttggcaactttaattattcccaagtttt

SEQ ID NO: 11101 - DNA, 1725 bp, Emericella nidulans
  unsure (1)..(1725): unsure at all n locations
ggaacgccgatagagtcagggtccagaacgaatggattgcgcctaaaagcagcctcaacaacgaggacctggtgcaaagcccgtaaccttttacataatcgtcgcaacaactgcatttggcatgggcatcgacaatcccgaggttcgctttgtcgttcactggagcccgccacgtacattcgaaggtttcgtccaggaatccggccgtgcaggtcgcgatggccgcgccgcagcatcaatagtctactatagtctccaggagcgagaacgcgttcttaaccatctccgccgggacattgaaaatgtcaacaacagcacaggtggccggaatgcgggccttaaccaagacaaagtctcgcttttgagaaatctctacgctcgtaagcagagcttcgagaaggtagtccgatattgtgaaacaactacacgatgtagacacgaactcatcaaggagttttttggtgaccttgaactagtgaagatgggctctcaggtttcaaagctccagtctgcttgtcatgatgataatgatcatggttctgcaggcggagccacatcatcatcaccctcatcaccttgtgattatgcctgtgacttctgtaaagaaggacctggtgagctaacagcgcgcaaagcgagaatggcatcggcagaggagcttgagaactttactgaggcgagctggcttgacgcaatgtttccgctagatcagatgtttcctgaactggcccgccaaaatactctaaaaggaatctaggtagcaataccttgtgtgacgaattcgcttaattgtgtttacattgagggcttggactaaggggtcttgagaggttcactgaatctatacgctacaacggcttgatgaaactcttcaaagggttgtggaaggacactatagagaactttcatttgacgacgactttcatttgacgacaaaaccatctttggaagttataatactccccgctactccttccttttttccaagtcacaaaccagttaggtgcgagtaacggtatagatacaggacgacaatcaagcttaaacgtcaccataggatataaggggtagattagacggcaatagaccattgctaacaacttcgatatccaagggggcatcattgaataatgattaaagccctgggggtggtggtacctgaatcgagatgattggttagctggcggctgagcagcgatgcatcgaacggggtatacatacggcactgtaactgccaccgggaggtggaggcgggggggatcctgaccccgggggaggaggcacaggagcctcagatgtcgggggaggcggaggagcagggctcagcgactgttgctgttgctgctgctgtgcggcttgctgataatattggtagtaggcgacgtagttctgataaccgccgtacgcagcgtaggggtcagatccgtagtactgggcatactgcgcgctgtagtcggctgcgcttgcggctccaggggttccttgtcctgatgggctggctgtcgcaggggcgggcgaatgctggtgctggcttccatatccagcgccgtaacctcctccgtagttatcgtggcggttcccacgatttccgtagccaccaccataaccaccatgctggggggggttatccttgaattcttggtagcgttcccaaacgttatttagcaggtcttcgcatagcgcctttgcgcgctggaccncgtgggatcggggcaaatgtatctg

SEQ ID NO: 11102 - DNA, 1065 bp, Emericella nidulans
gcagatggcacaagtcgaatacgatgggagcgtgaaccttcatctatgtttaaaggcatcctcttgcgaaggagacgagtggcgcgggggaactcatgaacaaaggtccttgcagggaacatctgtcctaactgagaagcgctagcctgtatttcctcactggatggctcatgtgcaaagacgcatttgcctagtgttgctgttatggattcgcggacttcgagccctgaacccaaccctgcagttgcaggtgcctgtcgaaggactttgaggagttcattcgagagtgtgggattatgcttctccatcagatgtcctgtattgcgcaccagcctcacttcttcatgtggcaatttccatcgaaaccataatcgctggcgatcatgccacggagcaactttttcaacttggattggtttcatgtacgtgacgtaagatgcaggcttatatgtgctgaatggcacagatggcaaggtggctttgttaagtgctaggttcagtgctcttcgcgcattgtccgcatttgcatgattctcggcaaggacatataaccggtttggtatttgcgatgcgcctcgttcgaacgagaccttatacgtcgcttcaacccaggataggaaaccaaggctcagagtttgcgcggcggctttcattctcggatcacctggagggagaagattaagttcttctgattgtatccggttggtgtagtcatgtattatctcacggacggattcacatgaccgttgtttcccagtaaccctgataagtcccagggaatgtgtgacgtcgatcccagtcccatggaggctagccagttcttcaaacgagaagaattctgaacctattaataaggacaacaaatgagcaggaaggcggatatctagctgtccaatatcattcatgagtccaagctgccagcagtctcggaggatgcgctcaataagaagatctttgcccttgatattctgggtcgcagcaaccctatctgcaacactttggaggcgccctggccgtctctaggaaaggcgaagtcccggcctccatttcctaatttggtctgac

SEQ ID NO: 11103 - DNA, 123 bp, Emericella nidulans
cacagcagatacagtacacaaacagaacacagataacaacaagataacataagataacatcagaagcataatagagaacagaagatacccacatgaaacagataatacatacaatagaacata

SEQ ID NO: 11104 - DNA, 2939 bp, Emericella nidulans
attaaccctactatagggatctgcctggatcgctcctatatagcctgcttgttacaatgtggcgcactttctgatgtggccattctctagcggtcgagttgagtttttctctttttcttttagatactttctaccattattagcttgatagcaggctagattcttcatgggatatatctctgtagttcgtcgtattcccctataatcttcttctgtaagctacagtttcagtgtagaatccccgtcagggtaatgtatacccccaactagatgaaaaaggtcaatttgatcaccctgccacctgatttccctggatcgcgtgcgctatggctagggacttgtactagttcataaaatatgctaaaatctatgattcttcgcatattcaataaccagaatttactatatctctaatgactagaatcaacttaattactagaatcgtatcatttagtggattaattgatattcaaagtgtccctactagaagctgaactcattattctataccagaaactattcacattgtgtaggttttacctgaatatgtagaacaaaacaattccaaatcattattattttcacatgaagatattgagaaagttttattctttattcgtatttcaactaaattaggttagtctgtgctgaacgttgtatatgactctaacagccaaattacagtacaagtttcggtgtatcaagattgtcgcaagtgtgcacagacttttcacccacagtgttccttgaacgtcagcctgctagttggaacttacaatccagtggttaccccactgcaactgtccccttgttccttatgcatcattatttatcctcatgcagaaccctccttcattccactgcatctagggccccttgacgcagcccacaattcctcatcacatcacattgcaccacacccgttgcttactgccggtcatgttcatcgccttcgaagctaccaaggacgccaacgcctcaaaagacctcgaatcaggccctcgtaaccccaagagcgtgacgggtcgaaccagtactggtagacgcggcgtcgtacctcgagcttgctcttcctgtcggcgtcgcaaagtcaagtgtaatggcgagaagccgtgtgaggcgtgccgatggtacaagcggcctgaggagtgtacctatccagagtacgaacggctacgaaagtaagcacaggcagactcacaaaaaagaatcatcactaaaccggtcatgaaatctagtatgaaatcgagcccgtcgcctgattaccgcagcaccctgacaaggctcttccccggcacggcgccagagcagcttgtcaatctaccacgcgagaaactgctggaactgatgaccggcagcgcttctcagatgcaagactcgccctccacgacagcctctgtaacgactggggtttccgtgatgccaatcgagagacccagcctggaatcgctgcattccatccccagagacgagctgggcgaaatccctaatgttccgtcagcctcgtccagcggtcagatctctgacgacgtcaacgctctgtcgctcctggctcgaccacctacgtcctatctaggcatctcatcggtgcaggccgccttgaaagccattgcgtggaacctcccagggtacaatttctcaatttctccgacagtcccccggcaacagcccgaagagccactcagtccgctctcgactacgctcgccacgcttcaatttacagagacacagttggtagatgcatattttgctaattttcattcattcgcaccgctcttagacgaggatgcgtttcgcaaaacgcatcgagccggctatcgacaagatgcgcgatggctggcattacgcgacactgtcctagctttgggcagcattatcgctgccgtggacgtcaacgacagaacgcattgtacttatttcgagagtgcaatgagccgtctgaacctgggttcactgggtaatccgagccttgaagttgtacagactttgggcctcatgggaggctggtactgccattacaccagccaaccgaatctcgcatattccctgatgggagcttccctgcggatggcgcttacattgggccttcaccgggagctgtgcgacggccgttccgtgcatgacccggcccaagcggcgcacgaggagttccgacggcgcgtctggtggtcactctgctgtctcgagatctggggtcaggagacgctggggaggcctgggatggacttcttcacggcaagcattacagtcaatacgcctcggttgatcgataaggtagctctctattctctagctctctcaaagaaaaatcctgattctaacatggctattgtggtataggacaactatatcgagatcgtaccgttgattgagaacgtcgagtttgtgaaggtcgcctcgaaaatccaggaatcgctagctacaccaccggctttgacgcatacagagatgtgcgacctggacacacaactcctgcaatggtggaacaatctgcctccgatcctcagggactccgagccgtaccccgagagcatctattccgtccgcacggtgatgcgatggagattgtatacccaacagatgctcctgtaccgccccagactcttgaaccagaccatgcgccgcattcctttcctcgctgtgcgagccgacgaacgcactgctatccgaaggtgtcgtgaactcgcagagacggtgatcctcgatatcgcccagacgacgagcatgaatcgcatgataggctggaacgctgtctggttcatattccaagcgacaatggttccgctgatctgtctctcgggcatccctgtagacaacgacctggaagcttcggctgactcttgcaaacgccaagtggagactgcaatcctggctcttcagcgaatgagaccttattcacccacggctggacggaccttcgaggtcatcgcgaatctctt

SEQ ID NO: 11105 - DNA, 1986 bp, Emericella nidulans
aatagaagactgaccgcgaaaatgcgttataagataccgaatagagtgatagaaacgctggttgaatagttagctaaagtgaagagtgtacgagtgacctagcaactgcggctacggatttcgctctaacaaaatgtgcataagtttagaaatacaaccttccccgcagaattctgctcaaacttactagaggaaaaggtattttagcctgaatgctgggtcacagtaggccagagccgccaattggtgggaatttggccagtaccctagttggtcactcagataccatcacggtatctctaaaaaagaatagagatctcaggttccacttcttcatcagaattactcagacagccataagatgctaaagacggcatttctaatccttacccttaccctaactttgttagcaaggcgtggagagttcccgcctcctacgctctgacaccttcccctaacaatcgtttcctccaagacgccagtggatctcccttcttctggcaggccgacacagcatggctactcttacatcgcctcaactacaccgaagccgagacctatctatccaaccaagcggccgaagggattaacgtcgtgctagccgtggggttcacgcagattggcattgacagtccgaaccggaacggcgatctcccatctaaagatgtagacgtaacagggctgaatgagcactattgggcgtatgtagatgagattatgatgctggcgtggagcaaggggatcagaatgtctggttccgagctggggaaagtttgtacacgataatcgtgcttagccatgtctcctccgttctcccgtctagcttgcgatgaagaagttaatggaacacaggcaacagccctggcgtgctaaacagcacaaccgcctacgacttcggacgtttcattggcagtcgtacccttacctctcctaagaccctcgtcggagacacaaacccataccgctgtaagggatgactacagcagaggcggcgcatcccaacgtatgaggtaatagactataaccccgtttatgacgcaatggtatacgggatcgtcaatggggagcgagaagcaatctcctctctgtcatcgaaaccactgctaaccatccatcccacaaaccattggttcagcggtggaccgctagctctcgcgtcggcgttcttcgaagatagttcatggcttactctagatgcaagccagtctggacatacggactatgcacctaactcgccgattccgtcgtggaattgccgaagaggttgggagactgttgagcggatgtatgccacgggaggaagaccggtgaacgataatgagcctcactacgagaatcggtataccaatgggaagagtgcgaatgtggtctggaatgcgagtgatgtgaggattgggagttggcaggctgtaagttgacacgcctctaggacaataactagcgagactgggtaggaatcctggctaattctgggaaaggtcttctctggagcagcagacgtgacatacggcgcaaactctatatagcaaatggcgattccgggtttgttcgcgtcagacgagacagggctcagcgattagtggatgagtgatctggttgtgccgggatcaggccagatgcaattcatccagaaggctgttttggatataagtagtagcacatataacgactgcatcccagcacaagatatcattgttggggacgctggagtgggtgatgcacgaataacgccaacgagggacagcgacggactctggattatggtatatacgcctacgggacagccctttgagattaccacgacagacttgaggtcttccaacattacggcgagctggtatgatctcttgagtggggagtataaaccttttcagtttcaacgttgctcagagaggaaaggaagcaaattgtttacacctcctactgcaaacggacaaacagaagaataatggtactcaggcactttgaacggtccatagatggcgc

SEQ ID NO: 11106 - DNA, 540 bp, Emericella nidulans
  unsure (1)..(540): unsure at all n locations
tggtgaacaagaagcgacgcggcgtattcattggcatagttaactttggaatgactattggagtctctttgggagcagtcctcgccgggttaatagtcccgaaacttggatgggtaagcttttcgcactttacaattgaggcccgagcctaacatagtgccattcagcgagttatattctgggtccaggcgccaacgggcttggtgctaggtcttatcttgtttttcgccattccgtcacatccagaagtcggatctggaaaaacaaaatcagcatctttagtgcagaggctaaagaatatagattatgcggggggattgaccttggtaagccctgagcatctgcacctcaaaatgcgggtggctattaactactcttaggcagngtctatcttccttctattattcagtctcgcttcccctaaaataccggttacaccgatcattttgtccttcgttggcttcgctgcattttggatcatcgagtcgagattcgcggctgaacccattgttcccaacgaagtactaaaggcgcccagcg

SEQ ID NO: 11107 - DNA, 113 bp, Emericella nidulans
  unsure (1)..(113): unsure at all n locations
acatatanagatatatacacacacacaagatagagatacacagacatacacacaanaagacacatacacacatatatagacatatatatacaacatacagatacatatacata

SEQ ID NO: 11108 - DNA, 278 bp, Emericella nidulans
cgtctggtcgatcgcgcgcctgtgcggccccccagacttcctgcgcgtgcgtttcccctggctcctcgaccacctcgaggggaccggctttcttccggtccgcttctctctctagcgcagtctcgcgactacataacatcgatctggcttcgaaaattgcaatccaccctttgtaattagccgcatggcccgaagttacggtcgtcactccttcgtggggggctcggtcgccgggcgtggtgcgtggtgtggtctttctgggatgttgctctggcggg

SEQ ID NO: 11109 - DNA, 1301 bp, Emericella nidulans
tctactgtctgcgagcctggcctggagttccgacgatccatccctgctgcgatgacaatcagttcctggtcgcccctccatcctggtactccagtcctcgagcctcaagtaagtaccgttaaaggcgtctttcctggagtagggcagggagaagtctggtacgattggacacacaaactgcagttgacgcccagccgggagtcaacacgacgatcgacgcgcccctcggccatataccggtctatgtccggggcggaagtatcctgccaatgcaagagcctgctttgacgacccgcgacgcccggaagacgccgtgggcactgttagtcgcactcggtaaagacggaacagcttcaggccatctatacctcgatgatggggagagtatccatccaaaggtgtcgcttaacgtcaaatttagggccacacagaccgccctaaccgtatcatccgaaggcgagtggaaagaagccaacccattggcgaatgtaaccattttaggtgtccttgaaaacccggtctcggtcacatctaacggacagcaagtgcctgcagaatatgacgcgcagtcgcggatcctggttattaccgggctgaaccaatttacaaacaatggtgcttgggggcaagattggacccttcggtggtgaagcggtttggtataggtggataagggccggagtcaccggtgtgatttagtttgaagtaccggtagtgaaatgcgactccagcaggtacattagggcgttcagaccaataatacttgggatgttccccgcactctgccggcttgcaaggttctccactgcacccctggtaatctcctggcgtcgtggttggactggcgtggccattctttgccaaccattgcagaaacctccgacaaagccggatacttgggggatgctcagctggtcggaggatacatgtgataaatatgggcaccccaccgtagtgttaggtgttgtagagtgtagaccatcaacaagatccttctgcaacgatgcggtcgccactctttctcttatttgcggcgacagtgctggctgcgacgcctgccgaatggcgctcgcagtcaatctactttttactcaccgaccggtttgcccgcaccgacaactcgacaaccgcgaatgtgatactagtgcagtggtgagccaactgaactaaatttgatttaaattagagactgacccttgcaaaagactgcggcggacatggagggaatcattaaccgctgactcctccagggatgggttaaacccttttttacccatgctgcattttagttggagattgga

SEQ ID NO: 11110 - DNA, 118 bp, Emericella nidulans
aaaaaaaccaccaaaaaaaacaaaaaaagacaaaaacaaagaaaagaagaaagcactccaccacggcaacaacaataaaaagagcaaaaaacagtccgagaacaaagtaaacgacgag

SEQ ID NO: 11111 - DNA, 1803 bp, Emericella nidulans
  unsure (1)..(1803): unsure at all n locations
ggccgcggctttcggtggagacaagtcgtgcaaaatgttgctggagatggacagatagcggggggagagcacgactgatgggcgagggagagaggaaggttaattgcggtcgacttcgctgcggggaaaggattagaagtggtggcttctgagtgaacgggcggcgacatggctgacaagcgccgagggaaggaagttggggtcgcagtgaggggcctgcgccangatattcgagcgactcgagtacgttgacgcagcatcactgctctgtcgaatgatgtcgagttggactggtaaagccgtggtggtcaatgtcaatctattctgtttgcactgtttgcagatgacttgccagtctaagcccttttcggttacgtttacttcgaccatgtgcaaggccatggcgttcgtcgaatatgttccatggatcacataatatacagagtgagttgttcgtcagtgagccatgaaataagtagctgcggagtagcttgagtgttatatcgagcctgcaatcgaggtcgagccgcgatctatatatccaccgctgccgagctatatacgaaatgagatgcttgcatgaatttagcagtgtcagtaattgggatattcagtgccaagcatggttagaacgtagttgatatctgtgaatagtgagcactattttgagtctcaatatattccaatcattggagcgtccagaagacgcaactgctattaccaaaaacagctcgtctattggatacagcacctacgaagtactcaatttttccaatgggatgttaagcttctcttggcaatagctgcccgtatgacaggaagtccgtaagtacttcccctcccacacttcagtatacgtcccagtatggttgtgctgacgattcgagggccggcatccctacgtcattagtcaaaattggatactggtattgtgcttgagggcgcggagccggagagctcagaagatatatccgggttgatctgttctcatattcttttcagattagaattactgcttcgtacattccctgataattgatatcttccttcaatgacagaaatagatattaaacagaaatggtaatagtcccggtgcggagaaatacaccgcccccgcgcactcgtatatacaacagtcaaattcaggagccacaacatatctagctcaccgtactaagatatggcgtccgcttagcataggagtaactgttttgaagagataaatgctgccgatatatatacgtttacgcaattgcccatgtgaagtcatgcagagtcgttacttgaattcaaatgttctatagccttcccaagcactcttaaccgaagatcccgtctttatatcgcatcaaacaaaggaaataaatcgcaaatctctaacgcccaatattatctacagacgctcaaagtagccctcgctctcgagcatgaggatgatctcatggacaatggaacgaacgctctgcttggaaacgtcgaccacaaggttggcgttggtgggggcctcgtaggggtcatcgacaccggtgaagcccttgatttcaccgcggcgggccttggcgtagataccgcgcttgtcagtggcctcacagtattcgaggggagtgttgacgtgaaccaagaagaaagagccaccggtgctctggacagcctcacgggccgccttgcaggagtgctcgtagggagcaatgggggcagcgataacaagcggcaccggcgcgggtgagttcacccgcgaccaaagcgatgcgctggaccttggtgtggccgtcctcacgactgaagcccagcttaaaggagagc

SEQ ID NO: 11112 - DNA, 2038 bp, Emericella nidulans
agaatcatttgccgtcagttgggatggaccagtagcagaatcgtggttcgcctcgttaagacgagcgtaacctggatctctgaggggtttgatcatttgctgggggtgcatgcattaagtagaattggagatcttgcctggcactgcaccacctccagcctgcctcgcttgaacttgatgccaatcacctcgttctttattgttgcacacgatcagactcgaccgctgcaaagctgcaaacatacccgtaaagatcaacggttgcctcatttaacgtgcttctgtaactgcatttctctgccgatgactcctttcccctccccctttaaatgagcaacgatcgtctaacaggagaaaagccaatatcaccatagcttcagagctgtacatcgtatccactaacgcatgcacggtatctgacccgaccttgaagcgaaaatcccccagcttacgtgcgtccacattcagagcccagtccgattggctcaacttgcctcagcagcacgacggacgattacaatgatttgggcctgagacactagctgttccttcaagtccagcttatcaatcctctgagcctgactcctgattgagcaggacgagaaccggggtcgcaacccgggccaagatacaaggatgagcctgagcctgagcctgagcctgagcctgagcctgagcctgagcctgagcccagcctgagcccggcctggctgagcctatgaggacagagccggctgagcgtacagagacagagctgaagttgagcacaattgcttcttcagaatgtttgctgactaccatgataagcaatgcaaatagaaaaagttcaatggaatcgcaattctgcctgcaagtgccagtgctagcgcggcctctatgtacaatactgggcagccgaggactgaccagccgactgcagcctggcgggacaaagcacagagcaagcaaggcaccgatgtgggtgcggatgggtgcggaaatgtacattcgcaggaccatgtcgactggtttaccagtagataaacaccggaaatcacggtgcgattgcatcatgaagatgccaaatccagcttggaaaccaatagaaaccagtttagaatacgttatccaagatttggtccttcgcaaaccaagataggtgataaggtgctggtgcctcgattcggtgagccgtaaatagtgatccgacagggagagtgaagatcatgagcaaacggtgcttgtcattatccagattgtttgcggagaaagctcctttcctccactagctctgccaccttttgctgcacgtttggttgcttttttatcattttcttatccccccttccctaaacgaagcccaatgctcgaaccaaattcgagactactgggatgacgaacggtctagtgactgacctgacccgagatcgaggcacgaatcgcatggcacgcgtgaggagaacatgaggaacacgacaagacaaagaaatgcaggccactgccaggtgggagtggaggcgaccctcagagtcaaagatggcggttggttgagcgaaagttatctgtcagatccgtcagtcccaggcgaacgattttctttgtttgggttcgaggtcagagttcagaccagcaggtcttattccgcagacagttcgagaacttcttagtgagagccagagagtccacaaaatgattcctgaccgactagagatgatgcccgttcgagttggcgatggggatgatcctcggtggatgggagagcatcgtgagcgaggtgaggatggggctcccttgcatcgtgttacctcacctgctcttcgtctgctgctcactgcccattattattattattattattattattgatcgttgttcttcttattatatcagcacatccgccctcgaccttctgactctttccctttcacctttaatcgtttcacctctctgcatcgagaaagagaccctatatacctctgaagggcccgtttgctgcagatggaagaaggcataagagctgagaccaaaaaaagccccccattctcgctctcgctctcat

SEQ ID NO: 11113 - DNA, 1000 bp, Emericella nidulans
ttggttttgaaccgcagtttgtatggtatatagaagagaagaacaactggtgccgccaggtattttgaaaagaaattgcgggcaagcatactcgccgacatggtttcatagtcgatcggcgcaaatccgacccagaattgggcaaccagaacaaggcagttaaaagcaaagcctatccacgagcctataattccgggttgggagcggaacgccaggtcatgcaggctgttgccctgtaccttccatgcgcgacgaaagcgtatgtgggctagacaaatggaaccccaggtaaatatagacgaaaggccagatatcgcgatcatccactcaaaagcgacctcttgcttgtcagtggcggctaaaaagcccagcaagcccatcgccgaggcaatacagatggcccacaaaggtcggcccttacggtcaatatagcctaggaaccgaggggcttgctgctgctctgcaagcgcagcaagagtccgagaagagccatacacagctgagttcccgacagacaaaacggcaatcatgatgacaacgttcatcacggaatctagcacttcgatcccagcatttttgatggcgatcacaaatggggatgccttggtgtcgacagtggaggttccgttgataagtcggggttcggtatagggaatcaaaagccccactagcgtgagggaaacaatgtaaaagagcgtaatccgccagaaaacctgtttgatggccgtcggtaaagacttgcgagggttggcagtttcggctgcagcaaggccaaccaactcggttcccgcaaatgcaaacccagcattaacaaatacatcacacagccctttgaagccatggtggaatgccccaggatcatgccagtatttgacacctatgtaactcccattttgacctccggcacagttcaagataacgcaaagtattctatccaaatgtcagttaccaaccctacaagagggtattcaggaattgggacaacccacataaaggatca

SEQ ID NO: 11114 - DNA, 752 bp, Emericella nidulans
acaaggaggtcacctcccgaggtgactggtacgccaagctgcctttcggtgctcctaaacgattgaggaacctcaaggcaagaatcgaagaaatggttgatgagtccgtgcagagagcagcacgcggcggcgttagtgatcttcctctgcaagaggcggccctgcaggcctctaacatggttggtacgtatttctttgtcatataaattcaccttgtcaaatatacagcggctgacctacctttttgcattcagattacgccatccgagccacagacaacaagggcgaaaagctacctaagtcaagtctcatctgggccctggttgttgctaccggcgctggattcacaacaaccagctcccttctctcttggctgatctacggcctcgtcacctaccccggcatgcaggaccggctcctgcaagagctagtcgaccacggcataacagaagacactgagctcacagccgacctaacagagaacctcccctttcttgacaagtatatcaaggaaatgcagcggcgccataacccttcctaccagccaggtcgaactgcgaaagtcgacctagtcctaccaggggggtacaagatcccaaaggacagcgttgtcattgctgcgctgcaccatatccacaataatccgagtatctgggataaccctcccggtttgacctgatcggtgggatacggatgaggtgaagcagcggcataaggcgtcgtatattccgtttgcgattgggctgagaatg

SEQ ID NO: 11115 - DNA, 1422 bp, Emericella nidulans
ctcaatggtagacgagtacaatggtatacaatacatatacgcgacctcaagctagggtaagaacgacgacttatttgtctaaatctcggcatgaaatcgtgtcgccatgataataatgcagatgatggatgagactagtacaaagcaggcaggtcctcggcgacgatcatctcattcacctacctaggtaggtataggttaagcaaaagcttagtggcggacaagccttgtcctagcgaggtagcattgcttatctccccctctccccacctctcttcttcctgaagcaatgattggcatctgggcttcatctcctgatcgccgttggagatcatgcccgttcctgtcttgaacggggacacggaggtaacctcaatctgtccaccgctgatcataggtcaccggctctcttctaccatgcgtttctccactgttgcaccgcttataaacgactgttccccttgatctggtgatgggaaggaataagaattaactttccgctctttccgctcgttccgctcgagaccgaaagacaggtttcgcaatgggggtcggtaatgtgctatatgctgctgctgtagctgtgtctttatgcacagactacgttgcagcatcatcgcctcatggccggtttggccagcgtgctcgcgactcggtcaatctggcgaagcgtgcttctcacctccataatgctactgcctctggaaaactccctaaatcggactttcggttcctgacggacaagacatcgcgtacgtataagtctcctctaaatattccaaaactacttttgtgctaaacgtatgccaaagcctttctcgtcgaccatcttcccgacgtgcacttcgacgtgggtgaactctattcggggctgattcctatcgagaagggcaacgattcgcgcgctctgttcttcgccttccagccgaaactcggcgatcccgttgacgaagtcaccatctggctaaacggcgggccggggtgtagttcgcttgaaggcttctttcaggagaacggccgcttcttgtggctgccgggcacctaccagccggtggagaatccgtattcgtgggtgaatctgacgaatgttttgtggtacgcacctcttttgtccctggattcacgtgcaagtgtatgttctggagaattatagtatagggctaagatgttgaatgctgttatagggtcgaccagcccgtcgggacgggcttctcggtcggtaaaccgacagccatttcacaggaggagaccgctgaggatttcgtcaaattcttcaagaacttccaacagacgtttgggatcaagaatttcaagatctacgtcaccggcgagactacgcggggcgatacgtaccctacgtgagcgctgctatgctcgatcagaatgacaccgaatattacgatctagctggtcagtctcacc

SEQ ID NO: 11116 - DNA, 1958 bp, Emericella nidulans
aaatataaaggagaaataaaaaaggcgtgcttcgagaataatgacctaattaacggtatcagatacgtcttagcggaccgcagggtagatcaacttgacactaatggcataccaagatttgcctaaattaaagatgatgccattgcgcagccacgcaatatataaagatagggttatatgccaggatcgcagtcttctatgtgacggctagtccgtaaggtacaggacaggatacgtagcaaacccgctcgacatttgacactctgaacctaatacaaataccctaaggggtagccataccatggttattgtaatttacctcgtctcatcctcaagcatactgttcaatgggctcaggcgcagctcagtgtaggctcaggtgtaggctcaggcaacgagcctaaggatattctttgtaaataccagaccgtactggcgtacgcgtatcgtattactccgtagttgggcggtagattaccagccacaaactaccggagagtaacagtatcgttacctagcattggacagaagctgccgggctactgacaatgacttattacctggttaatgctccccatatcctcataagtaaattttttatgcatactgaatcattaaatacttattacgtaactcgttcagccctattggcgcatatctaaggccaagtcgacagaaagtagacatggcagtaattgcaggatggtataggaatacaagaaagcttacacgtgatagcacatcgatctctctagaagaggccgctaagacaaaagttccagcccccaagtaaaataatcccaatcacaccaatacaaattcccgtccccattcacggagtctggggagccgagatcccgactcggtgccgatccgcccgcgacttagctgtgtattaaagaagacctggcgtcagcccacgcatctcgctgactttcaagcttgcctcaaaccagcgaccagctgacaacgcctgcactgcacttcagatcgcatttttcagcttgaaagatggccctcttaaccactctggggctcactctcgggctcacctccacgcccccgggactgacagtccctaacctaggcccagcggcactggcgttcaacttcatcttcgcctacgggctgctctccagccgcactctcaagccatactatgggatcgaccacaacgtttcgccgcgcgaggacatcgccaagtacggcgacgccgcggtgcagtccggcaagatctcgaaaaagacactggacataatcaagcgcaacgagagcgcgcatgccaacgcggtcgagaactacgcgcttctggttggagcggtcgcgatggcgacggtggctggagttcagagggtcagtattaaccgggccgtggtgttgtatacgcttgcgaggacggcgtatgcgattgtctatatcactattgatactccaaagttgtcgcacctcagaggagtgtgctggtgggtgggcaatctatgctgcttgaatctgctgaggaaggcagcctcattgatggggatggagtagggagacgtctgccatatgtaggtagaacggcgaatcgacatctggttattgatcactcggagaatttacaaggtgatgtttcaatatagaaaggggaggaaggggatggaaggggccaagggtctggattcttcctactcggcatatatatgccatcgccttgatttccgtcaaattacagttctcttatttgggctgcccggtcctcaaggtcgctttcagagtagcttctgtgaccgctggctggtcgagctggatttggcgctgttcaatcaacctcgtcaaattcgggacgaagcactttgacagccggtcagaaatacgttattgcaaagtagcgacctcaaatactcttaaagcagggggattgtaaatggtagctgcatgataggcagagcgagcatacgagaaagactattgataggatg

SEQ ID NO: 11117 - DNA, 122 bp, Emericella nidulans
caaaaaaaaaaaaaaataaaaaagaagataaaaaaaaaaaaaaataaatacccaaggaaggactccgggaaaaatctaaggagcacgtaaagaagcgaatgcagataagtttacagctgcaa

SEQ ID NO: 11118 - DNA, 2229 bp, Emericella nidulans
aagcgggattgccagactgttatggtctgttgactggagtatgtagctgcctgcggctgaacaaaccgtgttattttcggccggctcgaatacgccagacatggtcgagaaaggagacgtacgttcgtccgtttcccttggaacttctttgccgtggactgaccggccagacggcttgaattgctggagagacgtgttgaccagctgctgggacagtcgtcgcagagccatagtccattagaggtaaaggccggcgatgtcatcgacaaaggccttctctcgctggacgaggccgctgcgctccttgcctcgttcatgcaatccatgatgccaaatttcccttttgttgtgcttcccgcaacgacaactgcagatcaacttcgccagagcgccccattcctcttcctggccattctttccgtctctgtgaccaacgattcgacgctgaagcgggctctcagggaggaagtgagagctgccttggccgagcgaacagtccttatgcatcaaccgccctctttggagacactacaagggcttctggttgttcttgcgtggtatgaggcgcccattagacccggttgactacactgactagactgacccctcgaactcaggacccagcaccaggtccggcagcgatcttccccccgggactttccaacctacctacatctggctattggtctcgtggtaacctggcgattagaccagcctatcgggatgcggagacgtcagacctgccgggtgaacatcagcgaggaaggtatcatagagcgtccgcctgagaccctcagagccgagcagagagctgcaatcggttgttcttttctttcatcatggtatttcccgtgctcggacagatctgtatcggttgagcctaagcttacactgtctagttctgccatcattacgcaggagaggtgcacctttccctgggctccagagctagaggatttcgctgttggactcgccgagaatcccgagtacgatagcgaccagattatcatccatctcgtccgattgcagcacgttcttgaggagattgaccgggtctccaaggatccggactcgttcgagaccgtccattccggccgcgctttccacccctcgttccgtacattcaaggcccgaactcaagactactcaaacctcctttctcccaaacttgcgggcaactgtaagcgttcttcttcatgatttcatttgtcctccgcccgtccgcgactgacgatctccagtcaccctttcaacccaactccacacaattcacctctacctctgtcaagtcggcctcttcgatcgcaaagctacatcgcggctccccgtcgacgtccgagcggagatcctctgccacggcctcacggccgccaaaagcttcttcacttcctttgcgttgatcggcccaggggcagagcgtcgcttcagttactcgcagtggcttcagtcggggtttaaccttatcgtctcttgcaagctaacattgatggctgtgtccgatgaagccctccgagacagtttcccacaagtgctgacgctgtgcaatgagctggatatgcctcaggtattgaggatatgtgtagtccgccaggatcagcattcgtcttacagcggagcagcgccccccgcaacaggttttgactacaagggctggctacagtggatagaggagtggttcttacggcagtataatggatatattgcgcgccgcgaggctgcagacagggctgtaactgccgcatcgtctgcgccggtcgccccccaagcgtattttggtgtagacgagccaaacacgggacatatttatcttccagcatctgccagtagtatgctgtttgatccattccctgattttgtcatggctgataatccgctgttaggatggatggatctgagacagttgcctatgtgaccgttgcagcttgtgctatggtacttgatatatgcatcaaccgccgtctttgaagacactggaagggctgctggtctgacttgtgttcacttcaaatatcataactgaaagctgtgaaatattgggatagaaatcataattcatgaggctgagtatggaaaccaaaatatacttccgctcaagtagcctggaattatgtaaatcgcagaaggcacattaaacgaaacccgaataacgcgcgagataaagcattatactatctatactatgcaagccattaacgatgtcgtcaatacctgcaggtaagccatcagaag

SEQ ID NO: 11119 - DNA, 1215 bp, Emericella nidulans
aggaagcccatgcctcccagtaagttaatataatatagatttagagcctttttatcggcacgtgcactacttggcctaaatgtgtagatctcaaacgcgtctatagtcgcgctataaaaccaaaggaggcgttcgatagactcctagatgataatctcaggaagacgaacaattccattttccttttgagcccttgctcagtctcaatagaagttgagtgtggagcgtggcagacgcgtgggagaacacgctattccgcatccactgtctgtatctggatggcttcaaatcactccgcggtctttccaccacgcgtcaacctcatccctcccctcaccaccttgattccccttcagctgccgcacggatccctttctccaaccgtgcattctctctatacccgcttaaatatcttctcattcaatttccagtccacaattgctgcgcgagtttctgccgttgtccttccgggaatacttcacgcgcctcctcacattgaaccgggttaccctcaatttgcattttcctcctaaggatacattcgtaatgtatcaatcatccctccgccagagtcccgtcaaagaaggccggcggatactcagcgagaagaacgccaacgcgtgcctctcgcccgcacgctcgccagccaaacaaacgctccttaacgccccgtctccttcacccaagaaactcctgccgtcacctctatttgcgccttcgtttgttgcccaaaaacgctctactactgaggtggacgcggaagacgccggctctcaactgccagagtctggtaatgaacggcgcgttgatataggccatgaatccgacgcgatgagcatagatgtctctgaacagacaagacagcaggaaggggaacaaggagacatcgcaacatcgaggaccgtcccatctgaccctgaaacgcgaaaacaattcatacaagaggtgcgtgcacaccctctatttacaacggctaatactaacaaatattagaaagcaaccctcctccgcagcagacttcaaaacgccatgcggcgcgttcgagatccccaatttgatcgccgcctatcagagctcgaagaacacagtcggaaatgccctcgactctcagcgccagctactaaaccgcccggcggagttggtctgcaacaacatctagagcagaagtacaggacggaaggaaccggaacgagagtacaagctaagaaaataaca

SEQ ID NO: 11120 - DNA, 452 bp, Emericella nidulans
atcggtatagggtcggctctcgccatccctagcgctatctcctacaataagacaagctgtaaccacgtgaacaattggatataaacccaggtattgtacgagttgtcctgggctgggtcttgcaagtgaacggcggctaacagacaatcctgctttccatcaatcacacgctatgcacaggctcttcgctccaagagcgccggcatccataaccgtctcggtatatgcgaacttgatgcctctctctgtcagtctctcgaggactagctcccggtagagctcatgtctcagaacaccgccggaaaggatcagccctgtccgctctggtgcgacggctgattgagacctgggatcgatcagccgtcccagaaccgtatccactagcgctttcacctgtgatgtgacaatggtcatcgcggtacgtcctccggcgccaggttcacaaccagttg

SEQ ID NO: 11121 - DNA, 1449 bp, Emericella nidulans
cgtgacagcatatgagtaagtggggcacgagtccagtgagagagatcataacgtgtgtgtgtgtgtgacatggcgagtagaggaggtaagtgaggtgattatgatctgccgtaactctaactcagcgatgtacgatatatcaggtgacgacgagtgtactgcgatcggctttgatattaagcagtatgcgactagatacggatgcagagtagttctcgtgtgtcagatgctgtcaaggaagacgctggagtaaacatgtgagctggccgcgtcgggcgacgacattgatggtcggtatataggaggttaccgtccgaaagtatgagaggcggtggcacaattgatgagctagacattcacagaggagcggattacggcaacgcgcacggggggtcgttatgttagggcacaggagagatagatgggttggatgagcgaggtgattagctgatttgagcagcaaggggagagcttgagggaagaggttacggaatggcagggaacgcatgacgggaggagagtctccggttcgggctcgtcgttcttcataaagagcaagtcctggccgatgcgtaggagcagggacttttcggcttcgtagcctctgttgaacactggtggcgccagctctagctgccctggctaccacaactgtaagatcccagcacgctcgtttttactctcgcctcgcactgacacccgacagcactacagcgacggtctgcaaggtgcctgcggctgtgggaataagataggcacctatgactggtcttacggcatcgcgaacaaagtctacacagccgccgcaaaccaagcccttttcgacagcggccctaatgacgcaacccactggtgcggcaatggatgcggcaaatgctacagactgacatctaccggtgtatcgacatgcgagacctgcggcgctggcggcgaacaaggaaagtctatcgtcgtcatggtcacgaatctgtgcccgttcaagggcaacgagcgctggtgcccgaatcccggtcagctaaacccccacggctacgcataccatttcgacatcatgggcggcgccggcgttttcggtgacaacgtcgtggtggagtttgaggaggttccttgccctggcgacgcagcttttaagtgggcggcctgcgaatgtcatcccaacttgaggaacaaggatttgactttgaatgccggtgcacatgctgctggatcgaagattgttggacctgctcaggctgctatcatctctgtcaacgggcttccggcacctgctgctatggcggttcagcctccaccccctccagccccacctgcgcctgcccggcctgctatcgagatccccccgcctccagctcctgtctaggtcgacggggtacggttgattttgcctttttagattgaagaattgtctaaagttgagttgagcggcatatttcagtatcttggcacaga

SEQ ID NO: 11122 - DNA, 2190 bp, Emericella nidulans
atagtctacatgattgatattggcccgtactgaattatatacacaaattggatatctgggcagaatgtcgtactcagctgaagtctgacaatccaaaccaatttctcccgagcacttccactagatgacgggatgctgttcaggtcaaagttggatcaagggacggacccttgccctgatggcctactgaagatgcctgagtgtgctggacagattttgggctctgtctcacaggttgagtgacattcttatgacaggccggggccgtcatgatgtcggtgcatatttctagcgccagctgcgacagtcctgagaatcggaatgcacttcgcaaatgaggcaggataacacgagtcgacgagtcccggcaggcagagttctccttttttccctagaaattgttcagccgccattttctcggagcctagccaatgccgccgcgattccttcatccatatcttcaccctgcgcttttgtctgcggactgcttcgttcattttgttccacaaacaggctatcgtcctcagtgccgcgaggtgcctccggcgtagcagatgatgctgcaccgtcatcatttgtgcttaatgcggctaaatcccgcacagtccgcttaggagcggttgctcttttcgccttttccacgcggaattcctctcgcacggcattgcaccacgctctaactttcttctcgccccatcccggcacagcgctgatctgctctggctgggcgttaattgcgttctgtaagctgccgaatgtggatataagactggcagcatcggatttgttgatgcttcggggcgcagtgacaaactcaaccagcgagtctttgtaggattgtgcttgttgtgtgcgtatagcagtgggctgggaatgttcgcatgacttaaagagttccaggtagtgcgcggcttccggggcggaccagcacaagataagggtgaggttgttgatgatcgacgtcttggatagctctttaagagggtcttcgtggtttgggatatcaacgataatcaacagcacacggagtaaatacttccccgctagctgtttgattcgcgaatagatgtactcaggatggagtcggtggtatttaagggacaagaagagggcgcaggtggttgcgccgatgacatagtcggctggaatgtcggcgtactcccacggctgaaatttgatgtgattcaggatcggatttcctttttgacgcgttgagactagtatcgcggagggaccagatttgcttgcgagagcttgtggcttcggctgctggactttcgcggttgccgcgccggactgaggtgtggaggttgcagagcgagacataccagctatattggtatcaactgccggcttgaaggcatcgtcaccaacaatatctccagccattgctggctcagaagtgttagggctgaggatggatgactgcgatgagctgctacatatgtatgagcgttatctaatcgtagatccgccttcagctcccagacccaccctcaaaatcaaatgggatttttctgccgcgattttttctccagaaacaaagttgcgaacactcaggatgtctgaatcaaacagtccggaaaagcctactgaggcttccggcgctatcacagagtcttcatctagcaaaaataatgtccaagaagatggtgccacgcaaccccgcagagaattgttcattagatcgcttcctgcctcagcaacgaatgagagcctcgccgaacatttttcgcagtcctacgtgattaagcatgcagttgttgtcgtcgacccaaagacaaagcagtctaaggggtacggttttgtgacgttcgcggacgtggaggatgccaaggctgcgctggaagaattgaacgggtcgacattcgaaggaaagaaaatcaaagtcgaatatgcgcagcctcggcaccgagttgttgatgagactgttgggaagagtgtaccatccgctgaggcactggagcgcaagaaacagagggagcagcaaaaggccgatacgcagcccccaaagctgattgtacgaaatctgccgtggagtatcaaaacgcccgaagatctcgcggcgcacatccggagctttggaaaggtcaaatacgttactcttccgaagaaggggagacagttggcaggctttggatttgttgtgcgtcgaggaaagaaaaatgcggaagcacctcaggaagctgt

SEQ ID NO: 11123 - DNA, 439 bp, Emericella nidulans
tttttgcacgtgatactatcccacttttttacttttatgctaacctacttatcccatgggagcccttccaaaactcactggggtatcccctcccactcttaacgacttacatccacaaatcagctattcccttcataacgtcaagcccccactcctcactattatctccaccttaacgaccctctggaccccaacacccaactgaaacctccccatcagatgcttattaactccctaaactaccattatgaatcatcccctttgtccaaaatgtttctaacattgtatagctataagtacccattccatatggcgaacgtactaaaacgacttaccccgcattaagctgcttattaccctttactcttaccacttgcccctgtccactaagcactaatacgcgaatgccaatacctaaacctatttaaccttcatttct

SEQ ID NO: 11124 - DNA, 475 bp, Emericella nidulans
ctaactcctgcgatgtcgggaactttattgactggctattgcctctgccgtactggcggggtccttgcatgcgtggggggggacgcaacaatcggcccttatcatgcagaatcaccgtatgaaactagttgaccgttagctcgactctaactcaatgccggacacaataggtttgcatgccatgcattcatggcaatacctgccgcatataccacgcactgtccctgacgcgaggtcaccgcttgactaaagctgtatgtgcatccatagattgttatgcactgtcggtattaccggtctacactgctagacacggtgtacggtccaggacatcgatgtcctctttacggtctaaaccctaaggaatcggcatatttgggcaccggcactatggcgctgtatcaggagcagctattcctgcactttatagcccccggacgacgctttcgctgagcccgggagcgaataagctttt

SEQ ID NO: 11125 - DNA, 161 bp, Emericella nidulans
cgcatcgagatcgactctactcgtctcgccgtactcaatgctgccaacatgcatgaacatctagatgcaaaacacgctctccaggagtttgctggagtcgtggagccagtacctcggatgtaccatgcaattatagaccgtgcgcactgggcatatggcgc

SEQ ID NO: 11126 - DNA, 1803 bp, Emericella nidulans
tagacaactctctgagcaagctgcctcgactgagtcatttctcctgtccaatgtgaataggcaagctgataaacgagactttttgacttcttttaagaaggtgatcatggcaccggtaaacatccttccgagcttctcaaacaagtccagcgaacaacaaaagcctgaccgtgattccctggccggcgactctggttccacgccgagggcaaaccgattttccacgatttcttcgcctgggacccccccaattcaagaggctcctactacagaacttgcagcgaaggcggccattatgaagtccaaattggagggcattcggtctttgttcagcatcgaagtcgctttagggctggttcatgcagctaaatcgagcctggagcgtgcggcacggtttatggcaatcgggggggagacgggcgcacggtcaaacagcagtgcgaggctatatttgtcgctctcctgcgcatcctaggccacggtcacctaattaaaggttttgacaaggcggtcgaccatctttcagactaccggcctcgcgagcaaggcgatcgtgatcaatccggcgtcgagccgttagtaacatttctcgagctcgtgaatgtcggtgacctcattcttcagatgattgatgtcttctacgagcaggagatgattggatcgaatatcactgatcgaaatgactttttggatccagcggtgaaagagaagaagaagtttgagcagaatcttgacgaacgtgttgcggctgggttgaacaagggaatcgatgtcttgatggaggaggtggattatatccttgccacaagacagctcgcaaccgacttcaacccggatgtctctactgacccgcaccgaaaaaccatggatgtaagcgttaccgaagccgcagccgcagtggtggatgtcgtttcatcgcatacgcagatgctcgtcgggagcacagacaagagtactcttgatgtgttcaaccaggaggttggattgcgtctctttactgctctttgtaagcatctgaagcgccagagaatcagtatcgaaggatccttgaagctgatcaggagcgctctcagctgtatttatttcggctattgctaacgataacaagtgacatgaaccactacttcaagttcatccagagactcaaaaacaacgagctgctcatctactttaaggccttccgagagctatcaccagatttacctcatcgattcggccgatgcaaaggaactagccaacttcattgctgatgcaggccggttctctggtatttggcgagtggaagaagtgtaccagttctcggagaggcgagcagattggtaccaaatcaagcgcgatgtttgacgagctatgtttggaattgggtgcaatgttatggtgatgccacaaccgcttatggctttattaaaattattcccaccagtgaaagaacatagcacttcacgggatatctgcttgctttgtggtttgggtgaattcaccttgccgtcatgggctgctacctcgccattgaaatgaactctttccttcatcttagcggatgcgcagggcttttctgctgcagtcttaagaaggctgtcttttaagccccccttaaatgcgttccgcttaatttctcgcaactaactttactccatcttctcctccaaggcttctctgattctcttacaagggccaaccacagtctcattttcttttctcgcttcataaactctccccataatcttctcccttcctttttaccgtcttattacatctcttctctctaactatcatctcattccatattatctctctttctcc

SEQ ID NO: 11127 - DNA, 551 bp, Emericella nidulans
aagataaagagggcaaggagaaaatatagtacaaaacaaagaacaccctccaagacggaaggctgttgttgaggacaccgtgtgagaaacaagtcaattatatgaatataatatctcatctaaaaaacataccaaatatttccatacataaaaaaccctcacattaataaatttaaatccttcacccaccaataataaccatcactctaacaaattaacctattaattaattcccctaaatagctacatcctaaataattttaatcgctcttttatataaatataaataatataaaaccatattatatatgtcactaaactaaaaactactcacatacatacacactataccgctctaaaaaactacacccattacaatacataaatacataaatacctaacttcaatcccaaatacattttaaaataaaagatcctactactatgactatacacataattataaaaaattaaatcacaaatccaatattttcattatatacaaaacctactaaaattcatatacctttaatataacacactactaaatta

SEQ ID NO: 11128 - DNA, 395 bp, Emericella nidulans
tatcagggcacttatcatcagggcggacaatcatgaccagtaaaatagcgtaataaaagatagaactaaggaaatataaaaacaagtctgtgcgagtaaaattattcttgatcggcgccagactggggaccttgtgagggcttagggctgagaagcggtattaggcataggaacagcgattatagcttgctgactggccgttgactcgctaatttcatcacttctcgtctacatccggccctctgacgtctgtcctcgtttgcttgaggtgagaggcacgcagaatgctgttctgcgtgctgtccggtcgagcctgtgtcgtcttgaagacggtcggggtgcccgtctcttcgagctcgactccgttgtgcatcatctgctgcgttccctttgcg

SEQ ID NO: 11129 - DNA, 516 bp, Emericella nidulans
atactcccagcatgctcatccatatagtagttatgacgctagacagctttggatctagggttaatactgcacacaagacccatatcaccgttccctatccaaaacaagaaatacacatgacccagcacaaatgctttaaaaatacatctcctcccaaaaaccaccactataatacaactaccataataattacctccttcaatatataataacacaactacaatttcaaaacaccacaacttaatctaactattaacacacaatccctataaaaaaataaagatcaacaccaattatcacaacccctacccacaaattgtacaaataaatactacatctcaaataataaaaacctatactctataaaattaatttacactctatcaaccatttcctataacataaacacaatatcaacataatcataactacatctccccacctatatatcactaataacctaaaatcatacatacatactaatcgatcaacataacaacctcactatacaaaact

SEQ ID NO: 11130 - DNA, 2488 bp, Emericella nidulans
agaatcaaccgtccgtccccccgaaccctcgaggagtctctcaattcccgcaacaatccgctcacgttcagaagccgcctccacaaagagtacaactatttgaataaacgcgtccaccatcgaccgcggaatcgcccggctatctaccccggccaaaccctcacgaatactccggacatgccgcagaaccatatccaaaggaatagctaatacgttgatatggtactcctccaagattttcatttggtactccagtggtgcgatatgatcgatcttgctatcagtggccatgctgcggctgctaaagcgaaatgtttcgagcaccgcggatatggcggcccatattttccccttgacaatgcactcgtgctcgcgcgcaatgaattcgtccaggaggtctgataccccgcgcacgaaagtgcggaggaggtcgaggatataattgtttacgtgtaggtgtcgcgtaagtggaggagttgggaatcaacaatggatctagttttcagagggatggcgttgtaggttctgtttaagacttttgtcgatgcttttgtcgtttgtgggaaataagaagaggattttttgttgtttgtgtggaagagcatgtgccggtgtatgtaggcgaggagggattccattcgacgagtcgattccgcctcatcggaattcgatgatgcttcttcagaggctttcttcccaatagaccacttgaagacaggaagtggcttttcttgctcttgttttttgtctcttttcgtggccgactgagcgccggggccggggccgtccgcctgtgcgaccccgacagcaccacttgctccctgggccagaccatggctctctccgtcctccttctctgccttgaattggtttctaattgcatcgagaacgaactgcggtgggaaataatatgggtcgatatactggtagggatggtcgttatcataatttctgaaccctgcgctgcggtaccgtcgcacccgatgcttcacggagctgggaaaacggcgggagaaaggattgcgaaggccatcagcatcatcatcgccggcgtacttgctctgtgttgtcgctattgtgcggcttcgtcgttcgcgatgctctcgcatccgctcgtccagtttcttcagggtgtcggagatgccggaagggtagcgtggttcaggggtttctgcggataaactacttggtgatgtagttggctcagtgggctctttgcggcgcgggatgtgctctggaggaggcgaggcgatgattgcaaggagcgggttgttgtcaccgtgagcctcccagagtgagcgccacgcgggcatctattgtactgccgtcgactttgagtgagtagacccaatttcttgtgtctattgaggtattctcgggagctacgctgctcagcatgacttgcacttgatagagaaatcccttgtgtggtgatgagtgtccaactccgcgggcatggcaaccgagtactgataggattactcacagaccacactccacacttcctgagctcaaggcaaaaaacaaagccccacggtgtcgtgatgcgaactgtcggtgggaaagccgtctgttctccaatggcgcggagggcaatgcaaggagatgccgacggtgacctctggccatcaaaccagcggcgtcggcgcgcatgtcgcgacaaagttgtgcccaatactcaacacccacagctgcgggacgtggatgacttgcttaatgggtctgtatagccgtcgaattcgctgctggtcctcgcgcatcatggatgagtagaggtggtagccggattgcaccagtggttggacccagtggactttattacgagacatgatggcgcgctgtggcgggcgctgtgcatcgtgtagtaagaagtagggaattgcgatgaaagtcactcggacttcttcctccttgctgccgttgcgtgctgggagacgaacttttgtcgaggcggggacgggactgaaccgtccgccgcgaaaagcggattgctcagaaagttccaggaatcgatcgaagaatttgaagatggttttctgcgtatgcggctcagtgaggccgtatgcttccagcgcgcgcccaaggaaggcactgaactccatcccgtagtcattgtttgatacgtgcagcaatcgtagctgttccggtggttcaatctttgtggtcgtgtcaatcgacttaacccccagtagcaaacctggtagctcatctactgagcctgaagggtcattctctggtaggggtaggcgagcggttgcttcaaccgagatcaggctctcttttgaagagttcccaggataatctccaggaacaaccagttcgatcttggaatcctggttttgattcaagtatcgaggaacggggcattggggcgacatttttagcccgtaaacacgttcacaacggcagatgcggttttcaaaagaagaaagaaggtagtgcgcgggggcctggcaccaccacgtgccagggagagtggcgggcgcga

SEQ ID NO: 11131 - DNA, 511 bp, Emericella nidulans
gcaattgtgaaaacagggatcctgctggtgtattaaagttaaacgtaccacaggtctccaataagggtaccagatggtgcaacatacaaactatcagtaaaaatattaaaagcctcactcacagactgaaagacattcagtactgctgttaattctgctaattgagctgataggccaggagtctttatgattacctgttgattataagaaatccagctcgctctttagaggagccatcagtaaacaccagaacagcattgtgtaagggttctaaagaggtcatattaggaaatatcacctcatgtacattcaaaacttttatcaatctatcttgaaggtagtggctgtctatagttcctttaaaccctatttgagcaagcaaccaatctgtactgtgctgtttcagccaagtgtcttgacctatgctgtaaggctgaacaataatatctggctctttgccaaaataagttagtgcctgcttccttccaaggataatcatctgagttactgc

SEQ ID NO: 11132 - DNA, 1735 bp, Emericella nidulans
ccatgtggaatgatggattatgagctgtccggcgttgtgaagcgatgctaagtatagaggattggcgacctcctccgttctgcatttgttgatgaccggtagcccagtgcgattccgaagaaggcgttcccagtatgcattcgagtcgattaccaccctgaccggcttgaggatacggttgcaatgtctgaagcattgaaggggccctcatgtccagattctgcgactgtgttgatccctgattcttctttctggcgttcttccgtggtttagcagtagcctttctcatggctccagcactctgctgctgcttcctcgattgagggttgttctgtgacccgcttctcgtttttgatgcggtggtatctgaagctgctctctccgcactccgtgcttgtctgccaacttttatgtcatcgcccttcttcttatttcctctctggttactctcagattgattcatcttctcgcgggggttatcgacaagtctttgcaggaaagtcggtcgtaaagccgacaagaagctcgttttgcggcagtgcaagcactcaatcatcgcagccattctcagcttgaaattgccgtggaactgcgtgccactggagagggggccttctgtgcaccgttttatcatgagttcctattggatagtggatcagtaaagtgctgatctagactcctcccgtggcaacttaccacgacctcccagcagaataactcgatttctttggccttgctctcccaatctttgataaatttctgtagggtctttggattgtcggtggaatattccacgtcggtgatgatagtgaataacacttttaccaatgcccgtttctgggccacggttcgcggtatggtgtcgtcgtgcttagggcgtacgactttagattccatttctcgccttgcctcctcaatcgacctccagatggttgaggccgatttgagggtttcaatgtgaagggctgcatctaccacaagctcgtagcttttctttctatcagctatgttgggaattccctcttcgtcgacagtgttcgttatgcgtctaagtgccgcctcaatatcttcgtcatgagtcgcctgtgtgctagtaggtgtgaaagtttcctgttcttttccgcagtctgccacaagagtcaaaaccgtaccagcatcggtgaaagtatcacaatgatcgtcatcttcgcggccatcttcgcggtcagtgtcttcctcgtcatcatcgtcctcataataacgatccttcggcggcggttgacgatggtactcgcctgactcaagatcttgaaggtcaatgagtcgcaatctagcgtttagcagaagttctcgacagttgagagcggcaggatgatcgatctgagcgtcgtaattaccacgtacgagcgcattcggagaggtagcattgctatacgcaaaaaaagctctattgatttttctcagagcgtcataaatctcatatttagcaaccatgccgacatccgagtctccttggtggatacgtagcgctgaggaagagttaacgtcttgaggctccggtgttctagcgtccgtggcatcaactggagtgggagcatcagaagtgaggcctggtatctgagacaacgtagaagaggtgctggccgttgcttccgtgttattatgggaaacatagggcccaagtttaggaccatcatctggaagattcgtgatatcgttgtgtggaaaatcgttttcacccgaattatgcggagga

SEQ ID NO: 11133 - DNA, 965 bp, Emericella nidulans
cttgggaccccaatgctggcacagatataaagagcaaccccggccctccacgtcactgagaagtgacccgcgctgatcaggttgatttggacctggactgacaactgactggttactgactgattactggactgtttggagggacgtcagttcgttttatttccgttcttgatactgtctcgccacctcccccaatcagcttgccctccattggccaaacgcctaaaaaaactacattccagtttatatctacacagattattcaagcaaaggccaccatggccggcggccctaagcaacccctcaacgtcttccgcctcaatctgggcggcgcgcccaaggaagtcctcaactggcggctatggttcgccgtgctctcgttcgggctcatgggcgccgcccgcggtgtcgatgaaggcctgatcaccggcgccttcgactcggtcgatttccagcgcactatcgactatgagtcgtacagcgccgtcgagcaggccaacatcaaggccaacgtcacggcgatggtgcagctgggcagtgtcggcggcgccttgttcgccttccttgtctgcgatcgcattggccgcatctgggcagcaagagtgctctgtatgctctgggtgctgggaatcgcaatcttcatgggtcatggacatagcttgggtgccgtctatgcgggacggcttatcgctggtttcggggtcggccagacggtcgttgttgggccggtctatctttcagagattgtatgttcttccctctatactcttcgtcggccatccagcatcgtctctaacagttggtcttattctgctttacaggcgcccgctcaggtccgtggtctctgtacgtgcatcttcaccggcttcgtgtacctgggcatcgtgctcgcgtactttgcaaactatgggtgtgaggtgaacatgggcgataacacacataagcgctgggtaactgatttcctc

SEQ ID NO: 11134 - DNA, 644 bp, Emericella nidulans
  unsure (1)..(644): unsure at all n locations
gtccggtttcttttgtaatatatgctgaatgaggtctgatgtatcagttctgacatggggtgtttttaaaatattcaaccttatatatcaaattaatacataaatctataacactaaacaatacaaatataattatcataatctatatataattatataatatcaaataatttttataatttaataaaataatatacacccatttcattatttctctatccataaaaataataataactaacttataattataaaaaaataacatttatcactacctacaatttaattaatttatatataatacatattttacaaataaatatctactacactcatcttaataaaataaaatatttatactatatttaatatacaattaataaaaatacttacactaattatataattaacctaatctaatacattacctaaattaacctacttatacattgtaaatttattaattttaaatattaattnatatcattatatcacaaacatacaatcaacatatattatctaatttaatctaacattaatatttactattctactataacaacaataataatatacatactatatctctatattttacttatacttataataatttattaatcatattatcattacaaaacatt

SEQ ID NO: 11135 - DNA, 822 bp, Emericella nidulans
attcaggcctacctttcaggccggggaattcaataccgcgcgtcattattgactcatggctcagcagaaggcctgagaagccttgcggtgctacctggccactgcatcccggatataactgtgcagaactatatgacaggtagagctagcaacttgcatagttggatcatggctgatgggggatggtccgttattttctgggccagcgatctctcgtgcgcttcgagagtggagaacatccacaattgttgcaagcaagtcgagagtataagagcaaagacatcttcaaaggtggggtatatgttagatgctttcttgattcactgcaacgaatggccaagcgtagacttggccgcccttccaggcttgttcttacctcccagcaagtacggctgtctagactacggcaaaatatttgtgagagaagaaacagcaagttgcaagtctgaaaggatgaacaatctaggtggcattgcagttgttcgtccagataagtatgttggttgggtgggtggtttggatgatatggtcggtctaggactatattttagcaagatatttctctagccgtgaaaatactgcatagattgatatgtcaaagctctgaaaaaatccgagtctgcgaagaatatcatactactagattgaaagcaattctcagctaaggcctactgtgctgggaacattcggcatgactgctgatccaaatgggctgtcggcgtccaatgataattaagtaactgtaggccagaaatataaatacgagaccatcgcaggatactgaaggaatccacattccctcctcagttacttctgcacaca

SEQ ID NO: 11136 - DNA, 503 bp, Emericella nidulans
tgaaagaaattattatggtggagttttgtatggacgattcaaatcaacaacagaagatctagattggccggtccatgtgtgtaatgaggccgcgctgattactgctcaatggattgccgactcaaagtggttgattaccgaattttaggtatctatcgatgctatgtttttagagcgtcatgcctaaagcgtagttctggaaattcgaacagctaatcagacggcagctatttcgatgactggattccccgcaacggatagctcgccggggcctaaccgcacctacaatgtggaggggctcgttcgatgcctatcccacacattgattgggctccatgaccttctctgagtgagatctagaattggacgagtcaaagtacctgctttattcttgctttataacggagtctatgtctgctgagccgattggattgtcgcaacacattctcaacctttcagcttgcaatcaccccgcaatggattccacgaaacctacagacaac

SEQ ID NO: 11137 - DNA, 2496 bp, Emericella nidulans
attcagaaacaatggaggcagatgtggcagacttgatgatctcttgagaggtggaatgcagtaactgttgaacctgctggtagctcgacgtctccgtacggcgagtgctctgatagtactccgaaatctgcttgaaaacgctcaatgcagtggtggaaagcctgacactcttcataacctttgcaatctcctctagatgaaccacggacgattcggacagggagacactcgtctgttggtaatcctgccagaaactggtcaggaccgaggatgcttcgtgctccctcttttcagttcggagaaatacagagtaggcgagaatgattttcaattttttctcatcccacaccgcagaagagtgcacgcgggcttctctggtcgctcgctgccagtactcgacgtagagacgctctgcaaggtcaactcgaccttcctcgatatatttcttagcacgctctatcagggcctcgacctcaagtgactctgttgtctccagcaggtcgtcctcctcttccaggtcaagacggagaatgtatccgccctcgtaacccggctttccacggccgacaaggcgaatgtccaaagagcccgtcgatccggccgtggacgagccataatcagtcgaggtgatggactgaatgtcagcaataatagtctcggccctcttgatgtctttgactttgcgatagtgttcggcaagttgctcaagaacagcgataaccttctcggaagtattaccgtagtgtaatttgtaagattgaacgagcacttgaagcatctcttcgcgctttatcattatgtctgtttttgcttccgtgatgctctcggttgtgatttctaggaaggtggtgaccatttgctgagtgacgatgtggcgcgccgtcagcagtttttggctgagattggctgcctcatagaatagagtaaacgtctccgggcggttaacctggcgcagcaacgtggctaacgtgatgatcgcctggagagtggtcacattctccgttgtcaatatggtgcggtagacgttggtgatcaacgtttggaacgttactagtattggagtagacacgttatccaacacggtcctaagaaggcggacaaccacggtcgacgttgggagcagctttgcaatcgtcttagacgcggcaggctcaccgtccttggtgaacactgtcgtttgacggaagaccgaaacccagtagcggagggaaaactcaaggagtgggtactttcctaagagcatattcgtctcctggtggtccagagatggcacggacgacggctcgtgctgttcagtaattgtggtcttgatatataccaggagcctggcgagaagctcgctgtggcgatccttgagagatggtaccagcttgccttgggtgaaaatctccagcaactgcgcagcggataaggccgtgacggagggacacatagtcatactgaagaaacacgagcgaattgaacggcttcagagcgtgcaatatgtcgacgcgcgtatcagagatcgtttgtttctctgtctgaatggaagcgagagcagacagttcctgcacatgcaagggacgctcgaccgtagcaagccagagcagcatgagcttggcttcggtagtggcctcggcttgttgcagagaatggagaacgaaatcggtgacagctggtttggccgagatcaggctgtcaactgattttcgcaggctttccgtgctctgctctcgacggacacgtttcgtgatgagcttggctataaggaacgaaccctttgacgccgctgtgattcgctccacaacagtttcttgttctatggctgacaggcccttgaaagcctggctattcccaaagcagccacgtacgacggcggagatgtcctcaaagatgatgtcttcagtgatacgaactcgagcttgccctggagcctctggagggttgcgggagcccagtgtgatgagcctgacgttggaagattgtgtggatgcccgaatcagcctctgcagcaactgttcctccccacaggttgcctcatctacaccgtctacaaccaagaccaatcccttcgccccctttagagcggaagcgagcgcttgttccacagtgtcccagaggaggttatcataggtttcataatcagcagtgaccttgcttcgatgcagagcatcgctcaagatacggaacagctgcacattcccgatacgcttctcaaagaactgagaaagtattgtctttgcaatcgctaaggagcttgtttgcacagcaatccggccatctaatccgggttagtcaatatccattacaatggagggcaaacaattcacatactgatgggaacgtgcagagcctggtaggatacgccaccgtgtggatgttgcagatgatccacgatgacagaagcaagaacggtcttgccagatcctggctggccagtaatgctgagatgcctctgttgcgtcttcaaaaaacgggtcaggtacgggcccagccaaagacatgtgagttcctcgc

SEQ ID NO: 11138 - DNA, 448 bp, Emericella nidulans
gatcccgctaagggatcatgctgattccaacattgttatcatgatggctggaaacaaatcagacctgaatcacttgagatctgttgctgatgaagatggtcgctctctcgccgagaaggaaggtttgtcgtttctcgagacatctgctttagaagcgactaacatcgagaaagcgtttcagaccattttgtctgagatttatcatatcataagcaagaaagctttagcggcacaagaagctgcaggtaatcttccgggccaaggaacagcgatcaatagatcagattcatctgcaactaacagatcaggatgctgttctacctaattgcaacaatccaactatagtgattactaatcgatcaatcacacgttttgagtgttctcttctgatctcgtaccagttcgtttcttcttttttggtttaatttcagcaagtatagtatacctt

SEQ ID NO: 11139 - DNA, 319 bp, Emericella nidulans
tggatcctttgatgtggcggaatattttttagattacggagaccgcctatctggctctctgtgctcgagccccttagtggtcgcagctgtcaaagggtatgtaggcccgtcttgcgcatgctgcgagcaacttctcactgaaggggaacagtgacagtgatatctgagtaactgcttgagatggacgaacagaagccacatccgcaaaattatacagggactactacgatgtacacagtctgtaactaggccagagcgaagggcaaggaccgagactagcccagtaatgtatctcatagtccaggctttggcgtggcta

SEQ ID NO: 11140 - DNA, 2265 bp, Emericella nidulans
gcaggatcgcggttcgaacgctgtccacggacatgtccccggttggtgttgaggaagtaattacaccgggaccggtgaaaaggactttgattggagctttggagaaaggggccagtaggcataatgggataaggaagtagctgacaccgcgagtacatcctgctggaatctcgtgcctaattacactaccgctgcttgctccaacgccagaagcagttcctgtaattaggcctggtttgtagacaatgattgtaccagtgtacgagatctccatttgtgagccatttgtaacagcctctagtaatcgaaggaatgagatttcgtgcgatgcaagacctgggttggtaggagaggaaggacgaatctgcgagatgtggattgtgcggccggtcagggtagagaacacgaggcgatagacaaagttcttgtggccggtaagcttgataggcggttgcgaggtggtcgccatggctgcaataacaagtcttatccaaagacctcgacttctcttttcgaagtagtcaattcatgatcccgaaaaatgaaactcaagaaaatcttccggagccttgttgatccgttccgagcatggacataagcttggcttatctccgagatggggtgatctgctgatcagttatcacaaagctcaaccggtagcaacaacataacttcaattgcaaaaaaaagcacctttttgtaaatcagttctgaaaaaaggaacgatgctgccaccagctctaaatattcctaaatggtatctccctccggaattccttccacacacctgcatgcctttatagtatttactgatctacccctcccccgcttcctccaaccccggaacaggtcaactaacagcaacttccaaacccatccaggcttgaagccaactctcacctccttcagcccccggtaaacaattactgcgtctaccacccctcctctcccgcaacctctgggtacacggtgatgatagtcggcggcccgaacgcccgcactgactaccacatcaactcgactcccgaattcttctaccaataccggggctccatgctgctcaagactgtggatacgagcaccaacccgcccaccttccaagacatcccaatccatgagggttcactgttcttattgcccgcgaacaccccgcactgccccgtgcgctttaaggatacggtgggcgtcgtcatggagcagccaagacctggaaatgcggaggatgcgatgaggtggtactgtcggaaggagggatgtggggaagtagtttgggagaagaggtttgtctgtacggatctggggacgcaggtgaaggaggtggtggaagagtttgcgggcgatgagggaaagagaacgtgcaaggcgtgcgggacgattgcggagtcaaggtttaaggaaggggaggtcgtacagcctcccaaaataccggagtagatcggtcagatgcgatgatgagatgaggtatgacaaaaaaaaagtagggtgtcagagttagcaaagcaaacggtgaacaccatgtataagttagaagacttctaattatcgattatggcaccagtggctagtactagtagtatgacatgggcaacgtagggctccaagagagatgaatagagggaagaatggtgaggttgttccggatctggggatcgcaagatagccgacaacgaccttgcaacaaagaaatcaatactaataaaacaattatccaagcggccgaaccgagttgcagtgcgaacatgcttcatctggtatatggaacagagcgcaagaacgagagcaaaagcagaaacctgacattagtacatgggtatgcgtatggtacggttcatgcgagcaagacgattataagaggtagatggaaggtaataacgagcccgctaaagccagtttaaagggcatgtcatgtcagttactcggggccatcataggctattgttcttaatcatcgaacgggcagtctatgctctcgtgtccgtcccgctcgcacagagcgcaccatttcgtctcgtcaatgatgccactcgccttccctgcaacaggggccatggacgatgtcaaacccactccccggagaccctcgaggacaacatcacgtccagtcttttgagaaggggcgttctggctccggctcgacgagggagagtgtgcggagggtttttcatctgcggagctatcctcgtgtgaaggttgctcctctggcgcaggagcgggtgtattattcttagcatctgcgccaaacatgtatgtgcagctcagaatgtc

SEQ ID NO: 11141 - DNA, 168 bp, Emericella nidulans
cacaacatacaacatacaacacaaatacagatacaagatcagagaacataagatcacatagagaacaccaacacaacacacataggagatagaataataacaggacaagagagcaatataataataacacaagagataccaatacaccaatacacacacatataccaa

SEQ ID NO: 11142 - DNA, 221 bp, Emericella nidulans
atatatatacacacacatatatagatacacacatatacacacatacatagacatacacagacatatacacacagagacacacatacaaacacatacacacacagactacacacaacgaatatacagatacagagatatatagacagacagaacgcacatatagacatactacaacagagacagacagacatagaccatatacacacagacacaacagacat

SEQ ID NO: 11143 - DNA, 531 bp, Emericella nidulans
acgctggaaatatgaaggagattggcagggctagtgttagtgcggctgtgggttttgggtttcatggggtgcatgttgctggaaatggggttggcggagtggatttttgagggctactgcacgcacacgtatctattccctttcgttcatattcatttatacccagctcctcacctatcaatccactgcacaagaatttcttcccctttaaccctactattaaaccattgcaaaatctgaactcgcctcccttcccgtcattatcaataaccctagcgcccctaagcatatccttctccacaaccttccagatagcaagcgtcacttccgcggttcctagattctgcgcaatacatgccctcgttcccttgccaaacgcgaagaaattgttcagcatgtcgtctgtcacattcggctctagccacgttctggatcgaaagataagggattggggaagatactttcctcctggtgcaattgccatgccgagatgccaacgcttgtcccttccgggaaggagtaggatttgta

SEQ ID NO: 11144 - DNA, 2333 bp, Emericella nidulans
  unsure (1)..(2333): unsure at all n locations
cctacctctcatataggcgaagtaaagtggaaaagaaagactcgcgcgctccagcaccgaggactcgacaaaggacaggcttctcctggctctgaccctaccctacaactaccgccgcatcaacaccccctggcaactctcgcggctgccagtccttaccccttcttcattcccgtcttcgcttacggtcaataaccggcggaagttcctcctgcactctaccgtgaagctcatcctcgccgtcatcataatgcaaattccactcatcgaccccagcgatcccgttgttctgcaggcggtctcgcaactcgatcgatcgaaatcagttctccttctacccttttgcgcctttacccagaagggcgggttgcatgcgctctggcttcaagctcgcttcacgctggcattcggaatcgtcatccgtgcgaccattgtcgccgcctacacggccggctctatcttcgctgttatgctcggcggggatcccgccgagtggccgcctgtagcgggaagtctgagcgaggcgtggacattgagccgtttatgggggtgcgttttcccttctttatttcccttcccaccgtctagaataagctagccaagagttgactaatatcgcacagacaagcatggcaccaaacccttcgccggcctctggcatcaaacgcaaccttcctcgcggcactcgctggctttgcacccaagagcaccgtggcgcactggatccgcgtcctggttacctttgtagaatcgggcgtcgtccactcagcctgtgatatgggcttcggcatcccctttggagagagcggaggagtggtgttcttttcccttcagattctgggactcgtactcgagtctgtctgtcagagtattgctgcaaaggtgggattgaggactgggggcagattcagtagagcggtcgggtatatctgggtctctgttttcatgctctggacagcgcctgtttgggctaacccgattctggtgaatttggcgagcgacggagtcaatctgatgagtccttggctggggtttccggccgggagtttttgatctggccaagggttcgaactgacaacaggagggcggggcagaagtggaccgtattagagtaccatgtagacggatttaggtggatgcatccagctagaccagaatagactgttggaccgtcctagaatctagatatcttcaattgattatgatctattcttgtatccctcacagagctaggaccatatttaggacaagtgcggccatcgcgatggccagaagtgggctatttcccaccccaacggcgccgtctgtagcgacggggccttcagcttgtgtcccagttccgccagatgtaccctggtcagaatccgtcgcctctgtgtcctctccactacccgtgtttgtgcccgtacttgtagcagtcgtgctcgtggtcacagtcctactcgggaatatgggctcattcgtccacccagtcggcagaatcaggctcgaccccccgagcgaaactgtcgcagtcgtgacggggtcatccacatcctctgcttccgggaccgcatcgtcgccactcccaatctcgaggatccggtcgtccccgggcgcggtattggcctgagcaagcgaaatctcgttgttatccaagtcaaagacgacatatgcacttctgagaaatgtatcgcctagtatgggaaagaggtcggtattcggcagaataccgaataggcagctttcctcgtcggcgttgttgggcagctggagtgcgtccctgccggggccggagatcgcatcccgcagcacaagctcacggagtggaacgcggatcgtcacgccgctgaatgtgaacgtcagattgtagtcttctcggccaacgaggtatgtgtcgcacggtacgtagccgaattgctctggttcgtacaagtgcacgtcgaggtcggaaaagatctgtgcgacaatgttcgaggggaggtacgtgagagtcgcgccggagtcgaggagcgcgacgaaggggaattcctgctccccagtggtggaccgcgtttccgagtatgactttgtaatatcgtccgaggcggactcgacgcccatccccgtgagcgtgagcnagaggtggatgtagtgtccattgtacctcacgacggggagggttcgcaggggaccggtgtagtgggcggtgttgacgccgcgaagaggatagtcccttcgtcggagcccagccggttgagccaaagactgtacgcgttcgaagaggtgatgttgctggccacaagccgttcggggaggttggggtagcggtaagtcgagacgacatttgtactgtagccgatgcctaagatccc

SEQ ID NO: 11145 - DNA, 428 bp, Emericella nidulans
tcaaagattgtctcctggggtcggtatccgccaatccgcgcgacatcttctcgcgctcggcttccaggttgctcgcctcgtcttggaagagagggtggacggctgtccagttgtccgaggtaacaacttgcttggcacgctttgcgctttcggcagaggctgcattccttgtacgcagatacagtttctctccctttgtggatacggcgcgttgggcgaagatatctgcatcgtcgtctaggactctgctgacccactcgcaggtctgcgagagtccgtcgcgaggcagactaccaaccgctacgtcttcggcaaagttgacctggtctgattcacgtccaagaacgagcttacggccaaggaagagctgcaaatccaaaaggtagggagcgtctgcgtcacggacaagactgtaactccaaccttta

SEQ ID NO: 11146 - DNA, 2345 bp, Emericella nidulans
aactcgtggtggagaaaccggccctggattcagttaatgctgcaccctgcagtactcagtagtcactcaacaatacatagctctacggtatactgcttgcattgagcctggctagctatcattcaataccttttttcactgaaacagaacttgttgggcaggatggagtttgaatgtttgagttcaaagctgaggagcacttgtttcccgtcatagactatttacctattaagcaggtgtgcagcgatacatatgcattgcctcactcacaaaagagctatggaaacatatcatagagatagtgattgtcataccgggtcccacccgaaaacgaactcaagtccgagcgtccagccaacgaaggttgggagaatggggaattgatacataggtgtggagggttgcaattcattaagggggccaataaaattaaatgcattggtccgcatgggtcaagaagacggacgttcagtggacgtctcgaatgctcggggcacatctgacagtcgtgttgtcgaccaccttttcacgacagcagagaggacagcaacgggtcatctgcgaaacgtacactctgtcttccgtcgaatgttgtcggatcaaaggttgattgtttgttttccgggctgccagcgcagacgtaggtttggtgaatatacgacgctgcggttacagtgttggagtgcaggcgtcttttcggggatggggtaagatgataagtgcatcatctatactggccctgctggataccgaaagcttgtgattgactcagtcttccttgctgatagagcttagagcatgcgctagtttcagcaatacgacgctttcagttgccgcgaagtaattcaagctaggtcgaacatgaatatcagagcgttgacctgaagagagaatgagagagcagtgtaagctagcttacctatccataagaatccgaagatgacgaccaaaatgatcttcatatcgttttaatgtgtcctcgagcttcccaatccgcgcagggtcgtagcctcgtccgtcagaagtagcagggttcgcgctgagtcctgggtcggctgagatgagggcgcggccaaggggtgctgcggtccaggaggcgaacattgtgcagcaggttaggagttttgaatggatctaaaaggcgacgcctgtcagcactgagaaggaatggtgggatagtctgcgaatatacctttagcagtttagcctgcgtcagcatgcactcttttaaacaagtatccaggaaatccacgtggtcctgcatgagttcgtccactgtccggttgacctgcttggtgccgttgacggtgacttctgatccatcagcgtcggtaccgttcacgcggtccataaggctttgccagttcggttcgactacttcagccgtacaaaaatagagtaactgctgtataaagactagcatcttcgctcgaaggttccaagcgcgccttttccagagctctagccttcggtcagttgatttgtggcgccatcccaggattttgctctggtctaaccaggcggatgagagcatggattccagatgacggagcgagagtaggtgtcgaaagatgagttggtaccggaggactgtcttgcgactaataacgagggaaagcgggaagggtacagtgtagtcgagctccagggcatcaaatccaacaatatccttgtcatcctcgctgcctgcttgcggtgcttggtacttttccagagcggcttctgggttatcctgatctataccggagacgctaacaacctgcataagccatttggtgagtccgatcttgttcatccggactttgacatcttccttgaatgggtcctgcgccgcaatgctgcctggttggcgcaggactaaatcaaggagagattgtagtttgctttcgttcacgttcttggctggcttgcgaagctcggacgctccaagctcgaggaaataggaaaagaaatcagatcgatcgaggaagaagtagtgttttaaggagcggaacatgtagtgagagagtttttagtcaacagaagattcagcaaagaggcattggcatatgtataagcagcgttgacgttctccagaaagcgaggatcatcaaatgtcttcggaacatccttaaccgctttgctgacgtccacccctccacactctcgcaccacattcaggtatttccctgccagtaggaccttatcccgtacgctatcgagttgtggaggcacttcgttgtcgcggatagtatagcgcttctcccagtattcatctgtatagtcctcttccagcttttctcgtttgatcatttctgctccttgacgagaaattctgcgtgagggtctttgattacccatgatga

SEQ ID NO: 11147 - DNA, 462 bp, Emericella nidulans
tctagtaacggacgtcatctgcacggatgcctcttgaccgctcaagtgcctgtggtccaagcagcttagtaaccaggagcttcttcatgaacttaaagtaatctccataaggagcactaccaaagacagaagaaccaatcaagagggaatcatcgattgaagggttgtaacgagatgagatgttcaagtcatgagccttaaagatctcgtaggccacagacgccgaggagacgaggactacagggaagttgaagacgcggagatagagaagaggtccatacttggatgagagtatctgtaaagatttatgagctagggaagagaggagaaggtgaacatggcctataatcggaagaaatggagggctcggaggcagatcacagccataagcgacaagccgtgagttcttaggtttcctgaagatgagatagtagaaaaggagtgagaagaggcataagagga

SEQ ID NO: 11148 - DNA, 467 bp, Emericella nidulans
tggttggccgagggattttgcagaatgttgctttcgtgggcaccgtccgtgtcacttgttctagctgtgcaatctccatgctatggctgcatatcgtcttatacttaggcgatgtacgcgcactaactgatcatacggtcttacaccagtgatgacgtcggaatgctgcttacggtaccgaattaagtcaccttgattacgaactggttttctctacctggactcatagcgaaaaagggcgcttgaatcttacttgttaccacgagcacattctgcttggctagaggaaagagcatgtgctatatatggcaataacgcgctgatgatggacacatatgtgattatggaaacaactggcccgtatggcgaagatcattgactaattggatagaattacggatgtatggttgagggatgatacagtctggaacacgaataccgttttcaaagaccggggatgcaacatg

SEQ ID NO: 11149 - DNA, 218 bp, Emericella nidulans
gtgctctgatgatgcgaggctcagaattgttgccctaccgggggggtctaatgcactgtgtataatgtcacccgacggttttgagaactgacacatgctgcgatctcgctggatgctactaatgcgatgaactgctttatgcaaggggagattagcattaagactagactcgactgatgacacctgagaagcgcgatcggagagtactctgcctggca

SEQ ID NO: 11150 - DNA, 1346 bp, Emericella nidulans
gtaccaggtgtgcggaagacctcccccaagggtggagtggtaaatcactggttttcattgttgatccgttcccccgagattgctggtcaacagccccgtcgcctgggtccaagttaatggctgccatgcgctttgccattaccagcggaccgttgggagactcgaagaagttccgggagagaatggtcgagccaaagaactctgtgattgtgggttcgttcgggttggcgaacgagcttatcttgcctacagtgatgggggagatgttgtactttcgtcgcgacgttcctaggataggccccatcatcctggtgaggtcttccgccagtgttctgttaagtagataaacttccagtaccgcactaatggaacccttagcagaggtttggatgagacggaaaacacccggtgcatcgagatgattgaaagcccggagtgcgttgagcagccctgcgatatcctcggtccagaatgatgggtcatgacggtttccagagacagtgagctctcctttgagagtgggaagatcgggatatgtcctcatcgtcacgcgtaccacgatcccaaagctgccgccgccaccaccacgcaaagcccagaagagatctgcgttttcatctgcgtttgcgatgacgagctggccctattgactccatgttagtataccgtagcctcgagatagttgaaggagatagagatgccctggaagcaggcgcgtaccgtggcgaccacgacctcgaactcaagcacattatcgaccgccagtccccacgtataccccataaaggctgggacccctccgccctggataaatccaccagcggcaccgacagtcccagaatcaccccccgtgacaacaaatcctctctcggcgcctcgcgcgtagagatcgcggaacatgacgccagcgccgatggatacggcaggtcccgcgcacgtctgatatttggaatgggatccgccagggcaaaagttgctgtgatagagtatgctattcagccgatgggtgaatatctggaaagattcggggccgcttgatgagccagcgccgtcatgtcctgtattccggattacgagccggaggttgtatttcctcgcaaaccgaaccgccgtctggacttccttcttagactcaactactgccgcatacaaagggatacggccttgattacagggttgctctcgtgcagaaaaggggaggcaggtttgggtagagacaaggctgctctcccagacagtgttctggagtgctcctaagtgtcggattagcttagggtcggctcgttggggtatcagtgggagtgaagagagtagtagatgtagacacccacctggcatcgacgcac

SEQ ID NO: 11151 - DNA, 380 bp, Emericella nidulans
ccccccccgccccccaccggcgcccggcggctggctccccagcgccgcccgcacccgcgcgcgccgccgccggccgcgagccgaccggcccgggcctccgtgagtccatcggatctcacgttcctcgacccgacctctggagggagaaaagacagtgcccagaccgctccccgcagcgcctcgggcgcaacccggacaagaagacccccggccggtttgagccacgcgccgctcgtcgccgattcccggtcccgggagaccaccgggcttattccgagacacgcgtcgagcgtgagtcgggggcccggatagaacacacgcctcgcagacggaccatccggcggcgggctccgacccggccttcccgagtcccgcactcg

SEQ ID NO: 11152 - DNA, 3373 bp, Emericella nidulans
cccggataccatcccgctaagtgtgactgatgtcgatgcgtactcattttgtcgtaaccgtaactatccggcagcgggcactccttgagaccgccccaggaagataggtgcaggcctgtgtctagtctttccagggccgaggccacggagtcgacaaacttggtatcggactcgtggatatactcctgcgctgcaagcacggtttcaaaaacctggtgtattagctgctggtagtgcgtgcagccgaatgttgttggcccagtctcggggctgttacaggggttcacaacgagcgagccgtcgttgaagaacttgtcctcctgcaaagatgagagccagaatgatgcgatgcctttgaggagcgcgtaaccctgcgataccagccaggctgtgtcatgggtgtagtcgaagttatcccagacgtgctgcatcatccaggcggcggctgcagggtctatccagaccagatggataacgggtcagttacagtgcatgcctaaggaacaaagtacgttctagagcttggtctgggggacttacagttcgcccaccccgcgtcctccttcatggccgtaaacccaaagatatttatctcgttatgcacgacccatccgcttgcgttgtatagcaggcgtgccgtctctgtgcccctgggaacccaagtatccgccatataattccatagagcgtgctgtgtctccccgagcccggtctggtctgctagccagtaattcatctgcaagttgatgttcgcgtggtagtcggcgctccatgacggggtgagcgattcggtccagcggccttggaggtttgcgggtagggagttgggccgggaagaactgaccaggaggtgtctggcgtaatccaagaggaggttctccagatacgggttgccggtagcagaggcgtacgagtacttctcaatcagctcagatgtgtctttgctcgcggagtctgtcgtatccggcaattcgagcgagaaatcgcccattagcttcttgtagtctttgacgtgacggtcaagaagcctctgataacccttccaaccagcagcagaggcaattccatccacgattgatgctgggtcttttgcattcttgaaggaccagccactcttcgcgtttcctgctttctggtcgtaattcgtcgccgcgccgatgatgatcgtgagttgcttcttgcgagaggagatctgaagcgcaccctcgcccagacatgttgtcacagaagatcgaggatttaccacctctgcaactgcagcatacttcatcccttctggtggaccggcttgcgtgacgccagaatgccgcaaaacagcccgtttggcctcgctctcacaagacgtttgcaggaggctctggttcacaaggagattctcaatgctgattgtcaccttgggcagacgcgcatctgatgctgattcaaggtggtagacgcagacttgatcgggatatgagcaaaaaatggacgacttgagcgctgccgttgtgcgattggcaatggtaaaactcgttctgtggacgccatcagataagtcgagtgttctcttgtatttgctgtaggcttcgactccgtccaaggcgatggttatattccccaacacacggctggaaccatagtggttcccactgccgagtaattcttccatgcctgtgagcagcatctaagtatcccaatcgtgtttctggggttgagttcaactgaccaccggttccattctcaaagattctctcccggatccctggtagcgcatcatagatcggtgacgaagggttgccgccagtatagttctgtcccacaagcaattcagtgacacattgcaagaatgagggcagtatcaagattgttaacaaacctcgacctcaaatggacccccggaccacagactgtcgacgttcaggttcagcttctcggtgtctggtgggccgaacgggattactacaacataatatttcagtccaccgaccataaatggcagtatccaccataatttggggtgttacctccaagcttcccgttcccgatcagatagccagtcttcaggatatagtcgcttccgtctgtggtgccatatgtagcgggagaggacgatcttagggctctgccttgggcattcgaggtcgcaaaagtgaccgccagaaacagagtggtcttccgcatgatgagcaaaggccaaaaatcggaattgggtgtgtgccatagaccccggtcatctctttggtagcactactgctgcagctggaggcgtcctcttgtatccccgcagaggccggtggatcatacaattctgtctgccaagtacggattgcagccgatctacagggaaatcggtatatttccccgcattagaatgcaaaatagagcggggaactgaccatcggctatttcatttatcccttttacccgctagcctacgcctgtcaagtcggtggttgggcaaatcctactgcgtataactagtaatcaaccaagctagatgaggcaggaacacagaatatagttcaaatcaaaatggccagtcgcagacaagcctctttttgctctagcacagggtcggccagaagtccgcagtatagccctgttacgatgtccaacatcgcagtaatcacttgctttctttccagaagactacaaaacacgttttgcagtatctgatgctctatatagaccagacagccataagcctcgtcctgggtctatagggatgtcgcttttgactctgcacaaggtctaggcttatgtctagtcctcgcttacccagagaccgtacatacatcttagcttccaagagtcatttatctcggagtgcacatttatggttgtcacatatctttttcatttactccatcgcaagcacatatgaccacatgagtaggggactaaggctcaaaatgtctacagtacacgaccgtcgtaaggcgatggatatgatacagggaccggcatagtcgccgattgcctagcggcacacatcctgttaggcctagctataatccagctagcggaaagaaggaggcttgaagatgccattggatgccattgaccttccagcgagtccaaggcaaagtaagaccttgaatattttttatgtggggtaatctcgccaggtcaaaggacgagcttccgtacataccttttgcactaggtatttaagccaaagaacaaaaatttgggtagaggtcgcggagtgtggacaacgcccggctgtcggcatcatgcaatcccggtttcgggacccgcggactgtaccattgaccgggttgagccgatgactactggttgaggcttgagagttagggctgtagtctgcaggtaacgtggttgcctggaggatagggctgaggctactggtgcggatactcatgcaaagctt

SEQ ID NO: 11153 - DNA, 2741 bp, Emericella nidulans
gactgtcgatcgtgttgttttcatgcacttgcgacagatgaatcgcgcacggcgctatttgtgattaattcagcatcatgcatgcaatataccggattataccggagacgtggagggttaatctcgtgacgatacgttttcttatacccagatgaatgttcaacgcttcatccagctatttcctcgcagatcataatcttgtcaactcacccatgctggaaagcaccccgtaccctggaccctgaggaatgctgctatgagccgctcccttgagcctacggctcttgtcaagtctttctccgaattcatttatcatattatcaacgggcaatttaatggtagacatgagcactggccggtcattgcttgaaaagactcgccgactccttccgtaaatcccaaagcagattgtcgaggctcggctcgtagttcatcatcgcgagtcaatgcatcatgctgaaccgctggcggagtattttgtaccctggccagggtcaaaaccaaccaggttgactcgtcgtgcccgcgccaggtaggtcgcagtctttatgtttggtgcaatgctcttgtatcttgtcctgcatcccatattcctgaactattatagaactgaatgagttacagcacagaaacggaacagattatacgagtttcaaagcaatgaacagactacctagagagcatcgggacctttagcaaatactaaaactattatgcaactaccagcatcgataaactctacagcacaactccgactattcagggttctttcttggtttctcaaagctgaccttgagcgtcgcaatcttgtccttgtcgtacttccattcctgagtcctcgctctgatccccgtggggttgttctcgcagtcgtggtcgccggttttgagcttgtcgtcatcgccacgggtttcgagggagtcgtggcctttgatgtcggcggaaatgggagtaaaggagcccacaacttgcggctcggtgaagctgtagggaggtgaaatgtccactggggtggcaagagtgaaggagatgggcagaagggcgagggcgaggagcatcgggggaaggctgaggatcattgcgatgggttctggctggttggacagatgagagagatcttttgatgtgaaatactgtgaagggtggtttggtatatttcaaattgttggtctagctccaatttatatccttgcttcgacatgttatttccttcgatagttcatgggaactgacttggttggttgtttcaaacagttccgcttctgctttctacaaagccgcctgaaacataggatgcatccgatttatattaaccggacagaaggatctgtatttctcttcgagacagctttgtgaggttgaacccgacagggaagcatggaaagaatggctctgtatctcaggtcttggtaagaatcctggtaaatctgaaacagaccatagtagaacttaggtacccacgcttatgggatcgaaacgcctcaaataacgatccaacagttcgtctagttcgtttctgagttgcatttcgatcatgcaggtactggggctaagtctggttagggcccaggcagaaaagttcagtagccgggtcaaaaatgctaaatagaaaagaaatactgttggtgtctcccattataattgaatgttatatagcagagctcaagaggatttatattcaaggcatcaccgaaaacaattgctgagattgatgctatagctgaccgttgattatagttataggctggcgccgtcgtagcttgacgagtagaaacagcctactttgagaaaaggatagaacctctcctacaaagcttccaaagaaggaaagccttcatatcaagtaattcctctatttaatctcccacactgagttttaccatgtcagttcacgttgtgagtcgagtaccgctggtggcctccgctagcttccccagtgctcacaggaacataacaagtttaacgttagttgctttagcttatgctttgatccttctcgtattccagatctgtggttttaggcaacattaatccggttcatgcatgaaataaaatgaattttgcctcctgcatttctggttgaggtcctgctgacacagtagcagcatgatcaggttaataatgcctgggattgagaactcaggacccaaaacattatcgaatattcggtgcaaatggcgggtccgaggttcctgacttagaaactgcaattctgatgcctatgccctaatcttgaacgttgccggctgggcccatatcgaagtgaatctattttaagcagtaagagagcccgtagtctataaggcctgtaagttactccacctggctgtttagacaaccctaattcgtttcgatatacgcacacacaatgcctgggcctgacacagttttcaacgccatcggcctaggcttgatgggtatttccatgatccctctcgccgactcattcttcccgaaagtcgagccgaagtattccactctgcgcgtcgccgcaggcctctttgagccaggtgattccagcgctagcacaggaggcagcgtgccgggcgtcgccctctttgacgccgatagcaaccgtgttgggtttcagtccggcaagggccacggcaaaatcgaggaaggaaactacaaagacatttctgatcgcttccgatcaagagccagaacaccatcactccgattttgagcgttcgtcgtaggcggcgacgacgccctatctttcgcgtactggctctcaccca

SEQ ID NO: 11154 - DNA, 580 bp, Emericella nidulans
agaggatccccacaaccaaaatttaggtcttaaatataacttttgatatcttgcgacagaagtattcttaaattttgattttgttgcagtttgagcttaacccggatgaatacatcaaatcggtggaagcaacctatgataaaccggacattttccgcaatgtcgtcattacatcgcttacatttgaaacatcgaaggggagaacgtcattctctgggtataagggaggtaagaagtttaagctagagcaaaagggtcgtaggcttgtcgggttccatggaaaggaaggttcagctattgatgcccttggagcatattttgcacctattcctactccgactcctataattccagccaagaaactaccagcaataggcggcacgggaggagttgcatgggatgatggtgtctacgatggtgtaaggaagatacttgtaggacaaggtaacgatggtgtagcctttgtcaagtttgaatacaataaaggaaaagatcttgtatctggagatgaccatgggaagatgacattactcggaactgaagaggtcagtccataaacaagagttatgttttttctttt

SEQ ID NO: 11155 - DNA, 2067 bp, Emericella nidulans
gggtttattcgaacggcccacattccacataatacatatcaagacactaccaatgggggaaaatgttcttttgcttatctgttggtacactgaaggcgctctatggagtggcgtactatattattgctggccgcgcgataacctgaggaagcgccgcctgatatcgagcggtatcagctcttatcggtgcccctccacccccgccaaagtcgcgtgggaggctggacagtaggagcgcgcctgccgatagattcaatccataccggatcggcttcacgagaaataacaattccctcacctggccactctattattgagattatcgttctccaactcggcagtctccttggatgaaagttacccggcagtaaatccattacatcaaacaacgttaccggagggcgtaagtggggcgtggcaaactcgtcgcgttctggaaaaccaaggcggagcccgacaccggagttgctttcacgtgagatgactcttttactgcgtcagtgtcctgtgattttgtcctaggttcagggcatcataggatagtatggagtctaagggcaagaccgacttcacccggagttaggattctggagatatacacaagcggcaacgtcgatctatgatcccccagctttcgacgccggcagcaaatagcaataaaggcaagtcgggagtttcaggaatcagtcggatttctgtcaatcccagtggctattgcgcttccgcttccccgggtcatattctaccccatattgaccagtaacgccagccttgttggaaagtgaagctgattctagaggcagcggcgtgaccctaagagaatacatgcagtggaatctatatgccgtctgtcagatgtcagtacgccatacagagtgtgatatattcagcgccaagagcactacgcagcactaaagcagccgcacaagcatcatgctcatgaatgctatcgcacccttcgggactcctgatacggaattcacccgagccagccctcgatgctcgtcgtgttttgagttgcggtgaatcgtgtcgtactagtagcctgggctcagtatcgtatgcaatcactgcgcaaccattccgtacagagccactacctaaacaccaaactcctccatatctctcaccgcttatgtcgaagtcgaacgacgaagatctcatgcataaatcactcacgcccagtccaaacttacaaacccccatcggatactgtggccagcgagccaagacgcgtcgccgtggataaatccagtagaatttgaattgcatccagatgatcaagtgcaggcaaacgtttctgataggcagatctcccgatcccttatcagcggccgctcattggatgagcggcagagtccatgacaaaccgcgctgactgcaaccggaccgataaaaatacaaggtttttttctgggttaaccgaatggaatgcttagagttgctctggagactcttcaagcaacggtaagcgcaatgcatgtataatggaagtcatacgattgcgagagttcgaagtaccaaagatagatagatagcagaaatttgtcagtggattcagccagctgatcggttactggttagagctatcggtggcagcaccgagcggcgagaaggctccaaagtccagagtaatcagcactacttatcagcagagtttcgaaaactgcaaatttgcagctcgtaaaatacacagctaagctcgaattgtcaatccctggggaaaccgtggacctgagctccagttgttgcagggcagtggcagcgcaggggcaaggtctcacgtaaaaatagatcgggtatggagtcagttgagtcacgagtaggagaacaggaccgcagaaaataccgcacataggaaaaggaatcatgcccgcggatgcccaaaactcctcgggggactacgttgggaaaagaatccattttcgatgtgggcagagaagagtaattcgcgcagctgatctgcttggaatttgatgcggtaaaatgcaacgccgtctgcggctattgctatgagtaataatggaacgcctggagttggccagcccggccaacttgtagcttgca

SEQ ID NO: 11156 - DNA, 104 bp, Emericella nidulans
tgagacatagaacggacctgtcgttgcacgaaacactgtcccacatgccgtatgactatttgttatgttgttgcgtattagcagcgttggacactgtctcagtg

SEQ ID NO: 11157 - DNA, 2047 bp, Emericella nidulans
ctttcggacccaccttatctgcgtaatcgtgatgcctagattcacttcagttacacaagtctgttgatgcaagttaatgagtgttctctggttctacaatccccttctcaagaacgaggagctgttccgcaccaggtttctactcagcactatctctacaatcagttttcgttaagtataagtctttgtctcagttgtcatgcctgcctgctgacctgaacgtttcagtttctcagcatttaaacgatgcaaatgcgcatcgcaggggaaatcttgcacattattgttattcatatgcccttgccacatatgccacaggaggccaattacaagagagttcctccaagcaagcttatgctgactgtgacctgtgtggcaagcgagcctgttttatattactgcgccggtgcgatacaatcgaatcctgtgactgacgcggtcaacaggagcggcggctgtggagggtatagccaatggcctgccaccgacaaaggctagattgctttgcaaaacgaattgtctagaaaatcatgctcctgctccgctgtagaaagagttaccaaggtactagcattgagacaggatgatgtcttgctcgcatacgatgagcctagacgtgcacatataactactcggacctatatcaaataaagaattgtaataatacatcccaaacattaccatatcggctattgatagccgtgattatcatcccaaccgcgcatgctcgcgaaggcagtgatgctaagccatgagtacgagatatattatagaaaccttacctcagccgagcatccgttaatcatcgtctccagaataggcttctgccatagcacgtactttaacggcagcgcaatgaacgattccctcacagattgaacagtgtaattgcatgtcctaccaaatgctctcatcgtccaaacctcatttgtgcaccagcatagtgccagaggcctctgagaaatccttgatactccacattatcaccgtagcctgtaaacccatcactgttgactcccgtgcagtacatttcagtcaggcgtatatgccagggtgggtaaccattaagcttcagtgaaggtccaaagacaagaaggagatccggctctggcttgacttgaaggggttttgacactttgtggtcgttcgcagtcggtgcaacatcctgggatggctgtgtagtgatctcgctgatctccgcatcgactaattccatggtgatgtcgtccggtgagagttttccattctgggacatctctgccagagtctttgtcaaatcgacgagggtttcctggccgtcggtcgcagacaataaaaggacgaccagagaatttttggcggcgtcaccagccggacgagttttgtatattgggtggtgtggtgcgaagagttgaagtgtaggctgctgcaaggagccaaagtaagaagacagcttgttggtgatgacttggtgtaacatgggaatacacgatttgaggagacctgtcaatattagttcagctgcatttactatttaaacgcgtacttaccactcttctcgtagacactcagtactggtatgccagcactagcagaccaagatacaagctccgcaacttcgtccatcaagattggcagggcgtcatcttctttgcggagagacaaaatcacgctcaagtgcccgggtaagcgatccaggtcctttacatctttccgtatcagttctggtgttcggtggtgatagtaaatgatcgccagaattcgatccagaacagcatgataggtctgaacgagtcgcacggcgataccaaagaaaatgtgaaggaaggtataggttatgaggtgaatttgcgattttatgaatgtacggattggagtttttcggggaagctttctgcgccgctgaggtggccaccgcggtagctctgatgggtctggaaggtatggcttcatgatattttcccgatcggtagcacttagcttggctccccgagatcggatattatctcttagtagctctctgtcacgccttgaaaccatgacgggcagagatgtctgaggttttggg

SEQ ID NO: 11158 - DNA, 1010 bp, Emericella nidulans
gtcacaggctgcacctcgaagtcttcactggggaggacacgtttcatcgggagactggagacttggtcgagcgtcgcagacgcgtcagatcatacaaggctgtcttttccctgcctgttcgagaggttgcagaaaccgatttcttgaaccaactgcgtgctgcaactgggcttccaatgtatgaagacccgtatccggcactgccagagtatagcggagaatagttcacagatcacacgttcacgtccatgcctagctctcagaaattgcgtgactgcggtgcggttttgactctgcttcgtcgagaaggtcgtctgcccaggggaatttgatactggttgggcatctacaatgtttcggtagctactgccagacatttaccattgcagcacgtatccaaatttatgatcgagatagtccgccctggcaaggatctcaacgagaagaggcacgatggtagacgtgaagatcggcaccagggtagtattccctcctgctcagcgtctaattgcacgggcactctgcaaacctgcggatgtcttgccaaggtgctcttgcagccggtttgaggtcgtgtaacgtactcaagtctgccctgcagcaaactctgggcaagcagatggagaaagaacttggactgtttggtggaagcatgcatacttgagtgtcagtgcgggatcggtgcagccacatgcaggtccggctctgtgcagaactacaggtgtccagacgcgtccatctgcacgcctagtctttgaatgcaagcagtcacacatggctgctgcatgcatgagcagtatggtgcgctgcgcaatgccgcctcggattgcttgtctggacttcacctaccttgccctaccctgctctacaaggagttcgggtgcagtttcagttccatcctacaatcgatactcttttgagcatagtattttaagtctattctctatgaacaggtgctacccagtactcttacatcacatctgccacttccaactcaaagtcacaacggg

SEQ ID NO: 11159 - DNA, 471 bp, Emericella nidulans
ttgcgacctccgacttggagcagaagaagctggtatacctttatctgatgtgaggaatcaaactttgccaatccgcacgactaccgactaatacccggttcccgtgagacaggaattacgccaaatcacatcctgacctctgtatccttgccgtaaacaccttcgtacaagactccgaggacccaaatccgctcattagggcactcgccatccggacaatggggtgtatccgagtggataagatgattgattatatggaagagccacttcgaaagacgctgcgggacgagtcgccgtacgtacgaaagaccgctgctatctgtgttgccaagctattcgacttgggaccagccatgtgcttggagaatggattccttgaaatgcttcaagagatgattggcgacccgaatccaatggttgtggccaattcggtaacggctctttctgagattcatcatgctgcaccggaga

SEQ ID NO: 11160 - DNA, 3118 bp, Emericella nidulans
cccctgtctcagcgagacacgaaacacgcggtatgtaggtgtccctgaggagaaagagaggttgtagttgtatacatctccagtctcagggtctgattttgcatgcgatgcggagaggggccccgttagctctggatggaggattccctgggtagctagggctaggggctcaagggtagaagggtggagctgtttgtacgttgaattgtctgttttggcggttagagttttgaccccactggatgtatttagtttctcgttggcgcttgaaattgacgatgaggatggagagtctagccctggcatgttgatagagagtgtaaccccggtgttgataaaggaagggctgtcatggcgtggctcgtacgttgattggacttttgagtatattgcctcgcatgggtctgagctaaatccgccgaaactaaatctgtcacctaaggagcctgtttcgtgcgcatactctatcatgtcatctgttaaaaacggggaggtgtataatacgcgcgcatgtaagtctggcctctctttaaggagcgagctgaatcgatgagtttggctgaacccgtcgaaccaatgtagacttggaatgtgtttccgtgctttgtgtcgactttgtaccggcctgggcccgttctgtagagggttcctgctgcataatgtgggatacttccggtcacagatagctcaataggagttttttgctcatgattggcgtcgaactgctcgttgttagaaaattctttaatgtcagtatttgatgacttacgccttgttcattcggccagtcattgaagtggacactggtatcggttgcttgagtgttgggcatgtttctaatatatcaacatttaatgaaaacccagacgcttcgacgaatggcatccgattcattaggcgggcagccttgtgtatttatacgatctatctgacccatcccattctcaacctacttatgtagaagtttaccttggaggtgatcttcgcatggctccgaggccagtagccagtaggaagccgttgtaagcgatatcagatactgggggctggcactgacgtattggcgaatcattttttggattatgcgaactgggacttggcaggcccgggaggccgagtccgagtccgcgtccgtgggtccgttagctgtgcccctgggccgcttcgatttcagtttcagatatcgtgactccacgaatatatgattcacttgccgttgcttgaaatgctatagagctaatggtcgacttcgctagcccgtgaattagcaaaaaaagcgctagaaaaggctagtgaagtcgactatacgccctatagcaaacgtccgcagaagcatagaaattctgggagccaagagtccaggtggtcccatttgattcggatgtaggttgacgatcttgggctgcatggttgagaagctgaccgatgtcctggctgccagcgggtccttccacccgcgggaacctccgcagtttactttgccccatggcagtagtggtattagcgtttcccaagcgattgtaagagcatgtcctcccgcgcgagtgacactctgagcatggctggctccggagcacgacctcttcgatctcgcgcaactgtcacatgcgtgtttttctttacccccatgtcgaggctcaggaatagccttaccaatgcgtatacgggcagaacatgatttccagtgtcgtcttagcacgtctctatcgggaactatcagcgaggttgaggaaaatgctgctcaaggggcacgaaccctcgtttgtatacgcaaccgcagaaatcacaaccgtatggtttagcggttctatctattaagcattagcacgtagttctctcgaggtttctgtcctccataatccggacgtacgtgttgttgagtgacgcttgaaatgatccaccctctggaagacagcggagcaaacgtcgcaggtccacaagattaaggatttggattcccagcggaccgcgtccgactctccatacgcgtccggctttccataggccagatccagaaacgactcaggcgtcatggctgttagtcaatgaagttcttgcgggctgagatatcgccaaactcagtaggcagccccaagtgacagttcggatgtcactcaacatcgatatggcaaatgttgctacttttccaaacacagaagaagatcatttgaagcgggggaatccgcccagctcatcgcgtccaaggactcattagccgagaggttgggacggcgatgagtggtagtgtcggaaagatctggacaccatgaccggcgggattcccccacatccgtatttcgccccaacccaataaggtaaaacgacacatcttgtggatcaatcaaactgcagagttaatgaacgatttcaagttacctactcacaccaagaactctccgatcatctgccatccgccacaatgcaccactgctcgcatgttccaagagccactcctggcatatcgaaatatcatcattatctctgccaaatggcgtccgcagcgaaagattgctagctaccgaatctgactttgagtccatatcctcagggccatgcaaccccaaagaccgcgatgcttccaacagcccaataaatgatctctgccacgtctcctcatcaacctggaaagtatgcgaaaagcccgatccggtatttactatgataagccgctgcaatgacggcagagactctgggtctattccctccggggatacatcctcggttagaccatcgggtcggacaaggacaaggtgagtcaggttcgagcaccgtcgaggccatcgagaactggctgagtggccgcgattttacaggccggcgctgaggttggccgaggaccgactgtggtcatctttgtctgcctgatcttgcctggagctaaggtggtttggaagtctgccgtaaacaactttgcggacttcaagagggccgagtgggtccttaaccatccgttagagggcggctgccaagtctagccctctcgttcctcttcgccccgggataaattcaatgcgtatcttttcttcttcctaactttatttcctcgtctccaatttttccccccccaccttcctaactctactcctcaattctttgctcttttctcccctttcctccc

SEQ ID NO: 11161 - DNA, 287 bp, Emericella nidulans
tcatagtcctggaggctgcaggcagaaggaaaggacacatgacagaggcggtgacagagccgcaacttaagccgcgaatcatcgctccttcctggcagattgtcctgcgtttataggcaacaacaggactcccaattaagacttgaatgtctaactgcgggcaaacccggcccccgagtttccacgtattttgcaagggaatccttcgcaaacttgtaatttgttgacttacacggttctgccttgttttaaccctccgttcttccttcctttttcctaaaaaaaag

SEQ ID NO: 11162 - DNA, 122 bp, Emericella nidulans
aaggatttaacgaaacgacgagggtttaacctcgctcgttgacacctagaggaagggattacggcgtgaatgcgaggagtacggcatattgccgtctgtaatcattagctaggatgaagcgg

SEQ ID NO: 11163 - DNA, 490 bp, Emericella nidulans
atgacctgtgatggcgagcgccgttttacatccactatatctctacgatggacacagggttttcttaccgaccatgggattcaatgttattacctgtttatgctgaccatagctcatagcccttctattatcttctttcatctctctcttccattccccctattctctcattctatcttccccataacaaaattatactttacatttcacttcacctatcttaatccatttcccctctatatcatttttatctcacctcactacttacactcatcctctcatcatccttctctttactatataatttctctcacttaattactacctttcacactcttttcccactttcttacactctattccccttttccaactacattctcttaattaccactactccctctcacatcacatttcctatttacttcccattccatccttttctcccctatactttctcctcctatttctcactttaaactttaactcc

SEQ ID NO: 11164 - DNA, 360 bp, Emericella nidulans
tggaatggagtgattgttcggaggagttatcgtgtgagaaaagagtaaatctgaacgaggaacaaagttgtgagggtgatgagattgggaggatgtgtgagaaaggggaaggcagtagaggtagtgagtgtagatggttgtgtagtaaagttgaaaggggagtaagtaggtgatagaatgaggaggggatttaaggaggtagtgtagtggaggtgatggtggattaattgtgatgagggcagtggtgaagcttggaatgggttaaggggaggatgggggctgcaatgatgaagagttttggatgtgctatgtggataaatggtgtagctgggtttagttgtatgaagtgtgtggtgaggt

SEQ ID NO: 11165 - DNA, 2854 bp, Emericella nidulans
actacagggcaaccgtgatgtcattgtcaatgccgtcttcttggtgatttcgttatcatctatccttattcgactatggactcgcatattcattgcccaaggcttccggctggatgacggtgagtttgttaacaatgcattcgtgggtgtactgtactgattaccccgctagttttcatgatcattgcatttgtatgcttctagatcgaggatataggaccttgctaactgaataagctatgttcatgcgttataagtgccgtgacattagagagtaagcaggtcaactgcacctacaagtacttgtctgacaaatgccagtgcttaattggggcctcggcgttcacatgtgggatgttcctctttcccatctctcgccgtggtttttgaaggtgcgcccaacagctcctcgttaggtgcgacactggcaactgacaaccgtagctcaatgttgtggccgctatcatctactgcgctggcactggattcctcaaggtctcagtgctattgttttacatgcgcatcttccctagtcgcaacttccatatcgccgtctgggtgctcgtgttcatcgccgccggttatagcattgccagtgtactggctaatgtgttcagctgcaacccggttgcgaaatcctgggacatgcgaatcgttcatggttcctgcatggaccggccgaccttttacttttggaatgccggactcggtatatttacagattttgccactgtgctcgtgcctgtgtatgtccttccggccaagcttttgactgctgttgctgaccgatcaggccatggctgcgacgactgcaaatgccgaatcgacagaagatcgctgtcggctgtattttagcgactggatgtttgtgagtacgcccaagttgcctttctggtgatatgctgactgagggacagcgtcggtatcgtgagctgcatccggctttccagtctgtacatccttcagcacactgacgacctaacctgtatgcgacctgccccatccattgtccgacaagctgacaaaacctaggggctacaaccaatgccctaatgtggtgtgtgatcgaactaaatctaggcatctttggcggctgcgtgacggccatgagaccgttcatgcggtgctacttcccccgcctgctcggcctgtcatcgtacagcggcgacaaatatccatcacggagtcgtggcaactcactccctctccattcaattccccgcagcaaccatccaaccttttcgaaccgcggtcacaatcactcgaccgcgtacaagtcggccctggataactcgagcgaagagcacattctatcaggcgcttccgccccgtcgggcgcaggcaaggaaatcgacggcatcatccgaacagtggaagtcgatatcaagaaatcgggaggttgagaatgagctcattgcgggctacagctcgggataacgtaggagcatgatcatagatatggatatgcatggatatggatacggatacggatatcatggatcagcgattgttataatagtaatttcaatgtatatattggccggccacgtgcagcaaacccagcagggcggaagcagcatccttcgacgccttaaaacccgccaccagcgcctggagagcacactgtgcctcttctggaaccaaatccgggccttccaggaaacccccagggcgatccccacggcgctaccgcgctagggcgccggcgctgacaaaaaccttgaatagcgtctgattgcgatccaccacaacccaccagcccaatttgaagactgacactagtagtcattggcctgaggactcactactgactcgagatttgctgcgcagcctcggtcccggaacctgcgggcgcaacggctaccgccccttgttcttggagcccgccgccattgtatttgtatctgtcgctcacgtttcttctcgtctcgcttacctcgtcttctgtcaaagtccgagtcaaagccatgcgcatcatcaacgctgcgcccctcgcgggctttttatccctcgcgggcttgtcgctcgcaacaaacccgaacggtacgtatggctgcgcggcgctgaagaaggatatccccaactcgttgttcgagcgtaactcgacggtctacaacgatgaatcgaacaacttctggtccaatacggagatcatgtcacccgagtgcgtctttcgcccggagtccgcgaccgagcttggtacggcgattaagttgctgaagcggacgaacacgcagtttgctgtacgcggtggtggccatatgggtatcagggtgcgcattccaatgcaaattgcacggtacgaagctaatgcacaccaaatagggctcaaacaacattgacggcggtgtcttgattgtcatgtcgaagctgaacactctggagctgaacgaggaccagtccatcctgcaccttggtccttcgcaccggttggtttccctgtcgcatctttcctaggtataaggaggctcagctgaccgtttcagctggggcgaggtctactcttacctccagccctacggcctcgctgttgccggcggccgtctcgcgcccgtcggtgtccctggtctgctcctggccggcggcgtgaacttctatggtaaccaggtcggctggggctgcgacacggtcgtcaactatgaggttgttttggccgacggctccgttgcccaagtcaacaagaccagctaccctgacctgttctgggcgctcaagggcggcagcagcaactttggtctggtgacgcgcttcgacgtcgagacgatcaaatcaccgcttgtctgggcgggttcgtacacggtgtcggaggagtacattgatgatttcctcaaggtatgataccgctggagatggg

SEQ ID NO: 11166 - DNA, 466 bp, Emericella nidulans
ggtcgaccccatgatctgcacgaatttttattacgcgtatccagacggatcccctaggccttgtgcggtcgtcaccggggtggaaccccacttcgacctatgatgagacgaatttgtcgcccttactgaccgcttgttctcaccgtccagactgggaagaccatgcggttacacaacttaatcgcatgggaggacaaccacctttcgcgagctggcgtaagcgttaaatgacccctatcaatggcccttcccaacattctccactatagagcgtagaatgcaaaacagccgcgtgaattgtatgatcatacacggatcaaattgttgtgacttcagcttagttttcatccaagagtgactacataggtgataatctttataaatcacgaagaatcgaccgagcatggcttgagtgatgctacatttcgaaacaggagtacctatatagagcgttgactccgagctc

SEQ ID NO: 11167 - DNA, 407 bp, Emericella nidulans
tgggcggtggtggctgtggcaaattgacgcataaatcgggggatgggagcacttgccgtttttatggagaagcgttccaacgtggaacagactaaccggacagggggctaggccagcaccgatggagagctgacgtgagctgtgctggtagcgaacggtggtgatcagcgaaccgctacacgactaggaaccggacgaggggcgcatgtgcggttgttatgtcatgtacaaggctaaactcccatggtatgcgaactgtccactcctccagctcgatgaggagctctccgttggtattgatgaagcttccaccagattgtgaggacgctgtatacgatgagaggcgctatgccagcttgctctaaataatacatgacttgctgatggtgcggtacatggagatcttc

SEQ ID NO: 11168 - DNA, 494 bp, Emericella nidulans
tgagtcagcaaaatattcttaaagtggagtacaatttcgagataaatctcgatgtactatcctggatatccaaaaatggcttgttcctggctgagggacgcgtgaagcgaactcactagattcattatgagaccaagtttggagcactgctagagtgaaaaggagcagatagtaccgattcagcgggtgaaaatggggatttctgtgctctttaccaacaggaagcacgggcaatgccgatctgagctcgttctgcagcttgcgtgccgtggttggatttgaagatgaccgaggtgcaaagtgaggcggtgagtgaggctaacctggacaggagtctccttgccaaacccgtgtgaaccatggagatcgtgtgccgtgactgcgaactgtgttaatctgttcgactatgcctgaatgctttgatgaagagacagtcgggtagatgatcttggctggaatggccctgtgtctaagagtttacatctaccatactt

SEQ ID NO: 11169 - DNA, 126 bp, Emericella nidulans
  unsure (1)..(126): unsure at all n locations
tgtagaagtagcagagcttgcggtggctgagagtggaggagggtgatncagttttatctcgantttttcagacgccgactgaaatgagctctcgatctaatatagggtaggatttgtgaagaacga

SEQ ID NO: 11170 - DNA, 1436 bp, Emericella nidulans
aggtcctgcagtccgaggaaacagctgcattgcgcctctcacggttcgcttttattgcccactggattgcgtgccgccagttcattcttgataatagtcacctaattacaagtgcgatcaagcaactgtcacccttgaacaaggtttgttctatctctcagcgcatcaataacaatactgtagaactcagacgcaatgtctcctttctaataaccctaacagagggtatcgtccatttcacgggacccagacttgcaagtagcatttctcccaatgccagcattgcagataggtgcagagcgcaatatccgctccccatctaatacgacccttcgttcaagcacgcccattctctgtcaacaggtcaattgttgtaccagacttgcaacctagaagtcgaatgtggactgcacttggacgaccaaagacaccattaatgaactctatttccgggaatcaaggatcgcttgcttcgctatgagaggttcaggtttggtcatgcttctcttgtccacatggcaaacttcgatccataagtagtcggtaggttcatatacccttacgtcgctgttacgatgtaaggaaagaaccgggtttcagctaagataagcttaacactagcaaagccttagttcaaagactgcaataggctggtatttgatgttaatctagggagccgccgatttcatgaaatatagcagcttccataactgaccgtgcaggctccgaagaatcctacgtcttcggcaaatcatgacgtatctgatttcttgcacactgcgaggccggtatggataccaggtgctgagcctagctggtttcaatgtcaattgcagttttttatgcgtagcgtcatctgcagttgctaaataattgatggctgaaagctgtttcaggtccagagagggcatttcgaggaaccgttgagagccttcagatgcattactagctgatggagtaataacttgtatatatatatatatatttatgtgcatcttaagcagcttggcaggctttgcagaaatccgagttatcctgatactgatagtgcaggtatgtagatggaggattctccaccaaagaataaaagatgactgagtgccaccggagaattaccgatgtaagcaaggcagatttcctcaatttctggtacgtatctatgtgtctgccgtaccgaaagcaacaaaaaatgggactgggccgttgtgcttatttatgcctgtgcggatggggaaactggacggtaaagaggctaatataccgcactctgcatgcaattaaccgaggccacttctagatctactagaccatcaaccatgaagtcataccaacttcgtccttccacttatcattccttattatcaaccgagatagccttactgaagcttgccgctgaatattgctttgtagaaaattttgttctttggaaatacctt

SEQ ID NO: 11171 - DNA, 1807 bp, Emericella nidulans
cttcagcacctttatacctaacccgattcaaaattgagctctaagcgtacggatgcccattttcaaaccctggaacccacaacgccctcgactccttagctttcaattgcagtcctttcagcagtccataaaccgttctcagcgtcggcatatccaccccccttttcatcccctctctcaacggctcgcccacaatattctcgatttccataaatccacccttctccgcatcttgtgccatactgggcttgaattctgtatcgattgggtcatttcgaatcacaatctctagcagatcctcagggaaccaagacacaccgcacgcctctgcagccgctatgatctcgcgcatgatcggcggatcaagtcgtcaattatgtgcctgctcatgcgcacccggggagtatcgagcccgagaattgctgcaacggggttatacgagacgttgtagacgagtttccgccaccgagcccgcttcacatccggatcgaatatcgtctccaacttattgttcgaattataaatagttatccaccgcttcgcttcgttttccacgacaccctcatcaaatttctgattcgcaaatgcatcgatccgttggatgtctgggtcatcatgcaggatcttgcccggggcatactgtgtcgcacggaggtagacgacgctgctaaggatagggttcgagggaaacgcggagataacaggcccttcgaggttcagtccgttctgcgcaaggattatggtagtgtcccttggtgccactgctgatgaaattatatctggtacggacggtgaaatgtctggggtgttcttcgtcgtgacgaagatgtcgtcgaagggggcaggtcttcggacgtgacattggtaatggtattgcggactgtccaatccagacgattagcgagacacttgatgctttgacctgaggctacgagctggcattgcaatgcgaggcaatacataccgttcgctggccgccacccagaaatccgcccatactggactgagtcgatttcgaatccgtatttcatgacggcgtcataattcgagcgtaggaccgcagtgacttctgccttcctgccttgctccagggcataggagcacatcgcgcctatgccaccaggaccaacgaccaagacgcgggctttttgctgattgtcggtcatattacagatttcgtgctattgttggaggagcggggaagccggggaaagcgagtactagactcagaagatgtcgcgattagctaacttaggcgctttataggctttattgatgcgcagcgagttttgtttactggagctggggagacacctagacttggagattcgtgttatctttctaatccaccaaactatcggagacgcctccccattgcgttgagaggaaggccacagcgaagcaatcggaggatttcgggcttatgacttacaattctcacgacgacgtagcaagagactgccatgatataccaaggttagcagcggctttcattgcatattctatctgtgcttccccgcttatcaaatcctatcatctcaaaattcaggcagaactcccgaagaaaatatcgatgggaatccctctgcatccataccggtaggcatatataacccttctcatgcagtatgtcgtttacaataccttgctattaagatgcctagaactcgacaagataccgacaagataccgacttctagcacgtagtaatttaagatatccttaaaccagtcatcaaggtcctcaactaaatccattcagctgaagtctttggtgacctgaatgcaggattcccgcataactgggt

SEQ ID NO: 11172 - DNA, 2191 bp, Emericella nidulans
  unsure (1)..(2191): unsure at all n locations
gtagaaatcatacatgaactgctgcaaagatgcccctgactccgctcccgacctgctcgcctacgtctactccagcacggcccgttcctccgcctgtggaatgcggtcctagtatttcaggtagtcagactcaaagtctccattactcccaatgtcattagtgggaaaagaccggaaggtagagggagcgtactgtagtcaccagctgaaccatgatgtaggtactgcgactgggattgggacttataattgggcggctgctgggtgtccgcttcagggatctgatatttaaaaccggtgtcgtatgtggtgtcatgatcagagccgtctccggcgggagtattggtaggagagcccatcgttctgtggtctgttggtctcttttccattgtaagaatgaatgtagtaagtgtagatgtgacgatggtaatgtaggtgttcatgctaaggctgctatattatatgggagcccatgacgtcacttccgcaccacctgacctatactatactatttatacgatggcagcagcggctgcacaccgaggatgacgctgggatacggtacggctctggagtaaaattatcacatgtaagcggctatatcgttgagcgcaaggtaatacataaccccagctttaggacagtcaacttttgagctatctgaaatactttgtaccagcgtattataatctcaacgtgattaactcaagattgatcttatcaatacctatgatatatcgaactccactatgtatttatggtacagtggtaaacggcggtacgacaaagccaaatcccccactagatattacgacgctagcagtaaaccgcttcttaattctgcctagcttaaatattctgccggccaaaacaacgcgtcgatacatggacgtaaagttgaactgtttcacaactatacagaacagcatgtctcgtcggcgaaaggagttgaccccagatatccgagccaggctctgtgagctaaaggcgattggatggaaagtcacaaagatacacaagcggtatcctgatatcccgtattcgactatacgatcgacaatcatgcgggagaatgcgcgcaagaaccagcagtcttgtcctcgatctggacgtccaaagaagatatctcccgaggagcaacaacagcttctgggtctagtcgagacagaccagcatatcaagatgcgtgagctttctgaagctgttcaaagcgggccgtcagtgcgtacagttcaacgcttattgagcacgcttcaaaagaagaaacaaagtaatgtgagggccaaacaagttctaaatgcagaaaaagaggctaagatggctagaaacatgcgggatatattgcagagaggatatcttcagaggtatctggtctggatagtgctcgtcagacggtgggagcaggtgatcaggtgcttgattagtccacctacactttccgtcaccaagacgttaattatcgagcggaatgtccatactgtatgctgtggggcgtctagcagataaggctggtggaggctgcgcagacagccacgtggaaaatgcttgttgcgatatatggaaccaaattgacgctttacataattctatcagaaactcagcacttcagaggactagacttaccaaagctaggcatttcaaatcacgggaccaacttaagcgtatcagatagtcagtgggccggtccctttcgcaatcgcatgccggaaactacagcactcagctcgcttgaggtctttcttatgttagtggattaagtaaacctggaggtgcattccattgtagcagtcatccctcagtcaaacgcaagtcatgattgctgggagacaaaattatacgccgtttcgggcgtcgtagatattggactagtcccgttggaatgtagattcgctttgtgtacagcagcccgagtactcaagggggaagctagaagagataggatagacgctatttacatgtaaaatttgtcaatctgtcactgttgacctgaatgtcactgcatgtcctctgccccgcatgagcttcataagtatctcggcccgcctgaggatgtgccctcctcacggcctcctctcagtccgtccggaccaccgaagtaacaaaaggcgtctgtcgaaggcacagtggccccggttctcgctcacgcggggccctcctatcgctgtctgctgcntacagcagaatccccccc

SEQ ID NO: 11173 - DNA, 190 bp, Emericella nidulans
gcgtgtcatagcagctgagcggcgtgccttgtaaggatagatgtactccgtagtacgaggtatattaaaaggagcagcatcatacaagattcttagatcgggacaagtggatatcggcaagctttaatttgtgatgaggcactagtgaataccacatgggcctcttgcggatcctaggactagatggttc

SEQ ID NO: 11174 - DNA, 622 bp, Emericella nidulans
ctgcaggtaccggtccggaattcctgggccgacccacgcgtccgtgccggccaaccctagggcctgacaaacctggcacaggctttttcctttgccttcattcacttgggcagagttcatggtactcactgaacgacatagtccactcctctgtcatacaaccctgcactgtatgcaggtggcaagcagactaagaagaaatggagcaggcggactcaccatgcgcaaggtgaataacatgaagcatgcttgacctggctccatacgacaaggctaattgtggagcttctaacttcaagctcagcactcgctatatgctatcggaacagaacgaggacaaatggcatacttgcaaggaaggtgtatagggaactgatgtgcagaggatcgaatgggtgtagtcggccccttctgccagcagaatcacacttagggcaccattacctagattggcagctgaatcttgccaggaacatgcaatccgaagctcgtcgatgagtcccctcgtaggacatttttgctgccgacactttctccactttccttcggaaaaagttcagaacctttctactgccatctatttaatgactatgtggaaaagcacttccccattccattattt

SEQ ID NO: 11175 - DNA, 2844 bp, Emericella nidulans
ttcgggcttttctgcggctgggggcatgactaagaagctctagctatgtcgacattcacatcttttaatatgtgcggggttcctcatgccatcaagcacgacgtcacgaaggtaaagttaaacgagcgacgatagatccttagatcaccgttgatagaagtagactacatctagatcgtgtcttagatgtttttcagtcgagttgcatagcacgcttaattcatgcaatgttcttggaataatattacccaataagtagactatgctatttgtgttccagaacaacatcaacactgtcattgtcaatctcaacctccgctcacgtgcgaccccatgcaggatgacgtagtcaaacatggttcaggtacgacctcgaatctaatcgaccacgagaacctcagtttatatggcatatctctattaagcaaacagtttctgaggctctaccattctgtctttatatcttctgttcgcatacttacaccaacaatataatcggcagatttgacccaactatacatctgggcccgttttttaacaaacaagcagaatatcgctacaacaagatggtaattggcctactagcaataacggcaattcccacggtgacaggcattgcgctcgggtgtagcgaacagcgcaagcagaacgcacggcaagacgatgaaaagcgcatggcgaagttctatacggatgtggtatgtacggaagatgtcgaggaggcagatgagctagatgagaagagggttgtattgcggaacaacaaggtacataaattgcaatcattgccgcgtcttccgctccagaccgtcattaaccaagatactggaagataggtgtacatcgacgaccccaatccggctaaacgcaaagtcgagtcccatacagggcaagcattttatattgattacccggagcccgaccacatgaaggacctcaaacgcggactgggcctcgtatctacgatacaggataacccaccaatgctgaattggatatactgcgacaaagagacgcatgagctcaaatacgggaatcggacgcagagctgcgagcatgttcctgcgccatgggactggacggataatgagatgacaattatcttggagcggaactgggggttttatgcggtcaaagagaaggatgcggaggggcggtggagttgggctgtttatttagatagggatggggatgatttacagcgagttctgggggatgatgtagttgctgtgccggttaagttgaagaggacattggttggaacggttccggctgacagtaatcagacgggagggtcatagagtgcagggtgaaatctaaagagtgatagaaatatccatttgctgggtttgggaatcttagtagcagatgttgtacaggtttgatattaatcatctaagccgttccagccgtcttcgtcgtcgtcgtcaccagcactgtcggaatcagctccgttctttcgggcttgtgttttcttctggctggcggcaatcatcatcttcttgttgtattcttttcggcgatcgaacccgctcttggtactgattctcgtccggcgttgctccttttcatccgtggcacccttgagacccgtttgcctagccttgacgccgtgcttctttaattccttcttgttcttcttgctgagatctggcaatgcatctagtagccatttctgcactgatcgttcaccgttttctcctcgtagcttttcactgacatcgatgatgttggcgatgctcttgacataaggaatgtcctcttttgtgtagtaggtcactgcgacgccaccctcgcgaccagctctcccggtccgtccaaccctgtgaacgtagacagctggggaattagggatatcgtagttgacaaccccatttataccgcggaagtcaacaccacgggcgagtaaatccgtcgtgacaaggatccaaatctcgcctttacggaagcctttcatgatgtctgatctctgtgtatccgataagtccgaatgaagcactgcgattcgcgcagagccaccggcctcaggaggaatgtcgtaaagaagttcagaatgtaacgcaatagctcgaggaattgtctgtgtgaatataaggaagggtggtcgaagacggacatctgatgttgtcgcagctgtggggtggatgagctgtctgagaccgaggagctttccttgctctgtggcggcgtagactagcttgtgcttaatattcggaatagcggagtcttttaagccgacgacaagtcgaagtagggggtatgacttggtttgcggcaaagacagctttcgctctttgatcgttgtcttggccatgtcctcgatgctagaacccatagtcgcggaccaaaggctggcacggagctctggatgagtgcaggagcgccagatgtccaatgtctggtcacgaaacaagggatctaacaagacatcggcttcatccagaaccaagttccttaccaatggtagggttgcgagaggcttcgtcttgttgtcggagagcgcattgactagttgcaagggtgttgaaacaagaatgtcacttttggtaataggaacgggtcccttgttcttgttgttgggagtcctttcgtcgctctcagattctgatgattctgaattactctcatctaggacatcttcatcttcgttctcacgttccactacccgcatccccttcttcatcagcgttacctttacacctgttccaagtgccagcttcctcccctcgttgacaatctggctagcgagctcctttgtcggggcgacaacgacggcaaagatgccacgctcttctggatgcgtatggtgatgccgaacaatcttattgatcacagggatcataa

SEQ ID NO: 11176 - DNA, 105 bp, Emericella nidulans
agataaccagagcagtcaactgcccgccctggacgcagtcagagtccaacccctgagcggactccatgaaggacaagccctacaatgaagcacgtccatgaatga

SEQ ID NO: 11177 - DNA, 263 bp, Emericella nidulans
tttagactatcatatcgagagaagaaaaagcgctttgatttcgccgaaaacgtgtgcaggatcgcctttagtagtgagagttgattcatgcgggggagttacagatagggtatggtcaaacagggagatcaggtacgtgcatacttgcactgggcatgccggctttctgacatacggttccagacagcgagtgataagtataaaaggttaagagaaagctgacgatgttcttgaatctgacgatggacgtaaagggctagatg

SEQ ID NO: 11178 - DNA, 1497 bp, Emericella nidulans
tgtctattcgtttctccctgagaactggctctcgcaaatattggttcgagtcaggtcaacctaaaggaacctaaagtgaccttactgtgaggaaccgactgccgagacctcttagtaagcattgtccggctgatgttcggcatcccagagccgaaacgaccgcgcaatatcatttccgccttgtgtacagagtagagagatggtgcctgatcaatactgatggtcgaatgacccacgctggttggtgcgatttgggggacggtattcttatagtagctttcgcatttatatgctttcgtgggaaatttgaagatgtagagtagttacctagtagatgcctcttgtctacctgtagcgatgcccgtacaccagcttctgaagctaggtcacccatagtactcgggatatactccgtctaactaattatggcctcgggaggctgggctgcacatgcttattgtatcacctgacactcgggcccggagtcatttatcaagaatacagatttaggtttcttgtggcctgcatatatcccgctggctatatacaagtacctgctctcgagtagctctacagtaccagtacagtagagatcagggctaggcgggatcgggtggtccaagcttcccgcagtcggtcgttccttcctcgtgcaacgaacaacatctcgagttctcgattctcgattcttgacctgcttcgtctcgagcgtctcttccatccatttatcatcgtcttcactgatattttcatctgattccagcttttgtgctttctgcaagtctgagacaatgtaagtgctctgaccccgttccttcggctgctcctctgaccttcctgatcccgtttagtgtgagctcaccgcaagcaaacagaactccaagaatgacgccggaaacgcctggcccaaaatgccggcccataaggcagccaagcgtcagtccagacatattattaccaatcgaaaatgctacgcttggctacctttccccgaggaaaacttccacgcggatctctaggccaatgaaaatgcgccgttgagccctgttgctacttttttttttctcgataaggccctcagcctctccgcctgtcaaagatcatggtcttgtctcgagcgatttggtttctttcaccacattattcaagaacatcccctgctgctcttcaagagagttgacccaaggaagtcaactctgctctctcagacgcataacgggtacgcggcagagcggttgtgcggtggagtggaagaaggtctaccgcggtccacttcgctccaagctctatactaacatgtcacccaacctcagacaatactccgacggctcctcatttgaagaagcacagatcgagtcaaccaacgccggtgttaacaaaacaaaaccgccggtgctaggtcgacagcggtccaaaactgatgacgaaataacaccaaacaccaatgccaccagcaactcactggaatatacggagaaggcagatctaaaaaggcgc

SEQ ID NO: 11179 - DNA, 1381 bp, Emericella nidulans
agccgcgttcagatcattcggagctgttttcaaccaatccccggtaccgtcactctgccaggcgccgccccactccggaaacggtcatcggctgcaactttcctgcccagccgttagacttgctggtgctaagtgaggcctgtcgcttcgccaatgagatcgtcaccgagggtgcaggatcgaaggatatcgtcaaggggtcgtggccgcagcatcctggatcacccatacgtatacgccaagggagcagtgggttccttatgtaaaggaacatgctacgacttgtacgtcctaaaccgtcccttcttttcctgccgtcgtgtcttcattgctaatgatcaattgtcgtatgtaggctaccacgcagccggaacgtgcgcaatgggcaagcccgatgacccgaatgctgtgctggacaacaagcttcgtgtccgtggtgtcaagggtctgcgcgttgcggactgcagtatcatgccgaccctccatggcgggcacacgcagatgcctgcgtatggaattggagagcggtgcgcggactttatcaaggaggagtggtaggccgagacctggagtcgcaaaagtggcagtgcaaagtgatatattcacttattgggttaatgataacgaccattctatcatatactctagcgttctcagttcgttaagccatatatccatcatctcatctcgtctaatccaaaagacaatacaagaaagaaagccaataaatacaatgaaggttgcggaaccagctccgttagaaaataacaggctccggcagaagttcaggcgtatcctctctaaacttcttctcaatcagatctccaaaactggcagaccactcaactctcggcgtaaggatatccaatccccacaactcatccacatacttcaagatcgacgtatgcgtgtactcccccttcgcttgccctttcttgcccttcccctttgggccatgcaccactgcgcccttctgcacatacggcgagatgagcagagtcggaaccctgatccccagcctatcgaaatggaaggttgttggcttcccatcctttgcaacctccgtatacgggattccatcgccaggaggaactttctccgggggaggaacatggtccgcgaatccgccgtgttcgtcgaatgtcaggataaagagcgtctcgttccactgcggacccgcccggagagcctcgtatacgctcttcacgaagccctcgccgagatttgtcggagagggcgggtggaacgaagtataggagcagcattcgggattaatccaggtgaactggggcagattgccggctgcggcgtcactgtagaattggtcgatgcttttgatggagtttcggccgcttctgattttgcggtccaggtgtagaag

SEQ ID NO: 11180 - DNA, 226 bp, Emericella nidulans
  unsure (1)..(226): unsure at all n locations
gcaacgaggcaggagagaacgtgtggtgttcggaaatgatcatgcgctttntgaggggagcggcnacagcctttgcttattgcantgcagatgggaatgacgatctctgatgatgngactgagccccaggagaggtcttttgatgaagagcagcttgcctgctgagtctcaaggcgacgaggaaggccatctgagcaataggttcaggggagagcgtgggattcac

SEQ ID NO: 11181 - DNA, 301 bp, Emericella nidulans
  unsure (1)..(301): unsure at all n locations
tctagcgagaanatgatagggatcaaaaacgacacattcaagtcggaggaacttgtcgaggctgctcctgacatcacatgttggggtttacgccattatctaaattaggggttagcttccgaatggcggcgcttcgaaggtaagtcgtttgggggtcgaagcaagccctaaacgtcagacttttactcagcagcaggttggtaataaacgcgacaagttcggatggattataatggacgggtttggcttcagcagggtgaatactctgctcgctgagattatagtctangttttggaaggc

SEQ ID NO: 11182 - DNA, 197 bp, Emericella nidulans
tccagtatccagctaggaagtgtcgattatccttggaggctgagcagcacagtgagagtaggcgtatgttacccatgctcgcatagttgacgtctgcataatcatcagagctcagtgcaacgagctgcatgatcgggcttctgctcgaggtgcgggcctaaaccgggctgactatgcagctaggatccgtaggactg

SEQ ID NO: 11183 - DNA, 465 bp, Emericella nidulans
ttgtgggcggtgccgcgccacgggtgcacagttcggcggcgcgtgagagatcggggggcttttttgtccgactagcatgcgcccgagagacggagcatctatattaggggaggaaggcaaggaccggcccatggaccatacttgagtgatgtcaattgcacgccatgtgagacccggagcagacttgtgataaagtgcgcatagaccgtgtgcagggccaccagggcgctgggcagtactgactgagacactgcaggtgacctgactgacagtactggccataaactgcttgggggctgctgcacatctgctgggaagcatacgcaatcatgttgattaccgcctgtcatgcgatatacactattcgtgccctctactagagccgctccggtgcgccacatactgatagactgtggctgactgcacgagagcccagatgcagatcacttgagacgactgaatcac

SEQ ID NO: 11184 - DNA, 118 bp, Emericella nidulans
caatgtacttcctaatgtttggctgtcgcgtaatactagtcaagtcactgtgacatccgagtacgctatctgttaccagcattagatcggccatgatcttctactcattatcaacttt

SEQ ID NO: 11185 - DNA, 1953 bp, Emericella nidulans
atataaagatccgtcgagtcctacgtcaccgcgctcgccgagtctttccagaccgtcgcccgatcagagctcgcacgatacgcggccccgaagtagctccaggccagcccgtctatcgtctgcacccgccgtgccgaacttttcacatcctggccatggtgcctcgcccagcccaatgaaggacaactttgaggacttggatgctccgctcccgccgcctccctctctttatgcggtgaactcggatctggccgaaagcacatccaactctcccgatggtagacctcagagcaggggccgacgtttgagtagcagtagaccgggtagttccggtggcctggctgttcccagcggtcccgattcacggcccggaacgccctccaagagacgcagttggatgcctggacgagcgcgcgcgagctcgatcgatgtgcggtccagcccccagctgcgaagtgcttggattgctggattagaacacaagattctgtatgacatgggccccctgggccggggagagcaggtacgtaagcttggtcgtattcgacggctgcattccctcttgttgtgatatttcccgcgcgaccgcaactgagacggatcggacaatagattccagaattgtggaacgagaccggcgacacatacgtttacctgttcccccagaataccggcagaccgccgtctttcaaaattcattctaccgtcttcgctgattcagcttcactaaacttcctcgcccgtggttccgacccgagagccaccggcagccttgagcgccaggcgcgaagtttatccctgaaccctaatagcacacctacctcgcctcttacaccccacaactggaatgataacgataacgacagcgccggtagtaggcgcatgtcgtttgaggatgacacgcaagaggagccccaggaacttcacctctatttgccaatcccgctgaatagtgatgtgtccagtgagggcgcagctatctcccaagaagacttagagacgctccttctcttccgaaatctctttgccttcctcctaggccagtccttgattgcaacaccgcggtcctcgtcgttgttcacaattttcatggatatcgctaccctactggctcgctttgaattcactaatttggacggatccaattttggtgaaattgctacatctagctttagcaattattgtgatgagcttgcactagctgatgttcgtaagagcagagaaaagacaattgaagctattgtcttgggagagcgacttcgattctacccgctctacctggaagggtttgtgcacggtgttggtaagctggacgagttaaaacagctgaggagccctaaatacgggttgatcagtgctataacccagaagcgacttgagcgcgggttcatcgatctggacggtcgtctgaaggtcttgcaaagtaagctcaatgactttgagttcccttcaatcttttccggctccgcaaattcccaaacgaccgctgagagcaaggtggtgcggtacaaagcatggaaggcagccttcctcgagttccggcgatttctgcttcagtactaccgtcagaaatacgggtcgtggccacccaagccatcacgaaagaaccattttgaggagagtggcttgaaccgtaaagtcgcgaaggaagtgttcgaggacatgtgcaatgtctacgacatgctggtcgaccgcactgccctcaccgatcgaacactcgacgtaacgccggttgctgacgaatcggccagcccggcagaacttcagaatcgtgcccagcggattgtgctcagtgagtatgatcggagcacaccaccagtgcagcctccaatcccgctcgatattccccaatatccgtctctgcaaccgctcctgcgtaaaccgctggatcctgagaacgaagcgaaacagatgacgaagaagttcatcgattcagatgttaatgccgtgctc

SEQ ID NO: 11186 - DNA, 2002 bp, Emericella nidulans
ctaccgctgaaaagtattcgttatatatctctgaatagatcgagaacaagttaaagtactgctttaattagagactatgctcgatatacagagcaacttcgcccgtaaatacttcaatgtctgttgtatcattctataaactaagaccctattgctagcctatacatacgagcttacatcttcgctaattcaaagaatgcatagagaccagtacccctattcctgccatctattttttcggctcagattcttcaccaacgtacttgtacactagcctagccagcacatattggcccttggtattcgcaacaacaacgcgtcgagtatggcatcgttcgccattgatgacctcgaagccccagatctgcagcatacaaggtcagtagatcctcacagacgagtgcgcgctgaatcacctgctccgccgtccatctattcccgcgcaggttccggacaaatgtatgaacccatacaggcccgtcctgtttcccttctttctcctcctcatctcctctcttccgccccgtgagatcccagagactctcacttccattctcatagatctccccgcggagaaacctgcccgccctcaggtcatccacctttgtcttcatttcaacatccgggtacacccctttgtctgtgttttcatgctcatctccgcgttccttggggtaaacaaagtggctttgctcctgtaacggtccgaatagaaaatcgtctctctcaaggatgctccaatccatcttcctgacctccgtggagcctcccaacccgcccgtgggtgtgccggtgactgttgcattgaccgtgatgatttgttctcgaggatccataccttgagacgaatccggcttccccggggtggcggttacgtctatacgcaagcctgctaagcagagaactttgcggaggggccaactgagtccttgctgccattccgcgcatcatgcgggttagttgtattaatacggagtgggagaaggcgaggaacggtgaggtaccagtttcaagatcgcttctaggtcagaacagagggctctgtcctgttgaagaaaaaaaactcatacttagcacttggtttccccctgcatctgtcgcagagacttgggctagactcaccatcacccatcgaccgacgaattgttccgccatgacaacggcggctaggaatattcagtctgtagttagccacggcttttgatgctgggttcagtgtatttctgtgaaagattataaactaagagcaaagtgaggtaaaacgcccggaagaaaagtgagtgagctgcaaaggagaaacatcctttgaaataggacggcttcccggccggagtatacaacgcccgccaaaaaagcaacgttgtcaacccctgcgtcaaggaagcagcacagagaaatcggtagtgtcatcctaaacctaatggctattggctacgcggtatatcggagaacggtctgttattccagttgcaattttccgtccagctttgtcccccgaaagacacgaattacccccaccacctactatatgtaggaacgctagtattcaagacattctaggtgacacggcttcggagtttttcgcagtagcggccagtctgtgcatcctgtgtagactgtcaggagaccaatcgggtgtacatgtacactagccgcaaggtacaaagggtcagcagccacgcaagggcagtgtagtaaaatagtagcctctatctataatgatgtcctgtattctgaggactgggtatcaacatctacgccggcggaatgggtttgcaggatgaactaactgaaccccgttcagggttgtaagaaaggatctcatctcgacaatccgcgtcctaggaggccgactggatagaccaagagtaactaagagacatagaatagaggataggaacagctcacagacctgctggtgacattgcaagtgaccccggcatcaaatactatccattgcatggtctatagcgttcgtcacaagatatacatatatgctaag

SEQ ID NO: 11187 - DNA, 153 bp, Emericella nidulans
gtgcaagccggtcgagtcgttcagctggtcgtggcacccgcgcccactagctcgactcggccgggatctgcgatttgcctcccgctgggtgactgtgtgatcagctgtgctagtatttagcttagggtcggcggtgtccccgcatgatcgcca

SEQ ID NO: 11188 - DNA, 1537 bp, Emericella nidulans
attaatctagacaattgctatcatttagaggcaccgttatttctttgtaattcatactattcaacatggataaaccggtatatttttctaggctgtaattttccagttcaagcttgtaacagagagtttgatgcatcaaacaattcaggatcctacctttctttttctcttcagcctccaggcgaggcaggctgacatgtgcgtagtagctgatgcctactctaggcaacccagcctggtgcaggttgaaatggctttgacgtcacacgaagagcagagtgaaatttgaagcctcatagcaaagcatatcgaaaacggaaaggtaaccagctgtcttggagtcatgaccccgccaatataagcaaaagcggcactacggcatacagtacctgtcctgtaaactcagagtctataccagccgccgagggagggcgggcttccccacaggcttccccacaagcttgtactgcatgtacgcagtcgagacattcagaaactatacaggcattctgggttcaaaatggctgcagaaagccaagaaggtcagagctaactggatatcatatccaggccctgttgttctcaagagatagttgactacgaactcgcagttcttgcccctgagcgggggctcgcagagatgcgttcaatatgtggcctgaaacttgcgcgctgatgcctcaggctatgttagcgaccagaatattacgtagacaaactcaaggtttctttttactccccaagtccatcagctcattgattcagacagaacgttgatttcgtcttcaaccggatttaattcctgtggagtcgtggaccctttttcccaggcacaagttccagccacccaaaaggagtgcaaaacaaacatatgaccctttctttcaaggcggtgtgagcagcggtaaagctgacacgtgatgctggcagcataggggggcagagcaacaatgtattcgcactgccccaaacatacccttctgactattgagtctggttttgttggctgtgattgctgggctttttttttttttttttttttttttcaaaaaactgccttctgattttcaggggaattcgagactgtgctgtcaaagaatcccctttggttgaaagtgaccaggtatggggttgatcttggccatcaacctccgccgctcgttggtctaactttgagctccggccctttcaatccgatacctttttcacaaggcggatacgttctgctgttgagctgacttgacttgttttcctgcaaagcggagaaagctgaggcttactcgccagccttatcgagaccggcttcaaaccatgtctgcgatgtttcctgcagctgtacacagtgcttgaagtggttcgcatgaatgaccctaacatgtttttccatcccggcgagctaaaaccgctgtctaactaactccattaaagccagaactgtggtgcccatttacgtagtactgatcgctgaacctatgacgaaaccgcttcatgattttgatcggggaaacacttccttgaactgtaatttggcaagtaa

SEQ ID NO: 11189 - DNA, 2600 bp, Emericella nidulans
acgaacaagtggttggggccttgttgctagcgacgtaccatagatttgtatacttttgtttatacttcttgtatacaagctcggtgctgggggtttgacggtagaaggactgccgagcgtcattgttgtgtctctgccgccgtgagtatagaaggcgtcaacacgccgtcttcgccctgggattgtgctgggtagctcatagttggcacacgagctacaaccagacaagtctgtactcaaggcaagacactctcaagccaccaagatcggcaaagagctgtcagaatcgcacgctccagcgtagggcaataagtcccgacgttcctctgaagatccaggggttttgctagagtcagatacccggggaaatcatccgctcatccgcatctagaacagtatcaggaagtacctgatcagcttccagggcccggttagcgagtctcaacaggggcagaatcagggacccgacgttgaacctaaaaggagctcagcccagtccgtcacgcttattttgtggtctggcaaattaacatctccaacaaataaagccaccaattgtgctctagcgatcgccgcaggaagtttccaccaattgtgaaatagcagcatttttgatgcctattccctcccagagccactgtagctttactcgagttgatgattattgggccgaatgcctggtcagtacgcacagtatataccgtggatatcacatgcgagatttgctatccacgccacagggagccccctatacggcgggcgccgctgacgggaatgaaaatgtaccatgaaaggctgcgaaactgttaacgggcgaagcttagcgtcaatagtcgtgatttctgtgggcatgaccgttatggacatgtttgcgaaggacacctgcgtagcagaagaatcgagaagatggggctcggttcaacagcctaaaatcacaggcacataattgggctttttcggtccgctagcaaggcttagctgtctcagggggaggtcaaagcatggattctgagcgaaagagacagaagccggcccattcgcgctgtgaaaaaaacaaggattggacggtctactcaagctccaggcttcggcttcacgggcgagcggatcgctcgagatcgcctgtcccgtcactcgtggcccccgtttttgagatcttcgtgacgcgcaccaggctacaatgattgagcacacagtttcttgatagggtcgcctgatcaatctaccgggatggtatcccctgttgcattcgtctcacggtaagctgtcacagattctgcacaatgttggagatatgaccgtctagctacgcagggactttcccaggcaggaggattcttcgtctctcaaagtccctagtcgaaccgaagacttggacctggaacggataagggacaggattcagggaaaacaaggaatatcgcatccacgagccggtttgaaatacggttcactaggcgtttcagtttcttgcctattacccaatatacgaggtttgacgcagctagcgctgtatagacccgttccgcccttagcgcagtcatagcttcaatgtttttttattagtcaagtatagaggaaaaccgttaatcaatgagttatcaatatgtgtttatagacgctgccttctgcttttcttatcattggtggctgggcagcttgataatgatattatgaggagtcttgacaatacgttatgggccctcagatttgcacggatagtcagttactgtcttgatctttcgctctttgttcgtccgtagaaagcaccgtcaattgaaaacgatggacgttgcacgttgactacgaccgaggttctgtcacattgttagaatcggggcagtgccactgcccatgacctaccgttcacgctatctacgctcgggagatcaagagagacaagggactggtttgccggtgcaatgagtcagctctgattgattccataaacgccaggtacatcgcggatgtgtagataatctccttcgtatgtataggctagtgtgtgatatgagtcgtagagcatggaagaggcaatgagcacctagcacgtagcgtgtagcacgtagcagagagctgcgggagaagaggattgcaagcgaaggctggagatggctagatcaacactgtacccccgctaagtttcattgtccagcctcgaggcattcagtcctgaactctgaggtccaagccattcagaatccgaggttccggccgtaactcaaagcctgttaatctatccaccaggagcgatcaccaggagcaagtcatgattaacctgcaatacctcgccttcaggttgccactctccagctgctgttaagtccaggatccagatgaggataccacagcgagaaccccatgattcgctcgcttgcgcggactctccccaagcagcccacagctagtatctctactgcccttggtctgcatcatgcgggccggtatcaaaccgtggcgtagtggttggacacgggcacctgcagtgcaagcaaggggtgtttggcccttgctgtggcaattgttaagtatattctgccatccggccaggtaccagactctaggctgggtttttgtagaagtaaaatctggaggatgta

SEQ ID NO: 11190 - DNA, 224 bp, Emericella nidulans
ggagccaccgtgctaggtccacgtaggcggtccggtccgatttagcttctcgacgcccgaggcgatgcgcacggactcgtgttcactagcggcactcgtgatatcgacgtagtgaggcgactcacccgtataatttcgaaggctctccacgaagcgcccaggaaactactcacacagagcatgagactcctcttctatcgtcggagaccgcggaacccgcttgt

SEQ ID NO: 11191 - DNA, 218 bp, Emericella nidulans
atcgagtgagctcctttgcttgcccagtttgatgttttcggtatgcctcgtccgcttcaggccggtcgttggatccgtgtatttccttcttaggtggtgtcggtgcctgtctggtggtttctctttgttctggcgcatgaccgttgaccgctgcaatcgtgcatggactctgggttggtattgcttattgtgagctgttgccaaggtttagtggtttt

SEQ ID NO: 11192 - DNA, 392 bp, Emericella nidulans
gaacaacagctacagacgagtcttacctccagcttgtgtacccgggatcccttcccaccctgtacgctcagaggaattatacatgggcgccaaacaacgtgaccaagcgcgccatagcatactgctaggtacacgagctgaaaacacttatgctacaatagccgacgcggtgggaacggttcgtccgggcgccagagacactactgccggcgaatactccggaacagactgacgacgcatagacaagcggaatttatgcgaggaaaattacgagggcctcgacagttggaaactggaggggctcgaattttggaacacggctcggtggggcacaaaaggagtgcggagtaataattacgcgcacctttatcctagaaaaacggagaacgggg

SEQ ID NO: 11193 - DNA, 125 bp, Emericella nidulans
caggcttaccccgctgcttgcagttgctgtcatcgtaaggcgaaacaggtttgtagaaccttgagacgggaacttcccagactggatatctgattatcgcgggtaccacaactgtgtggaagaag

SEQ ID NO: 11194 - DNA, 117 bp, Emericella nidulans
cttctggcccacggctctcttgctatggtgtcttcctctacatctcttggcgtcccatgtgttagccctctttcgcgagaatgggctttctgtatctgtctcttgtatcggtttccc

SEQ ID NO: 11195 - DNA, 414 bp, Emericella nidulans
cgcaaagctcttggatgagctgtgcgccaggtcgctctcgttaaccgcgccactgatgaccgaagtgtatacacgttggagcctttggccgactggttgccctctgcggctgtgatcgcgaatccgagccggacaacgctaccggtgtcgtgtgtcgccgcagctggcactgagagacatcggtcatgctgtaccgactgttcccatgctgtctatactgtctatacaatgatgggatcgtcttaatgcgaatgcccagactcgtaactattgacgaccatgcttagattgatataggacgtggttccggaggcgactaggctagacgctggaagtgctgtcctgcccggaaacgaacactgccatacctgaagcatgttccacgtgcctagtacgagctgcctatcgatggtc

SEQ ID NO: 11196 - DNA, 2837 bp, Emericella nidulans
  unsure (1)..(2837): unsure at all n locations
cagttcttatattatgggccacggactagccaatatagttccacctgtagccgccgacacccctagcctcaccctaacaaccaagcccaacccaatagactcttcgtgaacgagaaagaagaaatgatccgtgcaacgtgcactactgcagccaagaatgtattccttacagccgactgcttattcgtcaactccaagtctccatccagatctaagcgcccggggtacagatttagaaacactgtattcagcaggtcgtgagtagtgatgcccctgcatccttctgtcctgcaagggatcctccattaaccaatggattgattttcttctcggtccttgtggagagaggcggctacgggctttcgcgtgtggccttctgcacgagatatctccagcttgtgtttgctgaagatgaagaatcaatgtcttggaaactcatctgagggggcgagctgctcaggtgccctccaccaaaaactatatctaggcagagcacggatcccttatagtcattgtctttgtttcttcctctcgtccttgatggccacaggataacattccattctttctctcgctctcttgccttccttcgttcttgaactccttgtcttctggaaagactcttctaatcttcattttctcttccggagccgttgaccggaccctagttcagaccatctccgctcatcgccgttcgctacaatggcctccgcatcattggcagaatcctaccacgggtcttaccacgcatcctgcgcatccgacgaggacgagtcgagctttctgaaaagaattcgtctcctccactgggttcgactcggcgtttcgtcccttgccctgggtatcgctatcgcaatcattgcctgcgaggctgtgccctatcgtcactatcgggtgacatcctccttcgagaatatcggactctacctctggccgttaaacctcgatattcgcccaaccatcgccatcctggcatgcggatgcgtagttgcatttctgagtctgattttcattgtcgtcgctctcttaccatctgttcgttcaagattttgtcccccattcatctgaaaacaccgactaacttcccaacagccacactcgcacatccgtcgcgcaaacctcgccgcagtagcaacatcatcctcaggcttcgtcgctacactcgtctccctagtcttcgcaatttacctgcccggctcctcgtaccctaaaaacttcggcaacgtcgaaaccctccattcctggacgtgcaagtggaaggcgtcccacaacctcccgctcggtttctccgatgaaagcagtgaaacgatctcaccggcgccagtacactttgctcgagattgcggtgctacccatgcagcttttatcctgcttggtatccttgttggagtcgaggtcatcatgggcgttgcggcaggagtggggacttggcttgagttgagcgtcgcgaggcggcgtgggcaggaacagtaccaacttgagaaggttgagacgtcgtttgggtttaagaggtgatcgccgtttaggatgttggtatccttggttggttattattgcagggggtatgaacctttggttgatcctggaaattgacaacgtcattgagaattctctggcttgttgacgaggagatatcctcttcgttgtggaagtgtgtgtatatactcttgtctccaatagtctatggtcttcaaagcgggcgcggtaatgtacggaacatatctatgagttacaattcaaccctaggctatggtcgtgataggaaagcagttcgtctgggccaagcaaacttcttctagttctacgcttacttatccaagatatgagattgtacttccctagtggctggaatctcggattggaaggttgcttctctgcttacaaaaaacaaggttagccggcattcatatccgaacagccacctctacaacctcctctcttgccttccttcttgcctttccgtttgttatccctcttttcctctcttctaattatcaccttctttcccgccccctttgacatcaattctaccatggcttgtaataccctatgaagacgggctttgatacttctgacctcgagttccggagcagcactctgaacagcgaaacacctgggatgatccataccgccgctcgctttgactggctctctaactcgagtacgcataccagttacctttccctccatgacctaccaactaacatctttctacaatagaaacgatgttgtaacccaggaaacccccataacacccacccaggctgtaatgacaacgaaagcctacaccataccaagtttgcccgggtgtctatccaccgacgtgacagtgacaacttgggaaagatggtactatataattagcgaacggatagctttatttgacgtattctacgttgcagcaccgggtcgaagagaagagacacatgcaactgcccacctcccctttagtatatccagtacatccttatgattatagcggtttttgagataatcgtcttcctgccagtccaggatgacgccgaaggtaatatccatttctgggatggtattgtcccatgtagtagtaaatatggaaatgatcttgcagggtacctgggtgcagtcactggaacagcggtggatagtcagtactcgagggagcattccttcggtctcgtgttgtgcttagctttgcatgctcctcggcagtggttgcgttttattagtggtgggaggggatatgtatggatgttccggagtgacttcagtcagtaatggccaggttctgcgcccttccgtnctgggctctgaacaggtctgaatctggtcgaggggaatgagatgcagagtcggtt

SEQ ID NO: 11197 - DNA, 2691 bp, Emericella nidulans
gtgggagaatgcgtcattatgtggaggggaccagatagcgacccagggaaggagaagacgtacttctagcgacacggggcagaatcaaggacggatgtgcgggagaagataacacagtgaaggtagattctccctagtctagataggttgaaaaagaggagttgagtttcgacagttcgcctccagggccgaaacttgagagatgattcggtgaaagtgacggtctcgattcctgcaaagccactgcgctgctgtgctgggccgacggtagcagcccggatcaaccctcggcccgaaactcctagtggtgatggtggatgtgggcttgtggatttctggagatcaatgacttaagatggggtacgtaaccagaacagggcagtatgcaattataactaagaggagcttgcgcccagaagctagatcagacgcactggagacaggtgtcgatcgatatcgtcatgactgtcagcagaggctctggcggtatgagctggctactctaatctggctagagcagagtataagactttccgactaaaccatcgcggacattctcttgcttgtttcttcttatagtgccgaaatacctgctaagacacccataccatgcttatcaaagcatttaagtcaacaagaagcgcacagtcaaaccttgcaccttacagagaattggccccagcacagactcagtcatgctgagttcttcccctcatcgggtcttggctccggttccgcgggccctctcataggccctccgccccagaacctccagtctagatcccgctactgccgtctgtgtggaagcaaaccccgtggctgagacagcgaatatacggatggttaggcttcagcccttgatgacagaccccgaagatacccgaatgtgcatggccactgaccgtggctgaggtcgcacaactctttatcaaaacttccgtgctacctttcgccgttctgctctctctttgccctccttttccgtagtcgttgctttcggtaaaagggtcctgtcctaggatgtaagcggcgcctcagttgctagtaccgttagaggcaccaggcgcttcccattaagattgcaggaacaccgccatttattcctaagttcagcccggcagggcagggcgatgggagctctggtatatgctgccaagcaccacctcgtgcgccaagacaatgcagctctgtctgtctcgtcatttcctcctaaccacgttgcagtagcacatcccgcctctttcatctagatcttggcgactcatcgaaagagggcagctttgaccgaaaattggacaagaggtggcggtatccattccaaggcaagcttgagcctccgcttgcagggaagatacatataggaatggttagtgaggtcgcgctcatgctcaggcagctctccaactatccaccccggctgtaatcaaaactccccacgtgaacattgcatatcgcatctgtaagcaggccgcgaccctgaaagaacccggaaggacaaaaaagcaaagaaagaggcatcatcatggtaattagagttcgtcacgaaggtaattcgtcaaagctgtgcttcaaaatagctgagtcccgccacggcatcacaatcacgatacggttgcagatgccttccgactctgcggggtctcctccagctctatgctcgtgatgtgttgaccgggcaccaccacgagaccaatgaatcgactcgtcatatttaattttagcttctgtgattctttcggagtttccggcgtcgtgttcagggctgcatcttggacagcggctgttgttggatagcgatactcatgcgtgttggcgagaatgatattccgagcctgcaatgtaaggacgaatcaattatgggcccaatgcaaataacatctcgttttctctcgtcaacataccgcatctgtacatttgaagacgcccacgaaaatccgcgtatctgtcgcgtgcactcgaagtgttctcccgatgagcgactccagatactgtacagccttgctttcgtccattgtgctttgtaccaaacagtggtcgtaatccacgatccttgaactggcttcctgctgacgcgaattggccgtgagaagaaaagtaggcgatcaaccttggattgttctgggtctgcgcgaacctagagactggcgtaataacttgaccattagccaccatccaacagagcagcaggctgatctagcacatttcgagtaatacaaacctttattctgggctgctcaactgtaactggcgagctggcgtacttgtggtatgaatgaattgattacgttggaactgcttaggacttggaagttgcggcgtagatcttgagttattgatacctgaaacgtcaggcaacaagaggcagttagttaccaaatgcagttaaaggaacctaactagttgacctacattacctggttagttatccttccttatattgaccatggtgcaagatactgacctacaaaccacttactcactgacatcctcatcttcagaaagtattccagatcatcaagatcagttctctcaaatctcttaccgctggtacataggtagtcgaaacccttggcggacgtcttcagggtccggctcatacctgagtcgaatgaaagccaagagcttggaacagtcttaactgtgtgtacgtcccagagagcttctacgagtatttcgggatttctttggagc

SEQ ID NO: 11198 - DNA, 684 bp, Emericella nidulans
gcctgccagcccgccagcctggccgccttcgcctcctttgtgggatacactttgtccagtctgctggcgtttttcctgcgacacggaggtcaaattcagaggcgagcacgggctcagcttcgcggtatgcggcaacagccgcgtgccattctgcctcatgggtcttcccgcgcgatggtagatcgctgaagaagtcgtaaacgtcttgggggatgtggaagtgttcctcagggttcaggccaaaggcgcgcttgattttggcgacttcgtcgacgcccagggcggcgccgtgcgcatcggccgtgccggcttgcttggagcctacgccgatggtggtgcgaatgttgatgaaagttggcttggtggaggagcgagcagcgaggagcgcattggtgatggctacggtttcttcgtcagtgatgatcacttgagaagacaggatgaagcataccaacaacgtccgaatccccgtcatacacgtcaatcaccttgaagcctgtcgcgcgcatcttggtgttgatgtcttccgtattggcaacatctgccgttccatcgcaggttacattattgttgtcaaagatcacacaaaggttgttgagccgccagtgcccagccagagacagagcttcaagaccgacgccctcctgcaaacaagcgtcgccaaccatacaccaggtcatgttg

SEQ ID NO: 11199 - DNA, 156 bp, Emericella nidulans
cacatcattccgcgatctaccactgtgaaaccttgatccaggcagccagtcgtgacccgtccgatgctagtagataagaagccagctccagtcacggttgccaatagtcgagtacgagttccgcacttggagaagtcggtccaggattgccatatc

SEQ ID NO: 11200 - DNA, 116 bp, Emericella nidulans
tttagattcttagcctagacattccatgtaatttgaatgtactagttctgcattataacggatagataaccactcagacaattttgtttcacataattataggatactacgtcctc

SEQ ID NO: 11201 - DNA, 3873 bp, Emericella nidulans
cccgccgagcgagggcgctctttcaaccggccgtttttttgatgtgagctcggctcctgatattgaatcccttaatgatatacttaccaacgctatttctgcaccaggttcctgttctacaacctacacagccaccacaccatatttgacgagattctggagcatgacgagaaccgcgacgaagaccgtgacaaggaagaaaaacgcgccaagctcactctcaccgaatgtttgatcgcaatcgccatagccctaacttttgtctgcatgtcggccgtcttcctcgtcaacgaaatcgagcatattgttctcgagcaaggcgtgccggacaacttcatgggtctcatcctcgtgccagtcgtcgagaaagcagcagagcacctcaccgctattgacgaagcttggtaaacaacctatcctctagccgttcaagccatgaaacttactaacttgtgcatttactcagggataatcaaatcaactttgccctcttccactgtcttggaccatcaatccagacggccctcttaaacgcgcctctggccgtgatcgttggctggggtctcaacaaagacgtaagcctgaattatgaaatattcatgatcgtccttgtggtcctggcaattcttgttgtcggcaatttcctacgcgatgggaggtcgaattatctcgagggcggtctttgtgtcctggtatacatcattatcgccgttaccacgtggtactatccgccagtcgaaccgctgggtagtgaagggggtacggaagccgcggcagaggcagtcgctcatcggcttatgttgtgatctttggtgtcatgcttttttttcctctcaaaacatattcagcgagtgtttagagtgtgttgctggtgcaatgccaaaggtattatcgtatttatcatgctaataagtttgaggattttgaccatggtcggacagcattatgagagctaactgtttattacaatcatgcaactgccttgctgatatgacagcaaatgccactatggtaatttagtagggagattgtgcgtctagacgtggtcgtattcatgcagtaattctaagtacaaacattgctgctcaagccggcttgatcatccttcctgatccgtgcccatcaaggtcatttggaaagggaaaagcttcaagaaattacaaccgaatgaaatctgtgagagacttgcaaaataaaaaaaaatcaatgtaaaacgccccaagttgccccaggaaacagcaggagaacgctccagatactccaacaaaagaaacatggaaagtaataacatcaaagatgcctcgcttcaaaattggagaagaaccccggggttgcaagggagaagacagcgtatccgtcgcagagtaaagaaaagagaaacgataaggcaggaatccaaccacgcagatgttagtggtacatggcgcgaagaaaaacccaagcatcaaggctagattggtggtggtacacaacaaaagaaatattataatgagcgtgataaccattggcgcgtggcagatacctgtacaagcgcgaaaggtggtcggatactagccaagatgggtggtttaataaggtgagaggtgacgtcgcagagaattcgtatgcattccttgcgcatcaggtgcctccaccggtttgggttaccgtgttggtcccatggaaactgaagattaaaagtccgtaatagccgtaggaacgccgtcgtagattgtactgtaggggaatccgagaaatcaccaactccgtccaaatgcaataatatgacaggtcgtattaatcaaacatcgatcatttcggcatcttccgcaagaacatcatcggcagggccccagttgccctcgtacacggtggcgccagctcgacgccgtgatgcgacaaattggactccataagactccagaatgtgatcagctgtgggtctatcaagcggttcaggggagatcatccaccgcacgatcttatcaagcgactgctcatggccggcatcgatcataaaggcgggagggtctgcgagctcactactacgggtgaatgggactggctttcgttccctattgctgccaaagagatcagttgtgccaaaatcgtcgtccccaaagtccgacgcgcacagttcctcaaacgatggctcctctgaaatgggattgcctgacgcgtcgcggaaaacggtggtctcggagctccaagttaaactcgggacatcactcatgtcgccgttcctgagcttctgccacgaaaggccgttgtccggaagttcgacattaccagcaatctcgaatataatcaagcccagtgagaagatgtctgcaggcttgtcatatcttcccatcagaatctccggtccgatatattcacgatcaccttcgccttcaatcccctcttcggctggccaccgacttgccatgccgaaatcagcaattttcaaaacaccttcaaaggtaaccagtatattggctggtttgagatcaagatgaatgaacccggagtcgtggatatgtttcaggcccttcttatagttagtatacttttagttacatgtaaacgaggtgggcaattaccgtagacagctcgagcaaaatcttccaaatccggaaatcatcgagtcttgctttgagtccaacttgagcaaggaagacgtctaaactaccttcctcgcagtattctgtttgaatatagagatgtccattatcttcccagctgtcggcaaatgatataatatggtcgtagttggtaagggccttcagtgcatcgacttctcgaatacggcgttcacggtccttcaagcctgagtaaggttgttttgacttcttaaccgcccagacctggtcaggcagcgagtttaaagacttgggggtagtcgagaatattgatggcagagatactccgttcggctgagaaacacggtaaacttgcgaaaactctccagtgcccacaagctccacgcgttcaaagcgagatgtgaggcacgcatccacgtcgggagtattatgtatgttcaatgggagactgggcctttttccaacgaaagaatcacgaggaccggtcggggtcgctggcaggtttaaaggattgaagtctggctgggcggattgccggtcattaggtcctgaaatagttagaccactgggatcgggagggcagaaatgttcttgaggcgtacgaggtgattcatgttggaatctgtcatgtagagggctggaattggtgccccttgcctcggacaaacgctcgagagaagcgatttgtgatgcagtaggagggtaggttcgagacgggaaaaatgattgtttcgttggtgttggagggaaatccgattcactgagtggctggctgttctgacggttagagggagattgtgtctgtagcccatatccatcatcgccatcaatgctagccaagcttccacgccgcgaggccccttgtcgattgaagttagtcccaaatattcccatgcctcgcgcaaatgggccttgtttaggccgtgcgcttgatgggttgaagggggatggaggtggcatgtccacagcattgctccaagccggccttccaagtggtccatctggttgagccttttgactggcagcgaagagattgacaggccttttgcaaggggtgtcgggcatgttcttgctaaatcctaataggctatgagaatcgtcggcattgcggtttttcttcgagatgaggccagtagacatgaacgcagctgggagcggtttgacaagtttgtagttctcaggcgtagcgaaagaggccgttgatgatgttgaatcttcgcgggtgagatggcgtgcactgcttcggctcgcgtggcacctgctggaagtgattttgagaagttgataattgttttagggcgatcacttttct

SEQ ID NO: 11202 - DNA, 802 bp, Emericella nidulans
ttgggcgcggagggggttcgcagggaatggggcgttcatggagcgatgggacgtggtggcgaggcggagagacaggagaagcagggacaagtcggagtcaagacgatgaagccggaagagttccggaggtggtttctagaatcgatgaagaacagagagcgcgcggtgcttaattctttggttagaagtaaggtatgctacgctgaatacccgtccaaatgtcctgttgtactagttcttctggaattgttttgtgctttgcatgttgtggtgcttgatctgacggcttaaaagggatctttgattgtgggcgttgatgctagggatatgatttcggtgaatgagcgcgagggcgaagtatacttagagattccttcggcgaaattgtcgagcttcgcggtgcggtactcatttgtcacgccctttccgacgctacggactggtatgggagaggatgagagggagggtgctgagagcgaagtcggggaagaagaggaacaaaaagctagccagagtccagagttggagatatatgctggtgttgcaggcgggtttcaacgcctcttcaacaaagtcgaactggaatgggaagatggcgaaacggagcttcgagaggtaacgtctgggtgttcgtttagctgagtgcgatttaccactgacaaaattacaaggtacctctccctttaatcttaagtacacaaaatgtcacccttggagcgagcaccagccgagtactcagcgatcctaatcccaaggggcatccttaagagatggccgttctcgctcttccaggacacgcttg

SEQ ID NO: 11203 - DNA, 2344 bp, Emericella nidulans
atcctcgcaagagaggaagaacggcatgcactcgatgcaagaccaggaagcaaaaggtggatgcacccagcacccttaagaaacttgagactgacaaacaagtgtgataacgagtatcctgtctgctccaactgtctcagagccggcgctgaatgcgacaaggcatcagttcggcaggaaaatggctctcagagcgagtatgtcatgtcagcatcatgcaatgctcttactgtggctgctgacatagacacctgatagatacactcgtgccctagaggagcgcattgcatatctagagtcgcagctagagtcggaggccgctaaaagcagaactgctagtaaccatgcacatccggtcgcaacgtttttgtcaccgcatgcccaagatactgctgggcaaggacaggcaggcagtaccgggagtgctggtagtgggatgggaaacggaattgaccacaatgcggtaggagaacttgtaggatttcttgccatcaactccactgaggcgcctgcgtatattggctcgagctcgggactctccctcgcagccaacctgggcgaaatggtccaggccactgtgtggaaccaagtgctgtcttcatcgcgcaatcagccttctctctctggtgagggtagagcgaatttagatcccagagtatctggactccctccacagccaacgccgtctgacagggctcctggtctggatcgcccgcgtacgttgcgcatggaagagttgcttgcgaaaagcacagaaccgccaaacgatgagatgggtggacggattcttcacgcatacctgactaggcttcatgttcggtatccgttccttgaccgcaaggaactctggtgtctgcatgaggaccgttggcgactagctaaagcgaagcgggaagagctcacaaaatccgaacgattcggcatcttcaagctatatctgacgtatgcgattggagctaccactatgcagttgagtgaaaaatacgactatgttccaccagaggtatcctttcccgccttcctttgtgtcttacacttctaaatatatacagcgattttacatcacagcccttcagcaagtgccagctatgtgtgagactagatcagtagagaacgtcgaggctatgacgcttctagtcgtataccacctgcgctctgcatccagtcaaggtgtctggtacatgatcggcctggctatgcgtacagcaatcgatctcgggctacaccgcaaagccaacgaactaaacctcgacccaatcacagcacaaatgcggcgacgtctgttttggacagtatactacctagaacgagttgtatcagtgtctcttggacggccattcagtattgcagacaggcatatcgacctccctctcccggtcgacgtcgatgacgacgtccgtgatccagcactgcttccgccggaatcccccccagttacttcgcccgagggtaataccaatggtaacagcacgagcagccgtatcacatcactcaccttctccatatacctgatcacactccgccgcatcgactcgcgcattcaacataagatctaccgcgctgacaggccgcttcatttactccgctccaaaatggaccgcctttttctcgagctggaagaatggaaagtatcggcccttcaacgattcacggggtcagaccttgactaccccatgctccactacaaccgtgccctacggctcctcatccaacctttcctcccttcacttcctctcaccgatccctactatcacatatgcctgcgcgcagcaggcgatatctgccagacacacaaacggcttcaccaaactttggagtatggccactccttcctcgctgttcaaacagtcttcatttccgggataacccttctctacgcgctctggacacatagcgaccaggtctggtccgtccggatgagcaatgacatccgcgcttgctccaccgttctcttcgtcatgggcgagcgcgccgtttgggtgaagaaataccgcgacgcctttgaacttctcgtcaacgccgccatggagaaacttcaaggcaacgaggccgcgaaaaaagcgggaatggccgagttaatgacagcccagcatgctggactcggagttggaccgggtgctggatacggtctcggcatcagttcgcatgccagcgcaggccagaaccctaatcccgcgatagctaccgcgtcgggataccctggtacagcgcacacacatcacacagtcgtcacacccgactcgaatccgaaccagggtcttttcgacccggcaagtcaggaccacggcgtgcggatggcgctacagcttgcgccgtggattgatccctttagtagggttattcg

SEQ ID NO: 11204 - DNA, 530 bp, Emericella nidulans
ctatgtatatacacatacgatttaggtgacatctatagaatactaggatcctgtgatcgtcgctggagcctgagagcatcatcgcgcgatcacttaggaagtcacggctgtaggtgtgccactgaccaaacgagggaggctgattgcattccatgagcaggaccgatactatccagtgcatgccgtgctcagtgttcctgcgtgtatccatacctaatctgggtgcgcctgccggacgacatgctcggggtggacaattaatgaatcacgatgcgcaagcgaagaggcttggacactcgagtctgccatgagaagctcggcctgcgaccgccataggagccgtgtctgccttcgtctcggcggacacagagggctggcacctgtctgtactgcttgcgcatagcacacctgcgactcgtctgccgagtgacatcaccatgatctaagcgtatcgagcttgtgacagcctggcactagagcgccgacagcgcgtcgagagatgctgctgcgttactgcaatatacgagact

SEQ ID NO: 11205 - DNA, 1788 bp, Emericella nidulans
tgacgtttcattcaggaatataatcctcatgcttatggcgcccgtctactccgcggaaggatcaggacccttgaaatctgagattgagtcgtggcctcggccctcgtgggcctccagccaacgacggcgtgtccgaggctaccacatgtatgtaacttgcttgagatgctcgctgtacccctctgaagtacggtatgtaagtcggcgtaattgaacagacgctgacggtttcgtacacggggatttatcggggagaattcgtgcctttaccttttcagggctagacaggaggtttgctttgtctaatctacttacttctctcgttctagtaatatactgtctatatttaaggatacatttgtatacactaaactataccagtgtcgttcctacatcactgccgatctaacaatacctaccgcgtgaggtagatatccagacccttcccaaaaatagagtcatcactatttaatgagcgttggcaatgggctgaggtaggcagaaagcatgttcagaatctggcagggggtttggacaaagtctccaagtgcccgtctttcctgcgtccaacttcctcgaggcagccgaggccgtgtatagaacacaaaggtctcttgacactccggcactgctgtctgccgattgaaaaaacgacaccgcgtttgtagagatttagaaagcctcctgctgattaatggtgcagctcggccagcccggcgtccgccaatgcttccaagtcttcggattcattgtcaatgggctcaggaaagtccgtcaaggtgcaggcactgatttagtccacaaagccgttattttgaatctggtgagaatcaacaataggcggccatttacaacagcgcctcaactgccgtgagtgcaggagctcatgctgagcgtcgctgagggctttcaatctaaccgtgtcgctgcagccgacttgaatctggagtttttgagctcagctaagagctgtgtcagaagggtgcccggagtgacctcactctttgtacaccgcatagttagcgttttgccccttcataccatggcttgtagcccgcataacatgcctttgagcaagagcactgtcgggtgccagttgactggttatgagctcggccaaccaacctccatccggtacagtcaatgtagactacggccagaagaggcgacgagaactcgcactacgaccgggcatgctctttccatggaactgttggtctagcattgagaaacggccgggcggggtgtgagtgcaaagatggtaaagactccacaacggcatgtccaaatgaccaggtgcttcttttcttgtcgagatctactctgcaataggcgctgcgtctcgaacgccgagccaacatcagcagaggcatgatttcgaggactgattaccgcgccgagggtgaccccgagccttgattagcagaagtgcttgacgattccaagtcgagcaacgtcgatgcaaagtatctggcaggtccaacagacgtatgtggagtgcagatgcggctctactgtaggcctagcctagactgccgggctgacgagatgagctggggcatcgactgcccgggctggacgcccagataaaagactactagacgagtaatttcgatcatatatctgcgaaaaaggagtttttgtctttaactgaggttcttttgtcgtagtagacaactgttgcctgtccggttgtctatgcagaatgaaccttcgtcgtatgtgcattcctgacggcgtagcatgcagtggccacatttctgattagcgattcgcagaagcagcgac

SEQ ID NO: 11206 - DNA, 3077 bp, Emericella nidulans
gtgtaagatcaaggccgagatacgggctgcaggaactgcggtgtaatccaaggcaatttctgccggtcgcatgaacggctctgatcggcagaatgctgttgattccgtgcgtgatttggaaattgacggaaagtggctaaaaagcatgaactgggacgctggtgcggtggccgaaagaatgatgatgcctggcgagaatgagggggatgtgaagggaagagaatctcatacccgcatattgatggcctgtccagtgacgtgcgagtccccaaaatctaacatcgtgcacgagagcctgcttctttatggtatgatctcacagccaaatatcctattttacggacaccagtatttttccttcgacggtcgactccctgaagagatatattcccagagaggatctaccccatggtcaatctgtcgaggccttctcccctctgaagtggatactccatcagcatcctctagtgataaaaacttcgtccgctatcttcaaggctaatgagccagtgcttctgataccatatcgaacggtggggaatatcagcttgtatgcctaatccacccagtacggactgaatgttctctgcaatgatagacatcgcaccgggtccgggatatcggtagaacatggatatcacataatgaccattggccgttgtgcagttaaatggacgtatagcagctatctgaatgtttagatgaaaactgagcctagcataagaagtccgtagacattttgacccatagatgcagatgcaaagctatcacgaacccaatgctaggtaagctgactctatcaccactactcgagctgcttacgggctctgaggtctgcagagtcgagaaggtgcgttgatcacactgataggaaacatcaatattctcgccaagtcatttgctttgtggaaatctagctcgtctatctgctgttactggtgaaatcaatggaagtccactttgtccagggctattgaccgtcaagcgtagcattaaaggccttataagaaaatgaagggaagctaaatcacaacttggagttccctttcctgcttcccactgccgtcgttaacgacggcagtgtttgaacatgttcttcgagctggaaagtagctgagttaatcttggctgtgaaacgcaatacgaaattgcctaacactgagaaggaagtatgccaacatcctttgcaggaaagtcgagtaatagccaaatcgaatgtggcgtctaaaccgtggccgtgttgcagctgtcacttcgttttctcgaggtgatatgaaggagccccaagtctactcagacaatccggccggttgttcccatatttacaccatatcagaagtaacgcagatgttattgacttcctttcgtttaatctctgtgctctgttgagtcccttctttgtttattgcttcgctgtcgttgaggccaagatgcaatctaacaagtgccttcatcacaaatcttgctcgttgcttgattcctccaatcagtaggtcgaggaattgttagcttgacatggatcagcaatgccgatggaatgggttgtgatgaggactatgaactctcagtttccacagggtttgaatcagctagagaatatcatcaagccagcggatctcatgttatcatttttgctccgaagctgcttttgaaagtgaatcgagccctctgatgctcagtttctgttgattgaattctttgcgtgagctcatcatcgaggaagacctttcctgaaaccttataccagactcgtactactgctgcagtctttcccttttccagagatgcagtgacaccaaaatcgacgccctaagcgctaccgtccaggaccacgccatactcgatcactgcgcatgagctcgggtgtcgatttgggagactgacaggaaggcaggaggacgaaatcgcgaagaagctctagcggaagactatcatctccgcattgaattgtacgctgcactaaagtcagacagaaacggggctcagctaggaaagtggaaagtgatgagacttggcttaaacccacagtatgttcattctgatatggccttgatcactgtacaagaggagggcgatcggttaaaagaagaaaaggggattgattgaagaaacagaaggaaagatggaactgaaaagctagaggatcgagcaaggagaacattaacgaactcgaatgtggaactagcttcccagagactccagggtaataaagtacgtatactttgcgaaatatctcacttctctccgatagtatcgactggcgtgaaagttttcttggttgttcagccagcgtttacatagtctgggttgttcatttgctgccacagggtgtgcctacctacctcgtgtgggctgtcatagcacgccaggcctgtgataaaggccaacatcatcggtagagtatattggagcgatcatccaatagcctactaaataaagtgcaatactgatgcagcactctgccgccatgaatcggttaaagaatattacgttggttttatattgcctaacgagcgcaacgtcaagcaaaagctcctgcgcttggagagtgctcgagccggctctctgaccaaggtcattatatttcacatctgtgcaccgactgcagttcaacgtcaatatgcaccttgcaaggctcatggatatttcccagggtgcgattgtgtagacttggaaacttgtctgttgagtgtgtttctctccgccttctacgggaagtgcggtaatattcatgctccaaagcctataagcgccagcagggtatttgcaataaagatgcaatatactggacatgacacggcagggaccaagatgcccatcgaattcaaagactgcatgaggtcccagaccaggagcaatgcagcatcatggacgcattcctttggcagcgaagccattagctgcaagtgccatgaacattattggtttaacaggaacgtctaacaagctgatgctcgtcaaaacacggttaggttggatgttgaggacatgagaagtgatacttgaggcggtgacagccggcagttctagatgagtggccacaagcggaaacacccctgggcgctcatttgagcatg

SEQ ID NO: 11207 - DNA, 716 bp, Emericella nidulans
tcaatcggtcggaagaagtggtgggttgtgactgtcgtagtgtgacagatcgtgttcaccggcataacctgcatgggaagcgaggatagatcgatagatccagttgtagtagcaccggtagagaaggagttgaagcaacgggaaagaaataaattctaaagtctttacttacattgcgatatgctcgaacctaaagaccgaaaacagaacgcaattagtcgaagttgtctgccctacatatcgaggtagaataatggtttgctagtaaaacgggtatttaacgcctattgaaacttccatatatctggaattctttttctggtggctgataatatatcgtgtatatacgcaagctagtcgcaagccaaaacattctatccgtttttatcttcatacatacaggctcgccttggactatggaatgattcgcaagtaattatggaacatattaacgtgtttacccaattgattggatgtcgcacattgctactgctggtcgactctggacgaattgtgcaatggcgcccttgatgacagtcacgctccccaaaacctaggcagttacttgtagagctccaatagctgccctcaggataattgtggtcgcggcagtggaggcgatgaagatcgtgatgcagcgctcagaatggaagctgtgtgccacgagatcgtcgttgcggtctttgatactgaagctatatccatagtgaataatg

SEQ ID NO: 11208 - DNA, 1317 bp, Emericella nidulans
aggctactgtcctacgcacctgtttttccaatcatttatggcagtttccagcaaccgtccctcctattcccgcagtttcatggcggtgttaaacacttcagggcggaaaatcgcaagcgtatcatcacgctgttgaagatctgaaaccatcctttcggttgtctgcagcataaagaattgggtttctagccgttcgagaacgagcacgactgcgcgaagctggaagatatcccacaatggttctgcacttagaatatctttgaggtgattaggagtctttatttcttgcgtcttccatgtcaccgtcagctctttcgaaccatcgtttttctgcaatacggcaaaaccaagcccatcttcttcgttcacacaggcccaccagacaatcggactctcccagtaagttcgggttccgtcggaatctgtaggttttgaggaaatgcaaagtccaggcgtttctctgcagaatgcggttttagccagtctcagtggatcgtcttccgggatatccaggtctaagaccatttgcttagcatcgcttctctctgaatcaagaaaaccatatgagaagaccatctcggaagccgctttatcctgaccgtatcttcacgcccatggtattaatacttgattttctggatgtatgagaagcgacttacgagatagtaacttcctcatccaagcgcaagttcttccgcggacgcagctgaagtatggcatctccattatcatccttctcatacagggcattcacagtcgaatcagacgcatgattggccatatcaatgcaagggaccattgcatgcccataccctggtagatccagcacgcgtgaccgaaaaacagcgtcaagatacttccagtcctcgagagtgacactatcttcatcccaccaaagttcccggcaccattcgatagcctcagtggtctcgcgaagatgctctaattccttttccagtgctttaatctttgcctcgtaggccagcctcaatgacgtcccgcgtagcagctccagctcttccattgtccagaaggtaggtaatgttataaaggacggcaggaacttgacgtattcagaccaagcattggatgcgccgattttatgtttctgtccagcaaggtccggagatgaatgcgagatctggataagcaaaaaaactaatatcgcgcctctagctgtctacaattgtcagctacagactttcatggggtaatacgtgtggagtaggccataccttcccgaagtccccgaccgcttccagtacctcgtgaaggtgtcgatcatacttggcccgttcctgaacgtctccaggaaag

SEQ ID NO: 11209 - DNA, 113 bp, Emericella nidulans
tatgattaatcctatttttatagtatagccgtggttgtttagctctattttatttaaaaaaaggtcaatctttatagtattatattcgtagctttctacatggcgacttaact

SEQ ID NO: 11210 - DNA, 905 bp, Emericella nidulans
taccgagagggataataaatgcaatctgcatgcagcaaatgcccaaagtgaagcagatgctcaagtagtgacgatgggtacgcttcgccggcaataccgcataggatacgagtaggaaaatgcagagcggtaatacggcgacggaaacccagcttgcgattttcgtttgttcttggatgtctgcgagatggtgtcagtaaagagtatgagagcgtcagtgagtggagccgtaccttcaccccacatccatgatgcctgcgggcatggcaggcagcaggtgacattgcccaaggcctgacagagacgtccttggagaactattgatcgcattagctggtggtgttgagcctggagatgttaagtaacaacgtacatccaccatccgtgtcgaagaaagactcctggtagtacggaactggacactctccatgcagattgttcccagacatgctgcaagtgtcactattgcaattcttgaaacgtaactgatgcggccgatgcgacgttgagcgtgttggtcatatctcgggtgcagtgtcctgtgtgtggattcggggtcggagacctcgtggcagaggctcgcagctgcgcgacgactgcggttgagcgaacgatgtgattatcaagttatcgcatcaagagcagaaaaggagggagaagcaggcgtgggtgagagaggggcgaggcacagccagatatagtacgggctggtctgtgacggattgacggttcctagcagcatcgatgaaaagagatttgtgggacgaatgatgagcaagctggaggtctgttcacccgcaggcacggaagtcaacgcgaattgcctccagctggacatgaaaaattgagccctgcaagagaaccctcgagacaacggcggacacagactggcacaaagggcgact

SEQ ID NO: 11211 - DNA, 123 bp, Emericella nidulans
cccccccccacccctccccccccccccccccccccccacccctgccaccggccctcatgtcggcccccccccaccctcacaacacccgtcgacttactagatgtatgtctcacacaaaattac

SEQ ID NO: 11212 - DNA, 129 bp, Emericella nidulans
aagaaatgaatatatcaaacattgaggccctggaaaaaacacactaaggagtcatactcggtctgtgtatcgctgcactgaaccgattgactaagctctttgacttgtgcgtcctcaggtcgacgtctg

SEQ ID NO: 11213 - DNA, 196 bp, Emericella nidulans
ggagccggcgctggttccaagtctgaacagatgggatgactctatacatccatagaaggctgctgcaagaaactgcacaagttcggacaacagccgcgccggagcggggaactacgcgtagaaccacgaaggcgcgcgtcagtgggacacacatctgtcgcctccgagtccctgccatactcccggtaaggcctaa

SEQ ID NO: 11214 - DNA, 100 bp, Emericella nidulans
ggaattttgctgagctgtggctcgtgggtcctcgctgtggctggcgcgggtactcgcccgctcgtctccacatcagaagttgaccctagtgagagctttt

SEQ ID NO: 11215 - DNA, 400 bp, Emericella nidulans
  unsure (1)..(400): unsure at all n locations
actcccaatgatgctagaagagaacagacgntgagggagtctgaagaagcacgaagcccagcaccaaaaataaaccatggaatccctaaggatacaaaactatcttcaggatttgtcaggcctgcctatacattgtggggtgacttttttgccactatcccttagtgattgcaagctatagcctgcctatgttaaccagggatgctctctcacagctgtggcttgctgaaaaaccatgcaacctcaagagctgctgggctgtttcgttctgtgggaatgttgcaaatgttaaatgtctttgtgtgtgtgtggcatggtgtctaatgtctgtctgtgtgcctgtaagtggagtgtgcttaaagaaatgaggctgatgcacttgagcccttcgtttttatga

SEQ ID NO: 11216 - DNA, 861 bp, Emericella nidulans
agtcagacgacgttattatcctgcgagagaaacgcttcacgaccttccccgttacatacatcgagagagcagggtacagggccagcagaaaatggtgccgattctgttacagaacctatctcgcgttcaaaattacaacctgcacgaagataccttggtgcatttggtgtagaggcgtgggctaccaggagtggaattggattgatcaagcacggtgacactgtcaatattgagcgtgcaagatcccagcctctttctactcgcggccgcaccggcaaacttagagtcaaccagaaaggggatgttcttacgcgcttcacaaacactgctggccaggagattggacgattacctcgggagacagccgaatgggtgtccaccctgctcgaccagaagatttgtgaatttcgcggcgtatgcgtgtttgcaccggaccggctccgagtgaacgacaccatttatctgcagcttcggtgtttcatgcgaatagaagctttccagcccaaggaactaccccagaaacatgacgacaatagggcaactacatattcgaacaggaagaagtgctgaggagaagaactgcgtcttcgcaggtcgtcttgtgcaccttttgacaaaatgtctcaaatctcacccaggatgcaaatcatgagcaaggaagatgtttgtccgcactgaatgcaaccagaggcaaagttgaagctgtatcccctcgaacaggaccggagttgcaaacccttgtgcttgcaaagccaactgatttgagctagccaccctatgttgtggttgtaaaccaaaagcttttgtctcaggaagtaaacgaggggttcccctggaggatgcccaaacttaaccccctta

SEQ ID NO: 11217 - DNA, 796 bp, Emericella nidulans
gaccccgcccggtggccagctctcgctcgtcgtgcgccagatagcggtgaatcagatactgcggtacagctctagtttaaatagactttcctgcaagatgcctgcctcatacaaagggtcaagagttgggactacccaatcggaggcgaggggtcacaaatcgtcgcacgatcctcgcatcctcgcactatcacgacgaccaccaaacccatcttaccgagcacgccaggacacacacgcgatcagagggaacaggactgcccattgttatcgatcgtacctaacgcttttcctgggtcagcccccatagacatcatcgactccgacatgtccaccatgcccctagatatatacgtgaaagtggtgggagcccagacaaataccacacagcctgactatacggtcgggagcaaatcaccaggccccgccgacattaatatataccaaacggcgtgccgacaggaaagtgaccgcattcgatcggataccttaacgccaaatgaaagcaaggcccgagtgcccttgggttagttgactagacgagtagatggcaaagacaaattgttgacactactaagagagaccaccctgaactggccggccctccgaaatggggctagagtcgctggaccacaagacagctgcttccgcttattactaagcattttcacgagatagccccgggccctggatagacatcacaaggatacccagtcgattaaaactctagaataccctggggctacccttaaaaccctggcccttataacctgaataaacgcctcaggacctttat

SEQ ID NO: 11218 - DNA, 944 bp, Emericella nidulans
cagaatccggggctcagctctttgtgcgtagctatgctgattgatctaggccctgccaggactagcttgtagcatccgcatgtacgcgaatcaacagggacatcacaactgatagtccctctcgttctcactggtcgatgcatcctgataagcatgagctcgaacctctaggtgctgataagctgggtcctccaacagacgcgccatctatgatttaacctcacttactccaacttcaggggcaggatgtagacccgaacggtagagcgcattgacggtaccatctctatcaattcgcacatgaccaagatgtcaatccaaacagcctgggaagcctgcaacaaaacagacactctttttatcctcgtctgttctgttttctgctggctcatcattccagcggtcggcctcgcctactctggctactcaactcgtttcaacagccttgcctcgttctaccccggtcttcttgctgtcgctgtctgttcggtacaatggtggatgatcggatactccctagcatacagcgagggcaatgcattcatcggcgggctctcgaaagcattccacattggcgtcctcgctgaacccattggcaccatccctgagatcctcttctcggagtttcagctcatcttctgtgcgaccgtctgcgctatcgccattggtggtgcttgcgaacgtggccgtcttctccctctcatcccatttatcttcgtcagttgcgcaccctttctatataaaacactgctaactgccccagctctggagcaccttcatctacgcccccttagcgcacatggtttggtcagacaacggcttcctcgcacaactcggcgctctcgacttcgccggcggcaccccggtgcacatctgcagcggcgccactgcaacagcaatgagtatctacctctcctaccccttattccgctcgcggcgctcca

SEQ ID NO: 11219 - DNA, 101 bp, Emericella nidulans
tattaaaaaaaaaaaaaaagaaaaaaaaccccctcgggtttttcttttggggggctttctttttggtgggtcttttctttcggcttttgggcccttcttgt

SEQ ID NO: 11220 - DNA, 1498 bp, Emericella nidulans
gcacccgagtcgctgtgtttttagaaagatgttcaattctgccggtgggttcgagtttaattgcggcggttcctcttcgtcatccggtatcgacgaccgaagatcgttcctgtctaagaataatgtttgtgatttttcatagattcggaagacggggtttccggttttcagctaggcggccgccggagttgacgggttctataccagaagaagaccataatggatgttcgtacatgatctcgattgcagccgtgccgttcatttccccctccgatagaattagagccccttgacgaactcaggttcatttgccctgcggctaggccaataaagccattattattttacgctgggctagattccgcctccgatcatggaagacgacatagaaaagccgaggagtgcgggttgactgctcagatcaaacgccccaaggttctctcatagatgagttggccagtggtgagagcgaaagaaagtgggaaatgcaaggtacggagtatcccctcagtcgtacatacggcgtgcataagcgactctgcgttggaggaatagcattcaaacacggagacctgcacatcccactttctgtatgctggacaaactcgtcacattaccaagcttggctaccgcgggagttttttttccacgaggaagccgaaaggccaaataaagtgacctgacaagtcagacaagtagtggaggacatccaggaacaggaaggccgaaaacagagccggtccacttcgtcgtggctgacggcgctaaccggactcgtttctctgaactaccattggcgtcacgagtgggaaattcgccctgacgatccaataatagccctgcgtcaggggtaagtacgtataaagagcgaaatatcatgaggagccggccaattgagtaagcatcatagcccagaaggatcaccctaaggactgccaactcattggaggtggagtgcttcgacttgattgcgcctgtcacttggatgttattgcattcaataccaataaattaaatatgaaaggcattcggtgtagacgataagctagtaccggcactggcagaacctaatagttttatcctttatatatgctactgaaaagcatgagattgatatggtcgatatggtcgatatcagcggccacgcggcaacacggccgtgcagtagatgttaatgtcgcggttaacctcgttttgcctcgttttgcgaacggaaccttggactactctggggtcggggagattggatcattgggtatggctgtgcatttatgccttaaggttcaggcatcacttgagtcccctttcccggattctgctacttctcacctcgtcaatagtgagaggtagtctagaatctagatatcgctgagggtctggctgcctccaacactacctgaaaactctacttctccttttatcttcactcttcgagtgccgtcaatcttactgaatagtgtacactggtcgatatctgtttggtgtccccgccccctat

SEQ ID NO: 11221 - DNA, 540 bp, Emericella nidulans
agcaatgtgctgtaagctcctgctcagatatgtcaagtggcgcgggtaccggcgtccgaaacgctcccgtcgctctaatgccgtttgagcttgtctaaagtggcctagggtcgagtctcactggtgagacccgcatcgaacccgggcttcacactcagatgatcgtgaccgagggtatgcacaagtactccctgacctccgtatctcatcggcactctattcaacaatgactcgccaggtctatctgtccttgaccgcttgtgactggcgataacatcaacacgcatgttgttcaaataactataacggtggacacgcgcgagggctgcatgttggaccgttcattatgcttcagaggttgtttcgtcgctcccgaagatccaaaatgcatacgcgggatgatagcccatagtcattggacaatgaatggggatactgataccgaaagctgcttgagtacctggtgcgtaagtgacggtcagatacacgtgtgaaaccgtcagggacctacgcaatgtgcaggtgcttgggtttaaggca

SEQ ID NO: 11222 - DNA, 106 bp, Emericella nidulans
ttgcccctcagtaagacaaggcgcagtcagggcagtgcgtgagacgctgtaccacatatagcctactggacatctgatatcctagtattcgacaagagacggacaa

SEQ ID NO: 11223 - DNA, 124 bp, Emericella nidulans
atgtggaccaatacggaaacgatgagattctgataataacgagactgtagatgcgatcaccaaagactcgagactcaagctgacaggcgctgcaacatcagaatgtgaagtcaaaaattcctgg

SEQ ID NO: 11224 - DNA, 117 bp, Emericella nidulans
ttctcaggcgaaagatagaccccagacgcagcaggcataacaaaagggagaaacaacttagcaagtcctcaactgcgaccaccttgggctggacaatcctcaacttctggttgaact

SEQ ID NO: 11225 - DNA, 1699 bp, Emericella nidulans
aggagccgaccagaacccgtttgcgaccatatcggtctcctaggttgctgaactgggaaaagtaagcctccgcccgtttacttcggaggagtactcaccactggcagcgagatgcagtacccaaagttatatgcgagcaagagccacgacccttcggacagacggtggaactgcgatgcgattgcgctgtaggtggagatgacgagcaactcatcggcgcttgcaatgaagacccctgtggatggtgaaccagctttccctaaagaggactgagtctgattacctagaaatgcggcatagatgacaaggctgtcagatccttcccttgaattggagtgctcgcccgtttcttcatcccttgcagggcccagcaaggacgactcttcggacacagtcatggtacgaatcaatcaacatataacagcgcggcacggagagggtatttcaaagagaaagttgaatcaagacagcagctgtgactcaagcaatggatgactcaaacaggcaccccttggatgatctggaaaccggcgttgtccggaacaaggcgtgctgatgggctttttctcacagacaatcatgcagtatgatagcatgtttgcattctgagaacgaatcgctttcttatatgctgctcatcccttcctccagccgtcgatcatctccaatagtttgcagcttgtatgcacgtcagacgagcaccgcgaatgagaacacgtcggacgaaaaggttcaacaagcaagtgcagcaagtttggtagagagctttttccatgaataaaattcccccctcctcaagtcaaaagatgatctatggtccctcagccccatctcagatgcaccaatctctctcctgccaaggcaatgcttcttcaaagttggctcctccagtgaccctgcaattgctgggttagtaacagacgatactctgagccttacggctctgacatcccaggatctttcctagtgatccaagcatacaggcatctctgtcgccgagccctaactgagcgccgagttgaagtcgccaacaacgtataatttctctgctcgtcaccagattatcaccgggctattccatatcagtatgctacttatactcacgtctttgatattggcatagcgttgaagatagcttgtggtcgaccctcaatgtgagtcagagttagccaccagctgatagcgcctacgaactggctacaatagaaagggccatcgtccctttctttctattcctccagggttgactatctcggcaatatgccatcagtatgacaatttaatcgcatccagcccggcactacactagtgattgcgctcgacgcagccagataacacgaagccctaaacgagcaacaaagcccaaatccaaatcaagttacctccatcatttcaacattgataccacagccaattcgaatctcagcacggggatatttgatctgccccaagaaatcttaatgggattgttgcgcacacctcaagcagccaaagtatgcctggctttgtcctgcaagctgctctccacacactagggccctcagcctgggcgaagcacagaaagaatcttcaacctgatcggtgatctgcgagtcctcagccgcgacagttctgaatgagagtattgcctaccatgcaagatactgcgcccaccactcaaaccgcccaagcacgccgcagcacgagcccacaagggagt

SEQ ID NO: 11226 - DNA, 4466 bp, Emericella nidulans
aggacgccccatgcgattggtaagccaaggcggatgagacctgatcttgttcctgtttactgaccgccgatgaaacagccaacctgagggattctgggtgttcccatgaacatttaaacgcacggtgcactaagatcgtccatgaataggaacatgagtcggcctttctatataatatgtgttactacttgagctaagcctgcactttagtgagaacgtacgcacctaatcacgcaagtcaattttgctccagcactgattaatatatgtataggttatcatggcctgcgtgaagaagggactttcgcgccaggacgcccatgaggaaattcgtacgctcctcacataccgtacctttcacatattctggcatgaaaactaggtgtcctctcacaccaagcctccgacaacgttaagaagcacggcaagaataacgacctcctcgaccgcatccgccgcaccgagttcttcgcgcctatcctcggcgagctcgacgctctcctcgaccccagcacctttgtcggccgtgcccctcaacaggtcgagaaattcacctcgaccgaggtcaagaaggccctgcagccctacgagacttatctcgctactgccgagacctctgcgcttcacgtttaaggttgccttcggcagttggagtgaatcttgctttaattgaccttacctgagcaaggaagatttggctacgtcacctaggctaggctgccctgctgtcagtgcctcatgtcactatgattgtctgaatagtttcctggatatttctgcttttagcgacgctataatcggaacatctaaagtcaaaagtacaaacagggaaagaagtgttcgtttcagtgcgctaccactcattttccctaacgaaaggtagaagactataagacattttgatgtatatatgataatataacgaattgatggcacaaaatgaattctatccaggggtatgagcgtatgagcacctgaccaagctagtaatgaaccgtcttccggttattctctgataaatccttccagcaagcaggtcaagcgagtcaacgatataagacaacgaggaatttcaacgagaatggtgagagtctcagaactaaggttgagttcatggcaggataggcatagtgatttttgaagaaagaaatgatgaacgcacaaatgtgagaaagaacactcgcaacataaagtctacaagaaatgagacaagacggggaaaataaatgaacaaagaaaagagatctccgaaactataccttgatcatcatcatccgtaatatagcctagtcatcatagctgggcaacttttttttttaggtcaacacctttccgaccgtatagagtatagttcaaccatactaaagcgaagctaaccaattaacgatctgggacaagtcagagtcagtcggacatatatgcggtgtaatatgcaatgcaacgtgtcgaatagggatcctcgtcagtcctacgtaccatcatcgcctgcataagagccacctcctcgccatagtgcatgccgtcccagctctgggcctgcaaagtcgcgttgtacatggccagaacgtcgatgcccttggcctgagcgacctgcgccgtatcctgggtgtatttccagctggttgcgtggacgttgtcgcttggaggcttttggtggccgggtgctgttggaccgatccagagaaatggagtgcttctggcgctggttttggcaagcgtaagccattcgtctatactattcttcgccgcggagagggaataggatgttgagagggagagactttgaattatggcgatgggcttcttctttgccgattctgactccgagggacgcgccagaaggtttttgaagacgttgtggtcgctgcttgtggcgggtgagccggtgatggagagaaacttgtgtggggtctctgcaggagatgatcagtcttccgttcactgatttgaagcttcaggacttactggctgagcagatgtatggagtctgggttcccatggcactcctggaatatagttcctcgcttgaagtaattcgcgcagaggaacaggcaggattcgtaaactgtgactcgcacccacaacttgtttgcaaagcagtgctcatttcccactccctcaaagatccttgttttagatcctggcgaagaaggatgttgaacccggcataagcgttggcaagggagtcatcaccgacgaagagtacaccatcaaatcggctaagagtctcacatatttcagcgttggtaaaccaacggtagaagcaacctttggtcgagttagtttataaatcatctcatgacaattcgagctcacccaccttgggatgtataagggggcaccaaagccatgacgcccgccgttgctcattgagctgagcaaatcctcacgagaccggcaatacagctcagactggtcaccggacggaggcagatataaagcttgagaggagatgccgcattcttcacggcccacgaactgagctaacagactgtaagcagaattcaataagtattgaccatcatccagtgagatttacccaggctagagcaaaaggacttactcatgcccgtaattcgtggtcacagccggttttggagaataagagaatgggagatagaagatgtcccgaatcagccagactatatagagcacccccagcacccagagagatgccatgagcttgtaggtggacgaccgccaggtgactctcctaacaagcctccgtccaccgggcccttcgatcgggccacgccgttgagaaaacgtatgattctgttgcatgccggagaaagggtaagcaacggcttcgttgacagatgatgaagccaatgattcactgttggaagcacggcgacgtgacatcttctattttatacattgaccggttgagcagaaagtccaagcgaaagctcatttgtgagttgaaggcgtgtaatccttgtccataggctgcctggccctttttagcggcacgaaaggtgacggtgggaaaaagaaaagtgacaggcgaacggcgtcggggagaaaaacaaacaagaaaaataatattggatcagggccgagcagaagaataaccgatccaccaactgcagaaggaaaaaagaacggaatatctcaaagcgttgaagcggatgggtcgctgttaagagctgccagaggagcgcagaggccaaagaggggcccggtcttctatcgtgcgttctgttgtatttcctctttgggatcctttcgtacttcttacacctcacctcgtctcatccactctttcctgccctaatcatctcaacactcgatcatcagtatttattatctttcctgcacttttactaggcaaatgcttacttcttccagtctacacggtctgctgccgcgttcggccgcaatccgcagccaaaactgccacggagacctccaggggcgaactgatgcaaatgggggtatggggttatttgaagccgcagctactacttttcctctggaatgacggcacgaggcgcgaaacgggcaagctgaaacctgcggatccttcttgtgactgtctatcgacgctacgccagtgtaagtgttgaccccggaaagcctcgctccagacgcggcatataagaatagattggatcttcaagccaaaagtactgattgtgatgagatggcagcgccaaagtacagaacgattgacatcgcggcgccgcaggcttgcatcataatcaagtccactcgcttatgctgcacggagcacttgacaacaacaccctgatccaccttgttcgaccgcaagacctgattcctccaacctggatgacttcagcgtgttcatctgagcgaccctctcctgcgccattgtcgagttgctccctcccgtccctcccgagacccaaataaacggcgcaccgttggggaaaactttaacacaagactatcgaggaggagaagaataaatcgcagcatgcagttatgatggtctagacaccccgccacggtgaactgatagccagtgagatagtgtaccggagttttcgcagttggtaaactcttttggttggttgggtcgacagacgtcaaacaataatgagactccactgcttctccgtctgtcgccgcgtcgcgactcgcagcctcgcaggctcgcacgaggcggaagagggggaattaaatcacgattgcgacggcgttctttagagcttccctcaattggcttttgggaagcacctcaaccagaaaggaaatcaagttaaattgcgattgatgactgccttccacttctggcttcctctcctgcgttcccatctttgcgcctaacctcttcctttcggcgtttcaaagaactggtggactccgaggacggcccagggacggcaaggtaggagtctggagagaaaggcggtacgtgcgaaatgtggcatacatggatggatatttggtattgttgacaacccatgtttcctaggccgtgcagacatttgtag

SEQ ID NO: 11227 - DNA, 1247 bp, Emericella nidulans
gcatatgctgtgtgataaaggtggggttgcatgcctgaaaatccattttcaccaactggtctgtccacttgactaggaatgccgcacaaacgtacagatgaaatcgtgagaagccctgttcttcggcctggatatgagttagagagacaacgtgcagctttggattaaactaaaccaccataccatgtatgtatcccacatccttatcgtgtttcgtacgctcatttcccgcatgagcagacagttcatccatcgaaaactgaattgcatgaattccaccccctcctgctcgaggtgttttgcgagggttgcgtcaatacgcatcgtcaagtcgcgcaaggctctcacttgcctgtgaatgcccggctgagcatagatatagttgtcttgaattccgtccagtagtttcgtcaggcaccagaatgaatcggcttctaccgcatccagaacacttcgaggaagctggccagggtccattccttcttcaacgttcaaatcggtaacataaacaccgagaaagacttgaaaaagtggtgtgacaaggtcgtttataccttgaacataaccgctggccgggtgtcggatagcccaaacatataatatcctttctaatgaccgttgtgtagcttcataactataaagctgaatatgcgggcttgtgcgcggaacatcgatgcttatttggtgccatattgcttcgtccagacctcgaccacgtccggtatccgtagaccgagaattttccctagtggtcgctgcgttactgcgctcgaaagcttgccggaccccgtccaaatattcctttcgttttcgctcgagagtcgcaattcgccgctcgctgtttgtgggaaggtaacccaggagtagttgccaagtcatggctcgtacttcgtccgggacgccggaccaagcgagatttcgtaactcttggagaggcacagtgcttgcttgtaaaaggcgcttaaatttattaatccttgatatgcggcttgtgtatgcatccatatctttcgacgaggcaccttttggaggagcaacatggttgatgaggttcaatgcgtttgccggatcttatcaagaacaggttagactggccaacaatttgtctcagaatagcttagagatacctttcaatatgtctttatactgcggtcgtaaaatcttgccgtcgctttttcgagctgttgggtataaagggatgtcacgttcctcagcaatatcagagctgttggctcgttgtcgattgt

SEQ ID NO: 11228 - DNA, 117 bp, Emericella nidulans
cgctttttagatcgagtcgagaggatatcagtcatacgagcacgaaggtataaaaccagcacggaaccgaggaagccagagagcaagacaggacctaaagttcccccgaccagttta

SEQ ID NO: 11229 - DNA, 494 bp, Emericella nidulans
ggccacctgtaaaagtactgtttcaatcatgaacccacttttatctgcctctgcaagatgatcgaatgtgttggtccatcctaactgcagtacggctgtggccacaactatttgcctggcgagcacccagctccagattcaaccagggaggctttataatcagccggacagtgagctccactccttagtgcatacccagacccatatagcggccctattcccgcacctatgcgatggtggcaggccataactacatagccagattcttgtaaaggccgcttctgctctctttgactgatttactggctgaactgtatgtcgcgttacacccgattcgattctacacacccgggccttagtggcgtcaggggcgaagcaaatgcatagatgcacgacgtaccccttgggctgcaaggtcgactaggccgctcacgatggctcacttcaacttgacaccgcgttggacagataccgaggctatgcgtcgccaattt

SEQ ID NO: 11230 - DNA, 515 bp, Emericella nidulans
ccagtaataggccgatgtcagcgcattatgttgtgcagcgagttggggtgctttacccctaggtgcaggcgccgacagagaagggagaaacagtacagatgtaagaaatcaagtgcctgtagcataacctccaatgactgtagcaaaaggctagatgacgaccataattgcaagtaactgcagagtatctaggctcagttagtcgaattagcatcagtctccctccttgactgttgcgtcaagcaatatcccgccgcctatcgactttgcgcgttatggcaacatgtgatccatcatatcagagactgctgaagaagcccatcttctgctctgagcatggaataccactcgggctcaggtcatgatatatagactttgtgtgtgcacaaggccggtgacgttgggaagtgagcaccacaggcagccctaaatgcccgtcacaccactattttgtcagggacatcacaggctctgttgcgatcctcgctctccctctagactgcatatgggatgta

SEQ ID NO: 11231 - DNA, 1802 bp, Emericella nidulans
gcatatggattgtattccaatcgacggaggattcgtctttgcccctaagcgtatcttcctcaagagataatgcgatggaagccccggtcccagttcttccttggaacgttcatatctccaagaggcatggcaacaagatgcggaacggttacttcacgtaataggcggttgttagctaatccttcataactatctgaactttttcttcgatgtagagctggaagagactgacagagcttccggaatgggaaacagcccatctcaaccgttaatcacgaccaagccggactgaagcatacctttcctattccaaaacattcctgagacaatatagaccgtgttcttcacatatgacgccttttgagctttgtaagaatgggaatggtttgaagtcatttgttgcattaagagggtcatgttgcttgatatagataagcgcgtgaggtcaatgtgcgggccggtcagctctttgtcctttcagcggttaaactgtggtcagccgtagagacgggatcgagaaaaagtaaaagcatgttgcttcgatgtggttgaagaaaaatgaaacagcctattagaaaaccctggagtggtaaatggctctgactgttaaccgtgtaggcttgaagacgcgcaggttgtttgagaaaggggaagagttgatagtaggaggagagaagcaaagtagaagggggaggagggcttgttgctcagctttaaagtagctctctgattgaatatccccttgtcgtttgtatgtcaaccaactatacgatatcactcattatgaactctgtggacttgtaagtctctaaatggaatcagatgtctcctaggattctgaggatgtaatgagaacaaaggtagagctctcgtcaagtcatggtaataaacggcgaggatgaaccgtctatcctctctcagctttagtcgaattcatctggcctttcaacgaccacgaagcaattatcaatatgccagtacgtacgataccagcctttatctactatctcaatactcggagcgtcttctcacttctagtcagttacgctcttccagctggctttttttgtatcttgtgatccatgaaccttctgccacttatgcccgctatatctgttttcctggccatgtccagatctcttaccacttttttctaggccactctatatattagacctatctcttgcagacttgcatgcctacgctctgcaattacccagaattaccctgtttaccacctacaaaatgctgcttatgagaatagtccaactgctaccccagccttaatgaggctacggctgaagtagaagctgcgaacgccgagcacactcttgtttgcgataatgccatggcagctctcttccgtaggcttgtgtacctcatactgccgccctgttggaggtcaaacacgcagaaatgcgcggcgccgagagcggcgcaaggcgagggggtattggagggaggagcaagaggcggggagggaggaccatgacaaagtggacgaatttgggacactggacaaggaggggaaacctacttgattaacctctacgtgtgttaaaaagtaatcttctctttctttatgtccccgtctcaaataagagcatagtcggagtagtggtgacaaaagtgttgagattttgcatctcggtgagggtaaatcatgatagctttaaattatcttgcctctaatttaatgctaaagaatagtaatacatgaggtatagctaaaaaaatacagatatatgcaattaaccgtggctcactgtaacgactcagggcgtcaaccaaaccaatgacga

SEQ ID NO: 11232 - DNA, 543 bp, Emericella nidulans
ctccttgctgcatacatatgtctgcctgggccgttctgatcgaccacgctagcttacgcgatatgccgatacgtctctctccgtcggaaatcatactgtcaatggtgaaaatggggatggtttccctagactgcctcctgcgcatgcggttgttgagcgtgacctgcgtgagataagggcttattttgagggagtttcgagccggcgccggcatgattatcatattatacgagactggctgaagaagaccgatatcttgtgcactagtgtggaaaaggttgagcgtccggcgacatgggaatatcgatagaaggaccgaaaggccttgggggtggaagccacatttgccggggccgtcagaattggatgtttactgaccgagaccttttaattttgattctcttatttgaccgaaactgtgaagccagcggtatggcaagatatatttacatgaggtttgccaactttttttgtacgccggttggtacattctacaattcccggaacctttgaggacatccccctccatgggataaaattggt

SEQ ID NO: 11233 - DNA, 1561 bp, Emericella nidulans
tcaggaaaatccggacaatgtcatggtgatcagtcgcgttaagagaatatcgatttacgaggaacttacgcattaacacagccggggttttcaggggtgttcgtgatctgggcgtatttaccccaggcaacctttcctccagccgtgacaataccgagttcagatacgttgacctcaataacagttcccttagtgagaacaccgagctgagtatagagcgggttctgagggttcttcttgacggataggatgggtagctggacggtgacggccatttcggggctgcaagagaacttgtcagtgaagcccagatagaccccaatggtcgctagggaaagaacatactgtgtaacgttggccttcttgtatcgcagacccataggactaaagtaggttagcatttcctcgttcagaaacgccagatcgcaacctaccggatgaagcgctcatatttcacaggtctgcgcgtaaagtcgtttccaacaaatgtcggcttcgttatcatccgcttccacgacttcttatgcgtcttcttcccggtattgacaaccttgaacatctcctcctcactaatacccttaaccttaggcaggggcacggcgaacttggccgccttctccgcccgcttgtccttaatagcgctggacagagccttcgcattcgtagcctcggagcggtcaagcaagtattgcgggaggggcgtcttggagggctcgctgggcgcggatgacttgacgttcttctcctcctgcgccttgatgcgcttcctcatctggatcttctcggcatggcgcttctgctggtacagcttggccctcaaaccgcggaggttctgcgcatccttggactgctgatgggattgacgggcttcacgcttgcggactcgctcgtcgtggtccaagcgcttaccgtgctgctttgtccagcgctcgatatacctggtgggatgttaggtgggacagatatggatgaggctggagataagacgaactcgttctggggctgtttttgagtcagttagcaagcacactccagcataattgtattgagcagaaaacaacataccatgatgacagaatatacagggttgatagtttgatgaagtggtggttgctctggaagcggcaatcaaaaaagtttcgagcgataatctaacacgtgacttgttatctcggtcgaatttctcgaccttcggccgcagctccagaaaccgttaattcagccaaaccaccagacacaattggaggcagcacattgctcttttcgaaatgctctcccgctctgcgcttgcgagggcttttgcccttcctctcgagcaagccactcgcccatcgctcagaaccaccaccttccgggcctgcctgcaccaagcaacgacaaaagcaccatctcaccccgaagaaccactcagcgcttcgccacgagcacaatcctcctccccagttgtgcaacaaactttcatccctaacaagactccaaccacacgcgccgatgtccccccccaaagcaacctatcccccaactttcgacactccctcacggtgacaaaatcctcctcgag

SEQ ID NO: 11234 - DNA, 527 bp, Emericella nidulans
cttgcggatcccccggacgggctggggtatgaggccgcgcggatcataaaactcatgaggctgtatcgcacactagatatggcccttgtggctagcgattacatgggctgattacataggcagttacacccggggtgatcctagccgtattgaacgggtaacgtgttgcttgacgccatgattatattggagcatgaacgctgatgaatatggatataaatggtctatatatcatgtatgtcatttatgggccacattatatataaagattgccaagccaccggcgccagaatagccatgaagcaagagtatcgtgtcgtggggcgtgaggctacagatgatacggcgccactaaattggcaagaccgagtccatgaaattgtctgaccattatcatagatatacggcatcgatgatgaagcctgttttctacattctgaagaaactcgtgaatacagcatctcatgaaggacaataatattctgggttacggtgcaaatattgtgtgatgcgatggcagatgtatc

SEQ ID NO: 11235 - DNA, 2325 bp, Emericella nidulans
caccccagcatctgcggctgcacaaaccacacaacaccctctgccagctccttgcgctcatgattatctggaatgcctggctcgctttcgacgcggggacaacactagccctcaacttcaagagcatcatggccgcctgcgtgacaaatctctgcgccgcttcgggtgcccttacctgggctggcctgacgtatgcagaaactgggaagttcagtctggacagtacgttcctcggtgctatcgcgggtctggttctcattacgccgagcgcgggttttatcgatctgagtacgtcggtcgcgtttggcgtggttggtgccgttgctgggcgacaggcgctgcggattaagttcaccaagggtgctgcccttcgacgctgggtcgataacggagatacatttgcgacacattgtttgggtgggctgcttgggacggtagcgacggggctttttgcgcaacgtgaggtcgccgcgtacgatggagtaaccatcattgccggtggatgtgtttttgatagcaattggcgccagcttggggttcagctcgtggaggcgctaatcgggtttacgtggagttttgtcggaagctacgtgttgtatgctttggtagattgcgtacctgggttggaagttttagctacggatgagtgagtttacaccttcaactttgagatgtggactaacgtgtcagggatatcattctcgggatggacgcatcacagatgggcgagtctttgcacgaggcacagtgggctggcgaagaggactaccacccattccacgctgaaattcaactttgaccgaacccgtgttatgcccctatatatacacataccaacatagaatcaatccaaggtctatgtcacgcctagttgaaaacgaccgttttgtgtccgttcaacaaaactctgcgctcagcaaaatacttgacagccgcagccaaaacattgctctccacattacttccggcatgagtcaactccttcggactcaaggcatggttcacgcgaacgacattctgttcgatgataggaccctcatccagatcgcttgtgacgaaatgcgccgtcgcaccgacaagcttcacaccgcggtcataagcctggtggtagggcttagcacccttgaaactgggcaggaaactgtggtggatattgataatttttccagacatagcgtcgcacagcgtcggcgacagaacctgcatgtaccgagccaagacgaccaattcaatatcatactccttgatgagttcgagaatccgggtttcctgctgctgcttcgtgtccgccgtcacggggagatgcatgaagggcaccttgtacgttgccgcgagggtctcgaagtccgggtggttcgatacgatgagtggcacctcgatcgccaactggccggtggactgccggaagagcaggtcattgaggcagtggccgatcttggagaccatgatcaggacacgcggcttgtgggcggcggggaggagctggaaggacatcgagtgcgcggtggcgatcggggtgaaggcttcgcggagggcctcaagggagggggccgcagcaccatcgctggcgccagttgtatcggggccgaagtgcatgcgcatgaagaagcggtgcgaggtgggatcgccaaattgcgaggagtcgatgatgttcaggttgtgttggacgaggaaaccggtcacggcgctgacgatgccgggccggtcggggcaggagagggtgagaataaagctcatgttgaagaagaatgctttgaatcgaattgaatcgcttctgggctctgttgaagatggagaggagagaagtgaagctggagtgaggggcgatttgactcactgtaaaatcgcgggaatccctaccgaattcggagactttgaaacagtcacgtgcagaactgtcctgcttgcggttgctgagtcatcgcttgataagatcgataagagcgaacattctaggccacagcagtccgtaccagcaattcgttataaggtttagtagttaccacgtaatccggggcctgggctgagccctagggcttggggctagggtatggactcagggctttcttttagggctctatgtgaaggtccgaggttatggtgccacccatgcttgtgagacttccccggttcttcacgcttcagtcttcggtattcagcctcgagcgaagcccagacggacgactcaccgtggaacggggtgcatttcatctgcagatataatctaggtccctgctgcgcccgccttcatctgcaggctgatggtttccccgcatgggcgaggcattctcattcgaccgcgtctcgggtattgtgccgtagttc

SEQ ID NO: 11236 - DNA, 179 bp, Emericella nidulans
atacatgctgactatcttgcagataagttattggtgaactatgtccttcctgcagagaaactatgattaattaagtagtttaaaagcatgaatgttcctagtagatagcgcttcatgtgctggctctattggataatatggagtgtatatatcgcgcctgggacctcgagcatgtttat

SEQ ID NO: 11237 - DNA, 575 bp, Emericella nidulans
aagctcggtggcggtttcgtgggtgttctccttgaagaggcggtcaggacggagaccagatggaggggctgtcggatttggagcataggggataactagcagtttatgaataatattggcaaagacagactgtaagcttcgtggacaagtatataatgagcgtgtcggcacgagcgattgcgaggatacgatgagcgcatgctctcgtcttgatattgcgatagaccacggtttgtgccgtatccggatgcgacggtgcggaatgtgacgtggatgcccgtgtatccctgagcatcttgttatgatgatgacccatcgtgacaagctaaatctactgccggtgagagaatgtggagctttaggatatcaggagcatgtgactggatgagcatgtgattgcattggattgaatgggagatggcgctatggggcgaatgacaagaacctaagctgcagtgaaccgggggataatatcaggacggacttgactgacggtggttgacaagtggttgaaatagagcattcgcttcgcggaaggattttgtgagctagtagcaatcccgacgagagctctg

SEQ ID NO: 11238 - DNA, 540 bp, Emericella nidulans
ggaaccgggtgggacagcacaaaatatcgaacgtactctctctcagaccacatatagcccgccgatctatactgccacaggcttgactcggacacctcaagcttgatcaacacgaccgagttgcagaactagccaccgcaccgaggacatcgcatcggtcacatgataagcactcggacctgaggagaatgggtgtgcaccgatggtatgacgaggggctgtttataacatcacctaagcggaaggcggctaactactctgaatcactatgtggactgactagagatcgggtatagtaccgaggggccatactaccatgcttaggattgggacctgttgaccgaagactagattagaggactgcaagaatgatttgactaccctggtgtaaaagcgctcgccattaatgaccgttgtacaatgcccctgatccatgatacattctaaccgactttggctcgccatatagttaactattgcgtgaggtgtactttgattacacacaatgcgcacctactgaagccaagaatgggatactgt

SEQ ID NO: 11239 - DNA, 135 bp, Emericella nidulans
agcgatcgaatccgagtcaacgacgaagtcccgagaaatccgaggactcaagcgctgataagtctcagccacaaccccagcgggaggagcaagacgagtccaagaaagagaagaagaagaagcccattacaaaga

SEQ ID NO: 11240 - DNA, 1319 bp, Emericella nidulans
  unsure (1)..(1319): unsure at all n locations
tgcgttagtaaatttcatctattgataaatgcaaggcagtaaaaactgcgaagagaaaccgactagagcagacaaacctttcttttcttgtgtgagtggttggcggggctctcggacattttcctctttacactgtcggtcattccagaaacaaccgaaaggatggtgtgttctaggtaggactggtcaaattgagccacaaaataacttggaaatctcgctactcggagtattggaaagtgtggttccccggaaattcttgacgatcatagtgctaggtgtcgggcggttgaattattcctatcgcggtctagcggggcgggactggcccagagcactgacgaaggaccagcccatcccttcacagcgccttcccgatatctaccttcggtattgtcaaggaccggcccgatggcgttatgtctggaccatcagactcggagtctgccatgatcagaccaccatgaagggatggggcgcacaatggggccattagggatactgatagcggttgtaaacctgtcagtaacacatgacatcacgttgtcatgacgtatataaagtcggactttagcttagtcgctgtgataagaacctgagctgagctgtatcctctctatttactcacgctggagaaaacgagagtaattccatcaagtgattcgtatattgattggattgtcgatatggccgacattgctacaagggagcttcgccaacctatcgacattgccgagtacctcttccgccgactacacgaagttggaattcggtcagtgcacggtgttcccggtaagtctcccaagccaggtacactggccgccatgtcctctaacgtgctattttcatacaggggattataacctcgctgcactcgattacttgcctaagtgtggacttcattgggtggggaactgcaatgaactcaatgcgggtatgaacatttgacgaatatagctatagagcttaccttttctgacgtttctgctaggtatgcggcgatgctatgctcagtcacggaatcgtgtctagcacacatttgagtgggagcttctggaccatgcatgnggagctactcgaattgactataatccatgccggacctaattaagccaaaagaggttgtgtcctatccttggtacgagatttcgtattgtgtgacaggatttggctcggactgagactacagtcactatgaagtttggaatggccccccctttttttcctttttacacaatgggaggctttcttctttcccctttcaaaagggttttacaggtcccttatatctcttttccactcttcttcaaaatttctcg

SEQ ID NO: 11241 - DNA, 1963 bp, Emericella nidulans
gcagggctagcggacagttactatctcgccgcgttgccatttctcgaagcatctctgaaaaggatggacctcaaatccttgcagtgcctagtcttgatcgctcagtattcattactgactcccacgagaaccgccgcgtattgggtcgttggaacagctgtaaagctatgccaagacctggggctcacagaggaagcgacaataacccggtcgcgcactgggaagcagttggatcctttagaagtggacatgcggcggaggttattttggattgtgacttcgatggagttcggtctctcacatagtttgggacggccaagctgttattctgtcagtcatgaccatatccacgtcaagttttttgcacaagtggacgataagtacattacccgagaaggcatacatcccgatgccaaaccagtcctgcctaagtgtattgcaatacacttcttcaagatgcgccttttgcaactcgagattcgacggaccctttacttgaacaaacgggacagccctgtcgatgaccatgatccttggttctctcaaatgctcagcaaacttgatcagtgggtatcgtcatgccctacccatgatggaggtagtggcttgagcgggaaatggtaagaaagtctctatcatatccctgtgttagattagaatattgatgcagaacatacaggttccaaggccggctgcataccatggtcattttcatgtaccggccatcgcctcagattccggagccttctgtttacgctgcgcaacgatgctacgacgcagctgtttccaacatcttcatgcacttagaacaaattgagactaagtcggttgatttgacttggatattcactcaatcgctttttatggcattgaacactcttctctggacactctcatacccggaagtcagaaaggaacatcctttgaaagaggttgaacacaaccttgaagttgcattacagggtatcatgaaggctgcagaaagatggcctggggtaagatctgcgggcatgctatatgagacattaattgccgcttgcctcagggcatacaacactgaggaatcatttgtggtccattcaccttcaaatccgtctagccatgcgacaccggcttcctctcaagatgtgcaaacaccaccgtctatggcaagccctgccagcaccgcggcctctattcactcacagaatcttttagcagggggttcttcagtggcagataccacatcggctggtactttctcgaggggtccctcggctgaccgttccttacctttgccacaaattacctcttcgttatctatttctaccgatcctgtgaaagctctcgagccccctccttgggatcccactgtcccaccagaggctgcacccgacacgcataattccttgggctttgatcagcctgatgagtcattattacccaggtcgaacttgaactttgatccatctacgccgtttaatgcatttccatcggtcctaacgggactcccgggctgggaccccaatttctccctatcttccatgaccacagctgacacgttcccgtactccaacgcaacagctgacccaatgaactgggctgatacttttggaggccaatactcccattatttcaatggggattaccctgcaaatccatggaggggaaggacattgagtcaacaagaacagctggaattgatggattcgctggcagaccacattccagatgtcacaacgcaacttgcgatgcagacagcgacagcgcattaccagtcataacaatcaaagttctgaatctctacattggtgcaggaactcacctatattcaaagtataatatactcattatccgacttcggtattatgggttaatttttcgtatctctactagtaccattatagtatgaagtaccgaggtcatatatacagtgaaattcaattaccgtaaattacaagcatgtcacgtgctcatggcctcc

SEQ ID NO: 11242 - DNA, 1084 bp, Emericella nidulans
tatattgtcacccctcaccgtcttcatttccctatcgatgtctttctctttatttttctgccctattaacccatatgccggagaaatataagaatacatatgcaaaaccaaccaatagtcctcattacagcctatcgtcgagctcccacaacagtcagaatgatcgatttcgcaccccagaccgaccctcagtgaacgacctgatcgaccacttgcgccggacgcagctttcgccgtcaggactggacaagaaaaatcgcaacatccctcgatatgtcacaccgcgatccgttcatccatctttgcgaaatgtcctcgagctccccgaaaccccgccgccgcggccccgccctgatgctcgacgcaccggactcggacagcgacgattgcggaggacgcctggtccgccgccaccagagagctggctttcgggaaatacttccgcagcggaggatgaggatgctgagttgaatgctgctgagacggcaaagatttttcatcgccttgagcgcctcccaggatcagtgtttcccgcgaggagtagcttcctccatgcggtgctgaagtctatggctatgcactgggcatggcatgttgattacgatgggcagtttcttggctttctgccgacgcatattaaagtcctattgctgagctatattgcctattatgctagaatgcagcccctgggtatgcggggtctcaaaccgttgtttgacaatacggcggatgttgacgtcgtggaacatggtcgactggctgatggcaattctcacgttacacgtcttgatctcagtggagcattagggagatggatatccttgaagcagctcttcgccgagttaatactttccaagagaaacgctggttcagcccaggatggtacgactaaagccatcccattatcctgggaggacgagtatgaaaatgatgcagcctctggtaccgctggtgcgatttcaaaaccgctgtcgcatctacgatttacaaacctacagtacctctctttggcacatcctcaaaaggcaacagtaagctggaactcactaattaacttgctttcccacctgtcgaccattacgca

SEQ ID NO: 11243 - DNA, 565 bp, Emericella nidulans
gaccattacgcatctctcgctcgcacactggcccgtcccaatggtcacaccgaacgccatcaatgccagggtgagacacccaacgcacagatcccttacgttttcctacggcggcaccgactcatattccgcaatggagaataattgggccgaatcggcaggtatattgcgtaggctgtcgcgcgctacatactgcctcaaatggttggacctcgaaggctgtgcggactggataccagccctcaactgggaaggcgtcggcccaaacggtgagatgtactctacagggcctgaatggaacgggtcgtggcgagacattgaatggattcgtcttggtcccggatggctcccgcacctccaagacagtgaacttgccacattaagcggggcagcttcgacatcgaacataaacgctcccagccctcggtccctagcgtcctccatccacgctcctgcagcatccgacgtatcgactgaaacgtgggacgtcgaactcgagcgccaaaagtaccggagggcaaaggagctggagcggttccggaaacaatgcacgacgcaaaggagg

SEQ ID NO: 11244 - DNA, 149 bp, Emericella nidulans
atctgatctactattggtgtggtcgatggcatgtaccaactgctgctgtacatcgtacacaagcgactctccttgcctcgtctaatcatatatgactactgagagactaatcttgcgggtctctttcgattgcatatgatcagccataa

SEQ ID NO: 11245 - DNA, 2326 bp, Emericella nidulans
  unsure (1)..(2326): unsure at all n locations
ctcgtgaatcatagcgtcggggctgaaggtgtgaagaggtgagaagagactaagctggcacatagggattctggatagacatccagcacaaaaggttcgtctcactaattcatactattaaagttgcccttgcggaatagtgctgatttttccagtaggaccaaaaggttggttttcttacgttattttagtttagattttgttgtttcatcttttcccttgtagtctcagtcacatagcttgatatctgacccggcctagttcgtcaacatccacggaagccgcgaagaccaccgcgagatactgaagtacacaccatgggtacgtcctttcaagcctcagtgaaaatagatgctaacggtgggttgacagccaagcggggactttcacgctgatacctctttcgaaatcaaccgtgcgctccccgcgacctacgctccaaaatacctgagattcgctgacacgaaaggaacagccccatcctactccctccttcgaatggaagagcaccccgaggttggtggtgacacggcctgggtacgtagccctaacccgtcttctaatccgtcagtaccatgcagcttagagcaaggaagaatgctaaagcaggcaaggaaggtctcgcaatacggcctctacgacgctctcagtgacgcatacaagaagttccttgatggtttgcatgctgtacatacctcccgactgcagtgtacgctccgcctgtccattcctttcatgcccaaaaaagattagtgcaccgtgagagataacactcctaactacagacgacacaattcttgacctctggggcacaggcccgaaccggccgcctatcgacacccaccacccagctgtccggacccacccagtaacgggtctgaaggcactgaatgtaaacccaggctttgtgacggggtttgctgagttaaagaaggctgagtctggtatttgccgcccactgtacctgcatttcatcttttcttttaccctcagagagtggacgcggatgaaccaagatcatgctaactactggttctggtacagacaaagttctcgactttctagcgtaccatatccactctgccgacgaccactacgtgcgctggaagtgggcggttgggagtgtggcgatgtgggataatcgatgcaccttgcaccgagtcatcccaggcacatatgagggcaagaggagggggatccgaactacggtgttcggggagaagcgtatgccccagaaggactgggatcggcgagatgaagtatggctaacgaggtacagcgtactttgaccctgctagtgagagccgtaacgagaggaacgcgagggagaagcgggagaaagaggagaaagagagagaaaaagataaaggagatggcgttctaccggtagagactcctgtgtaaaggccatgaagctctgtactttcccttgattgcttgtgtgcggcatagttcatattgtggtagttgcaggcaaatgagtgagatgagcaatatagggttcgactcagtcaaatgggactctatgggcgacagaccttatagatgagcaatgaggagcatctagttgtgttgacgcgtaatatagctcttgtgcttgaatcagacaagcatgggaaatgttttctgttgacagatatgtacttcgaaataagatccctcttgcactctcgaatggccattcatggttgcgaaggactttcatctgcggctgacacaaattaggctcgatataagaagaattatttgaccgtcagactttaactatcatgatgatcatgaatgcatatattcgcgacctcaaagagacaccttgtatcacaggaacactacttagattaagcagcgagctcggtttttgccacatcagtacagacaaaatccgttaacaaccctttttcactctagataagtcccccctctgtaatatgcaaccgaccaaccaaaaaatcctggcctttcaagggccccatcaacttccaagcctcgaaacaagaagtatgtttcaactaaagcgctgtattaggatctgcccctattctcgtaaatactcaaactcttcaggctccttcggcactaagaagtctccttctaggtgaggttccctaggctccatcctagctcactacgctgatcaacatggctttagcccttccaccacatagcacattagaattatcgaaccggaggtgatcaggttatttctttgagtgtcccggctgggccttcatattctaggacacagagaggcactgattgagagagactgtatgctgctggcacnctatactgagttaaatactacatgccccccagaagactgctt

SEQ ID NO: 11246 - DNA, 567 bp, Emericella nidulans
atccttcaataccagactgcgttgattgcccacctggatgcaaagaactggcgcacttgactatgtcgcaatcatcatacctatattcacagtgccatccacagaaaggacaccctacttgactactaagccgcatatccaaccgacacccacccttctaatcgtacggggagtacatcttgacaacataccaagtcaactcatagcttgctccactgcttcgccttaggatcaaatctatcaacctattaactctcaaaagcaggctccgaccgatacccaactgccgaatgctgacccttgctatcacaagacttggcttgacaatacacactcatctagctgatatgatgctaataccatgattggacggattcagaatccccacctgagagcacaagatgctgacctcaatctcctttggaacggactgctgtatcctctataagactaaccatatgctggtgaaccatctctcagcgatctctaactagtcatactaataaagaggacttcagttatacagctcctttcgctcattgatcaagatcgttctaggacaatatg

SEQ ID NO: 11247 - DNA, 1636 bp, Emericella nidulans
gggtcggcccccccaaattcccggccaaatccgttggaaaacaaccccccggcaagtttccgttttcccccccctgaccattttgaaattacaccgtcccatttagctgatggtccctaatcgaatagaatatgcgtaatgtgtcagtctgaaacggcggaggcccaagcatagatgcccatgccccatgaagcatatgttcttcagctccaaggaatatggaagttgtggagctcaagaatgcctatcgattattcgaaatgatggatctgacgtattgagtctaggaaaagcgtccggaagtaccgcgttgagaatatatctcgagaagttgctatgtgcattcccagcaacgctcacgttttcgctactcaggaagccctcatcacctgcactgtatttgtcgttctccgcgcatgcctagtccttaaagacgattctaggccctcatctaccccccggcggctcttacggttcaggtcttatgctcctaggttgctcagagactgccgcaggcgatatacagcgtggtacggcgtgttcgacattggaaccattgctcttgaactaatcgagagcggtcggccaacgtggatataactaatcggccgggacactcgaatattcttcacttgagctgatgaggagagtcctgctttttcggaggactacgggtcgatctcttcaagatagctcccgttctatacaactgcggtaacgcatattgtccgcctctcccgggctctattttcgaagggacgttttccgggccgtgcgaagcactagtgttgggtttgacctgattgaaacagaattctagttcctagagctcactgcgctatcagccccagaataaaggcctttccaagtagtcgaacgtcccttaaactccggtccgttgaaaaacctgggagacggcagtgaaactcaacgcgacaagatatctccaaatgagcacgaaattctcggaaatcgagatcaacggccgtgtcgcaagaacctagctcggtagacagcagatgtggctgagtgggaccagtggttactactttcaggctggtcattcgacaccgccgccgcaatggactggtccaacagcaaactttccttcagcagctcaaaaagctaccgggatcgtctcccctttccgatttggcaagctcgttcttatgtacggctataatggtctgcgaagttttctcatgagcttggtgagaaagtacagctgtggttggaggaggttcggcgattactcccggaatagatgccgctactttgaacggaggaacagtcgtatgctttatttgcagattctatacttggaagacccaaaagcatgagatccttgcaaaacaggtacaattgattatgcgtgaggctgcaaactagtgccttaacgggatggaatccggggcaagtgcgtgaaattaaatgagcagcaacacaaaaataatgcagaccatatgattcgcgaagtggtccgggcattgatgtggttatcgatgatgcgtatcttctgcttcaattcttgaagtcttactactagggcggatgatcagcatcacctaaacccgaagcagaggcagtttgcgaaacgttcgactgccccgtcgtccccaggtagatcagcgggtgc

SEQ ID NO: 11248 - DNA, 593 bp, Emericella nidulans
actaacttcgtgctggagtatcgcctggaagagcccctgcgtcatgtaaaactgtgagctgttgctttgcgcgcgatgtgcaaggatatggctctcgagacaatggctcctgtactgcttacctaagcagtgactcactgggttgtgtgagccagatgcactggaagcccaatggctgggtgcccggagtatactccgacgctgatgctgactcttatgatggtaaatggacacttgattacgtgcacggaatcctgtgccatattctataaagtgtttgggcagcgccctgcgccgcagattgctctgaaacatgacagtactcacgctgtcaaagctgttactgttcacatctggaggctaacgcagctgaccgctgtgacgcatactgcgatcatccagcgtactacccgtactcgcgatgatgcatctgtttctcactacagacatgctgaccataaccagatgccttgaattagcctagactcccgattaacgcgacgatattgctgatgcgcattcctgagctgctacgccaggtgcatgcgattacctgcttgagactgtggtctttagcaatggacgggcccatg

SEQ ID NO: 11249 - DNA, 1819 bp, Emericella nidulans
tacgatggtttgttcgattatacatattctgcagtttaatcgtgagcgtgtttgacaagttcgagtgtccttctgccttggctgggctccacgccttgtgcgccatggggtacagctcatcagctgcggactagtaatcagagctcctccaacaatcaatcgcatctagtcctgcaatcccggtcaaaacttccgaagttatcctgtccccgcagaaggaactgggttgacattcgaaaaagcaatgagagtcatccgaccgactagtccctactccggagccgatattatgtataaggatcctctagtttgcttgccctacataaccgacccttcacggcccctgccgcttcggcacaatattcctgggccccgtcctatatctgaggctagccttcctgtttggacgccaggtcgctcgcgcgattgcctccaattcctgttccaagtgtcgtcacagataactcgtgagccccagacatcaggattcaagtttgggacgttcgcccagcttaccctcccaacccgtcagactccagacgcaccatgagtatgcagatgtaggttcgtgtgcaagtgcagccttgccacctggcgcatgcatcttctatttctgcacacgtcaaattcttgcttggctcttgcctatgtcactcctatccttgcttccatactcttcttcgcctcgcgttgctccgcttgagggattccaaacaagcccaattaagcaggaccattgaattggtttttcttttttctttttttctttttcggtaaatcttattgttcggtatttccagagcagtggcctgcacgatgctggaaaagtatgttagagcgggcaattagataatggctgatagacaatagacaatagacaatagactggacaatcgacaatggataatcgactagacaatagacaccgagtcatggagctagcccagtgaatccatgatccttgttactgtgtctccacacaagctttagaaagaaacgaaaagggcacggacgcgtgtctgacctgggcattctaggctgacctattgtgccagggtctagggtaggaaccaggcaggtacaactcatatgtatgcattgtccccctcaacctggtatttccacggccttctgtgtgaggctaggtcagacccgtacccgatctacctccctgctaaagtaggccaagcccagggtagaccttctacttttgaatttgtgtgcaactaccgctgtgaaattcttcacggcacccagagtgcatgaataaacctaaataaagaagaggagactatgatcaaatgaagtatggccatcttgaacgaggcttgaacgtcaactttccactacccatggagagctacaccccgttataaggtgcgatagcgcgcgttccagtgctgaacaagatagtgctcttgttcaaacacgagggttatctgagtgcgtacttttcgtgacgcaaacgatctccgtggccgatgtcgggctagagggacaaagttcaatagttctgttgctgtttgcgatcctgcgaggtgacaattgtggtcgtaggaatcctccttcagcacggttggggacagagacacatcttcaaattcaagctgacatcaaccatttgcacgaagctgatggtttcacccgccccttgaggctggttaagctgaacctccatgaagactcacggctcacctcggtaaatgaagcagagccacccgtatcacgcacaggtgccaggctacaattaaaatattagctaaatgtggcgctgatgaaatcagcgccaaggtaggtggatagatagcccaagatagat

SEQ ID NO: 11250 - DNA, 2011 bp, Emericella nidulans
tttgagatgaacactaaaatttctatggtatatcgttatttcaagactgcagatccccgcggtcgtgttaccggaagctgcataggcgaagcagaagcaatcgtcgactcaaactcgatcctctgattgcttcggagtcctgagttccttgttcgatgagcaactgcaatttcctgaaagggtggtaggcgtcttggcaattatgaactgaccatcgacgactgggccctggttatagtctgtttcttcgccttgttccagggggaagcctaggtagacgaacagccagctctgactgtcaactccataccacgtctgaccagcatcagctttctacaactggcagagtcttaccgagactgaaaaaaatgctagtagactattttccatagcgcagttgcctattggctctgaccgtctctccataatgggttttaagaggcgctcatatttagtttacggatatgcctgatatgcgtttcagtttatatatccgcggggttatcccccagcaatccatgcgcctcatacaccttcctcaagatccctcgaatgacaggctcctttcgatcattatattgcatgaccgtctcccctgcctcccggctctctactgctgcctgtcgtttcacgccggcgtacaattccctatcggcttcatgcgttggatcccttagccaatctcgaaagagcctatgcctcacaagctcaggactgtcaggcgcaaaaacatggatattggcataaggctcgtcgcatccaaacagccggtgctcatgccacttgggctcgcggaggagaaactgaaaccctgcattttcgagagcggggacgtaggattcttccgctgtaggatcgacaacaaccacatccacatcaatgacagcctttgcagggaggttgggaacactggtgctcccgacgtgttggatatagagaaggttgccttgaggtagagcagctttgatgcgtgcctcgatgacggcaaaagcagcgggccaggcggggtccggctcgacgatctcgatgcgcttctgggggcgttcagagacgatttggacgttggcggggttgtaggggatgtggtgagttatagggttctgtgccatttcatctatcgttgttcaagatagaagatacagtgtgaatgatggatttgttgacctgcgctgaaaggtcacccatcttacaagtggcttgagggggctccgtcgcttgcttgcctttcctgctctagcgcttacggtttggctgggatacgaagggaccagagtagaacctcagacagggatctatggttctatacggaactgacccgttaatgagattgggctctgaactgtgaccgctgggaggattccgtttggctaaagcaaaagcatcctaacgtgttgattgttagccactctcgcaaacggacatcagcatctatcctttaccatcacctcacttttctttgttctcgctcacttttctactcaccgtccctcatccctttctggggtattctagacttagatgagttctgttcatcatcagtagccacataagcttcttgctgccaataaacacacgatctcaaatatataagtgacgcttcaataccgccttttagggccttgagcctcacgggctcctttcctcaggctcactgaagacatacacctttatttacctgtgcgaaagtctgtatgcgcggcacatcaaccacccggccgagatgtgtaggactttacacctgcctttgatctgagaacaatggaacgattggaatcgctgcggcgtcgggtgataactaacgcaactacaccaactggagagaacttcagtccgcagcagacaagtttgttggatacgcggttgacacattccatcgtgcaccgtaaatcatattgatagcgtgggcttttttcgatctccagaaagaaacggttctggattccttccttgatcaccgaccacagaatccgttccaagcagcactggcggaaggtcgagtggcggctgatgg

SEQ ID NO: 11251 - DNA, 300 bp, Emericella nidulans
  unsure (1)..(300): unsure at all n locations
aggccttccagtgagggcgtcttttcccgaaaagatcgcancgggagatgtggctttttgtctagggcgtctactctcctcggctgccacatcagggacttcgttgcccgcgaaaccttccaaaccagccgtcccagtggggaaatncntagccaactggcccaccgtccttagtggctcggctactttgcatcgcgcngtggcgtccactaatgccttctcaccccgttcgagatcgccttcacaaacacccttacgcacagcccgctcagcatcctcgtcctgataaggccctacaac

SEQ ID NO: 11252 - DNA, 840 bp, Emericella nidulans
ctaagatcgggtttgacttatggttctgtggacttgctttttctttgtgattttgaaatgcggagccttcggcgaggccgagggctgctgggcgaggcaggagtgaggacgagtcctcggtactggatgttgctgcatctaaggggaaaggataaagaaggggaaggagaagaaaaaaggagtgtggcctgttggtaagtattggttggtagtaaagttactgtagcgttacggtagaaatagctgtagaatgaaatgtatgtggctagtaatatttcgtgagaaaatgcctgaggatgataataagtcagctaaccacgacgagaagatgggcagggcatacgctccagcttgacctcaccgtcatgcccgatattgtactactatgccttcgatgctgacccgacgtgccgtagtagagctaccgaagttgagctaggttaggcaggtcgaatatcgaagtacgcctccccagtattccggtgtagtaaatggcagcaccgggtcttaacagagggagaattagagctccaatctctgaacattgagttgctgctttgggggatacgattggtggctgttatttagaggagttagattaggatacaacatgatctggatgcaagacatggcaaaccggtggcggcctgacatttcgctgctactacagtgaatgagcctgtcttcccgctttccaggatagcatgaagctcgtttagattggcagttaaaactgactcactggaagccgagattgggctgcgtgaatgctgggaggcttcggggcagtcaaaaaggtggagtaggagatggtaagggagatggagaggagagggaggg

SEQ ID NO: 11253 - DNA, 353 bp, Emericella nidulans
  unsure (1)..(353): unsure at all n locations
aagcttttagagtgaatagatacgtgattcgtgaggccaaggggtattcgggagctggcgggtgtgcggctaaaacagcgtatcagnnnnnnnnnnnnnnnnnnnnnnnnnnnnnnnnnnnnnnnnnnnnnnnnnnnnnnnnnnnnnnnnnnnnnnnnnnnnnnnnnnnnnnnnnnnnnnnnnnnnnnnnnnnnnnnnnnnnnnnnnnnnnnnnnnnnnnnnnnnnnnnnnnnnnnnnnnnnnnnnnnnnnnnnnnnnnnnnnnnnnnnnnnnnnnnnnnnnnnnnnnnnnnnnnnnnnnnnnnnnnnnnnnnnnnnnnnnnnnnnnnnnnnnnnnnnnnnnnntccattggt

SEQ ID NO: 11254 - DNA, 1022 bp, Emericella nidulans
acgtgagtgatgtttcccgagctcgacatccagtacttgctgacacgtgcttgcgcataaaagacgggacagcgggccaagggggcggcttgaaggtcaagtgagtgatgagggagaagaagactccggcacgaccaacgatgaaatgcggaacgagggctggatcggggatcaccgaggtcatgacatcacagttccaaggttccttgtgcgggctcccagtgatctgtgccccgatccatggtttgcggtggctgggtccgcgtgtgtatcttggaagataacaacaatccaaatcaacatggagatctcgagagacgggccgctgaaccagatggatccgcgcacccagatggccgcgccgtaaccagtaaacttttctgtgtgcttttgtgtgctttgcagagtagtaacccctgtctccatagttgtggctgattcaatggatcgatcggctgtcatcatcgagactatctcgttcgattgcagtgcatcgctgatagattatggaatcctgcgaggaactggctgatggttggtgggaatgactcgcagtagcctcgaggtcccccgatcttgtatggagctagggagttgctagggaaacggtccaggaaccttcaacggaaatgaactcagaagaggctggctggctggctgaaggcgatcgggcttcaagtggatatgaatctgggcctgaagtgggctctctagcctctcttcagctgcagcgtcattcttcctcttcttcttccttggtcgtgctttcccctcatcgtcttcatttcagtttgccctccatccctcgcgtcgctatattacctagtaatatccagctgtctcactcagtctgtttaacttcagcactgttcctccttcaagaactcgtcaaattctctgcgagacgtgtctttcttctgtcaacaaagacattctgtcccgcctatgtccacaactgctgacacctcgcactgtcacacctcacattgctttttctgtccaaacgaatttctacaataatt

SEQ ID NO: 11255 - DNA, 1095 bp, Emericella nidulans
gaccgttttcttgctcatcgtaagttgatatctgcagactaccctgtattgcaaggttgtcgacgccttctgctgatccccgcagcacttcattcctcccaccacaacacttctccaggtccagttcgaagactgacctcaccagatgagcctcatagtcctcttcatagtcatccttctttcacttatcatccgtgctctctacctgctctacagacaccccctctcctcagttcctggccccaaactcgccgcctgcacatccctctggctcgcctaccacacttacattggtgacgaatgtagcaccctcttcgcgttacatcagagatatggacccgtgctgcgtatcgctccaaacgacgttgatattgcctctggtgacgcgatagaacccatctacctagcgcgcggcgggttccccaagaccccagtgtattctaagttcgacattgacggacacagcacgatcttctcgacattgaccttaccagagcgagcgagtcgagccaaggccgtagcgccacttttctcgacggcgtcgatccgtaactcgcaagagaggttgctggaagttgtagatgatttcgtggacaggttgcgacagggggcccagtctggccggccggtcaatgtgctgggcctggctagggctatggcgattgatgctgtgagcgcgtacctcttccaagagcggtatggggcgcttgacgagaacgcggaggttatgtctgcctcactgtttgtggatgcgtatgtgggtgttggcgcgttcttcaactttgtctgtggccgcgttggcgagtttctagtcggtcttgttgaatacctgactcagctatctgggacagccaagtcctttacggcgatcgatgactacaccagccggttggtgagacaggcggtccccaaaagcggcacgtaccaaattcgtctcctggaacgggtctcactgcgccagacgcagattgagatcaaagatgtctgttttgcggggacggactcgacgggcatggatgttgcaacaattatctggtacttggcgaaatatcctgaaaagttagtttccctccgatatacttgccagggtagggc

SEQ ID NO: 11256 - DNA, 1268 bp, Emericella nidulans
aagcattagcagtctcttgttctattggaattggaccatcggctggaatagaagattttggaacacctaacaatcatcgcagaaccaaagcctggggcacaacccttgacccaacaggcaagagcggcgtaagagatttgccattattgctgttcgtttgcttttactgacatttctcaagatccgcttcttgggtgatcccaccgggaagttctccgaggcattggatgttacattcgacagcacgacgatcttcggcaaccagcgtagcaagcgctatgcgctcctcgtcgaggatggcaagatcaaggaggcctttgttgagccggacaacacgggtgttaagggtatcatttctagccctgctgccatacctccagcatgctaacaagtgaacagtttccactgccgagaatgtgcttggatagatagggtaaactacaccagcaaattgatgcacaataaatattaggtgctctagctgtcagcatgacatattgtcaaatgatcataagatagatatacatgaattgattcgccctccaacgcctaactgcaatcttttatagcctatgctatatcaagctcgggcccgcacctcggcaagccctgtgtagggacaatatttatgcagaaccctgctgctgctcccactgctcaggtgtatagcatttaggcgtccaagcatgaatagccgcaatctccgccttcagaactgagttcaccaaccggtgacgtgcaagcatggtcttcttctcaaactgcggcgaaacaatgacagcctggaacgcttgtccgcagcctcctagacacagcagaccagtcagcgcagtccagagactcaagatcacggtgtaaagcgaaagcatccaaggttgagtactagtaaagtggactcgaacaagcgatgacgtacccgaaagatcctcaatctcaacatgctgcgcctgcagctgctcaaccaacttgctcttcagcagatccggggtcacggcgccagggagggtatcagccattgctgcgtttgcggccgcgagagaacgcgcggagagagaaaaggttgctttcgcggagacgggagagcgcaggtaacggcagcttctgctcagcaaggtcgtcgtgcggaagtacattaagcgctatcttggggcagcccgcaaaactatttctaattatgggagcgaccgaggacgtgcttttttgaaataagcgatgcgtgggctttggaactttttggagggacgcggagttaacttggacgtcgctag

SEQ ID NO: 11257 - DNA, 2749 bp, Emericella nidulans
ggcgtcatcgtggggattctgagcatacgtaggatcagctgttgaagcggctgaattgcttcaggatctattactagtactgatgtactatcaccaacctgaagataattatgtacataattatcgcacgaatgggctacttctctctgtgtcgacgtattgatgatactgagctttaggtggagagatcagcacagtccctgattcctgacgttgcggggaaatgcgggggttctgtacacatttccccgagcttcgggagaatagacagcgagggattaaaagcaatatcacatccaagccgcagtataaactgcaccatctgggatgcttaaccaagcttcggagagaggccctctgtttaacctggaagcatacagttctaccgaaaatatgccggccgagattgatatttatttttatttttattttttttttcttgtgaagtgccagttcatggagctggattggttcgagcttagggctagaattaatcgagatggaagtagtaggagcatatccaagtgttcaatggtgaatcccagcccggctgggtctttacagagttgcatcagataatcttattgtcggacagatggcgtcaggatggctagcagcggctaacagccatcaaagcttcggttcgtctcgagagctgggcgtgtatctggcttaagagaccgcagttgagtgaggcagtcgcctctaaagcccatgccaccaagcgaactgctcccgtcatagctcagccgtctctggtgtgggcactcgggtgaaaatggcccattaggcgatccagcaccaaaatgtcaccgagtgagtcattttaatggcccgatgtcacattagcaagctttgcaggtctgcggaagacatatatatgcttaactccgagtctcggccttctcctgatctgcccttacttcgagccttagtccgagcctcgggtttatctgcctgaacggaccatggctgatatcaatactccaccagatcacaaaaagactcgtcagtacaccagaaatatgttgtcccacagtttgcccttcggctatggcgggcttcggacttcccttcagtatgctgcggagataacgtctcatctctgcccctcgcgtcgtcggcgtcgccgttgtcggtgatagcgctgccttgggtgggagatcttctataaggataaagtctggcctcatgagatacgacaacttgatctctgtaactccagcagatcgcctgtatgacaaccgccaacatgtcagaaaaccagaccccagcccgccctccgaaatccgtaagactctccccattgatttctgtccgaagacgttttgtttgggactcctaacagcaacagagagaagaaggccgcgaacgcaaattgctgcactggatctacagccagccgaacctcgacctcatccgcggcagcccccagaaagttatcgacctgatcgatgagttctcggagacctaccatttcatgactgtcggtcaagagaagggccctatcgtcaccgagctcattgacaagcacaagcccaaaaagatgatcgagctcggctgctacatcgggtactcggccattctgttcggcgacgcagtgcgtcgcaatggagggacccgctactacagcctcgagctcaacccagagtttgcggccattgccaatatgcttgttgaacttgcggggctgcgtgactttgtgcgcgtcctcgttggacggagtgatgtactcctaaaccaactgttcaagagcggagaagtcgagcacgtcgagctgctgttcatcgaccactataaaccggcgtatacgctagatctgaagctgtgcgagcagctgggtaagatcgtccctggtgtttcgatcattgccgccgataatgtaatccgacctgggaacccgccgtatctcgagtatgtcaggagctcggtggagaggaagcgcgaggaggcggcgaaaggaccgtccaaggcctatacgacggacgggttcgaggagatcacggtaaggagtttcatggggcttgacagcgtgccggagtttgaaatcgtcgggaatccgaatctggtgtatgagagcgagttgaagcagcctgaggggtgtccggtgagtcacacggtgccgtgatgatgatctccttactaattgtgtaggatgcaattgaagtgacgcgatgtgtcgggatacagaaatagccaaaagaagagagaagatcgggccagtgccgcccggggcaccagtcgccgcaattctgccccgccagagccagagttgccgtcgccaggaccttccttggagttcccccacaccagtagagaggtgtcttgcttagcaatctgaatttctctgaagcgatcgcatgtccttatataaactgtcaatatcttaacttcaaccctataatcatattctataattcattctcgccctgcctaacctcctcatcagtatacattaccccgcgatggcctccaaaacgtggaacgtcggaatcgttggctacggcttcagtgcgaaaatatttcacatccccttcgtccaggaaaatccccaattcaagctgtatgctgttgtccagcggaccccaaagcctgacgatgacgccgaaaaggaccaccccgggatcaaatcctaccgcagcgctgaggacctcgtccaggatgcgggggtcgatgtagtcgttatcaccactgccccagactcacaccactatctggccaagttggcactggagaacggaaagcacgg

SEQ ID NO: 11258 - DNA, 193 bp, Emericella nidulans
  unsure (1)..(193): unsure at all n locations
tttcgagtctcatgaggagtttagggactggttccagaacgataccgaatcgcagggagacagtaatacgacgcttaatgacggacagntaagacgtctanatatgattgtgaagnctctcatgttgnngcgtgtnaagacanatgtcnaanaggaattgggtgacaagcgctcgcaaagcgacgtgttctgt

SEQ ID NO: 11259 - DNA, 367 bp, Emericella nidulans
  unsure (1)..(367): unsure at all n locations
caggaagccgtggtgcgggatgtagtcaatgcgtatgtctaccagaccttaccgcagcaacacaagtaacagatagggagacgtttacgtcttccggtgacaggcacatatgctcatagcatcacgagcctagatgaatatggttgatcataaggacttgatgatggtcctgatggcagacagagatgttgagaagctgtagcacgttataatagtatgcattggcaaagtagaggatacgctttgcatanaggttaggtgtttgttggaganaatnactcataggggtnctgacgaaganactcaaggattgtaggcacagccantgagagattcttaacaagtgcatgattttggtgtggggttg

SEQ ID NO: 11260 - DNA, 412 bp, Emericella nidulans
  unsure (1)..(412): unsure at all n locations
atcgagccggcaattgatctggttatgcgaatgtctgctgaactcgccatgcaagtccacgaaggagcatgaaactggttaggcactactgattgcagcccgttggttagtagggagactcctgcgtgcgatgcatcggcagaggctgcgcaacaatatagccatggctcagggctagagcagtgtgtgcgcgtacgcaggacactcttcagacgagatatcggcatgccagtctgtggagccgtttcagcgcaacacgtctattcgcaccgcattcagacatttacatagcatgatcctggtcgggtagcggagatgttccctaacatacgcgtcgtgtcaaccgtagatgaagtcaggtgcattcaatgacggagctgatccgtgtgcatgacncatccacttgtcatcg

SEQ ID NO: 11261 - DNA, 2467 bp, Emericella nidulans
gcaaaggtattaatcgtgtagattcagaaaatcaacctcaactttgtcaagcaactttttctgatttgcggcacggcggggcctttttctccgacgtctccccggactcggagcttagattacatgctatgtattgttatgtacgatacttcgataagaaggacaaaggcggtgagatgctcgcgcggccagaaatttaatgatggccaagttgcgctccagcatcccaattccattacattgtagcgcggagccattttctttcaattgactctttgatagcttaaccctgaactcggatcggatgtttcgatcctcgctgaggtctgcgtcagaccctattcgtgaacatgtctgtttctcgtgtatagcaagaggcctcgaaggtcgcgcgcaggcgcgcaccttttacgctactgctctcctgcgtggagtgaccgatagctcctcaacgatcacgtcggctcagtcactggaccaggcttttcagacgctaacccaggtttgtgatcgatttgcgctccgttgcagcgtccgtactataggagcgtttacatgctaacggttcggtgtggtcagaccttggaaacgcagaagaagagacggcctcagaaaaacaccaatgcacaaaaggccaagggaacggacagtcaagagacctcaaagcggacaacgaaacctcggctgcctcccaaggagactaaaaaacgtcgggaaactcgtcctcagcataagcacgccgaaccactgggtattaaaaccaagttgaaaggcgtggtccaacaattagatatacagaagaaacttgcaaaaaaggctaagaaaattggagccccgcaggagtttccaaagccgccgacaatacttagcaaagcgatcagtacacaagagcgtggcaaactggactcctcgacatctgctattgaaggtacgtatacacgatacccttttcttggttcagaatgctcgaagctaacggatctaaagtggtagatgtgaaaacccaaccggtgccggagctttcattcggcctacagagagtccttttcaagtaagtgaatgctcgcatcttactgctgaattcagacgattaaccaaccttttatctctatagccctggagtttatcaactgcgcgatccccggtcccgtgtctataatttcgatccgtacctggggaccatcatgcctgtaaccgagttcgacttcgccgctttgaaggaatacatcacatcctcgagagatgacactttacgaaacatagcgaaagagaacaagaggaaatatatgggctcgtcctccagtatgacaagcgttctgtcgcattttcactatttgttatcagcatggcgccctatcaatacgaattcgctctctcaaggcttcgaagacaagatgaaaacattcacacgtataatgcgtgcacctgcggctatgtttttgcggtatcaggatggtatctatgcgatagatgccgataaagggttcgacactgccaacattttaatgaatttgggcaagtcaatggagaagcttctcaccctgcctaaagaggaatatgaacgctatcggaggtctcataagaacaaaatcaccgccgaagaggaggcccaaacgccggaatcttaccactactctactttgggagacttcatgatgagatcgcagctcgatgcttatgatccgcgtctcccgggcacaggaatgtttgatttaaagacacgtgctgtcgtatccattcggatggatgcacgcaattttgaggaaggtctaggctatgagataaaatcgcgcttcgggaggttcgagtcttacgagcgcgaatattatgatatgatccgctcagccttcctcaagtattcactccaagtgcgtattggccgcatggacggcatctttgtggcatttcacaatattgaacggatcttcgggttccagtacgtcagtttggcagaaatggatgaaactctgcacggtacatcgaatacagcgctcggtgacgcagaattccgcctgagtctacagctctggaacaagatactggacaaagccacaaagaaatatccaggaaggtctctccggtttcactttgaggccagagaaacagttcaccccttcatgtacatattcttcgagcccgttaccgacgaagaaatccacgccattcaaaccaggaataaagccgaaatcgatgcctaccaacaacggatcctgaacctacctatccaagaagaccaggatccatctacggcttcgtcgaacgtgcaggacaccgcagccgccaccaatgatacaccgccagaatcgcaatctgaagaagtctcagtcaacgcagagaacttctcggagaccaaaagcgtgaggtctcggccattttcctcactgttcttaactatcataacggcaagcaagtcaaccgtgttgatgacttgaaacccggggacaagatggacggtcgaatacgaaat

SEQ ID NO: 11262 - DNA, 226 bp, Emericella nidulans
  unsure (1)..(226): unsure at all n locations
acattgtcactcattagggctactgacctttgttacagacttaactgtagactagatattgtcatagtgggctatgcactatcacccgagtttagattgaatgtgggcgtgtaacgtgaatttccagttagntcagatnctggttgtagctcatagnatggtggttggaatggttcagataacaggagctttgtttagaatgtgaatatgttatgaagatgaacaa

SEQ ID NO: 11263 - DNA, 1723 bp, Emericella nidulans
cattgagggaggttattgatgtcatggcttaaggtctcacgcggcgagcatcgagatgcatcggaccgagtcgatcggcgtcgctggtgaaaggtaaacgggctggctaccgaatctgttccatatcctggtgacttgggaatacggccagacggtggcctcatcagcggtgttcgatcgttcacatcttcttgatcactgtcattttcaagcgtgcttttcccgcgagagtggaatggacgggaatcggagtctcggaaagaggtagacatagaaccaggtcggaaagactgtgccaatcgactttctcttcgaggcctcatcatcggctgatttctattcatccgcaaactggaagttagcaaaatgttgcgtacggagatttatttatgacattgatgtatccgtaccgatgatccagcaatgcctcgctttccaagcttgtattgctcatatttcctccggaatagaacggcgtggaccctcgagctttagcttgattctcagccattgcgctcagggcctcagattcggggattgttggtggggcattgggctgcgagtcttctggagcgaggaaggacggcctgcgatttcgacgcttccgattgcgatttttcttgcgcttatgctttttgctgccagtaccaagatcctgtcctgtttgcattggtggtaggtcgtcttctgccggtgcgccagaagatcgaacttcccctgatgtagacttattcgggaaaggtgagttttgcagtgacgtaggtagcgggcgagacatcgtagccgctcagccttgccaactaagccaggcccaactggtcaattgcttatcgatcgcgattggtagaagagctatctcgaggctccagggtccaacgatgacagcaactgagccagaaataggaggtggtgggtacaaatatggggtagagataagtaatacaatatttaaagatgtagttgagattcagctagtaaacgtggcttgagcatcgtcaggacgactcaacaaggctctgagcgacgataagcaaaatccaacagtgatgcgagtcgcagaatatggtggtacatggggcatgcggaacacggggtcggcttcataaacgacgaatggtagtctaagggccaaaacagagacaggagaccgcccaactgaatcgcataacggcgcgcaatggggcatcaagcaaggccagtcaaaattgtctgacctgaaagttgagggttaagatcagcctagaacgtgcagtgaggagttatcttggtcatgtgattccgtcagttgacgtcattaatttagcttacaagcttactgacgaaatctttagtgcataaacagtcggttagtattatccgaagtcatactagagagcataatgtcatgaatataactacctaaagtattgctgtgtcagaacaatgattgttagctactggcaagcgccgtacgcggttagatatgtgtagtcaaaccaagggtccattttccctccttcaatcaacttcggaatggaacgaaaccgtttgttcggtatgcctaacagtgaagttgtaggggcaatacttaagaataatgaacgtagagtagagcaggaagaaatagaagctgaatacaacgatgatagctcggttgagactatgaggaaggatctgcacagattggctagcagtcgggagccgagggcaactaaggtggtgtactcggttcagtagcggctcg

SEQ ID NO: 11264 - DNA, 320 bp, Emericella nidulans
ttgtttaaaaggaatgcggtgattggactggaagcttgactgggagaaaccgcctgtatattgtcccacagcaggcgtaacccctctcatgatcttgacgcgtgccgatcagttgcatgagtgaaggtggcgcacgttaagaagcgtggccggagatctggcatttgggctatgtactctgttctgatcggatgcgacgatgccatctgtgctttaagatacggggacccaacatgtgctgatcgattagcttactctatgagctgagtggcgcagaacttgcactggcgccatggcacacggcatggatgattgacgat

SEQ ID NO: 11265 - DNA, 306 bp, Emericella nidulans
cccatctgtggctcgcttctgtcgaggtgggaagccactcacctccagaatctcctgatgctggatctctcgacacataaccgtttcatcatgaccgacctatctgggtccttcccttgactgtattacctgggttgcaactagccatactaacctggaatacaccttgactggagcgcctcgcattaacataccaacagtggatgcatgatctatattgggtataaaatgggctcacatataataggcgggctatatatgtgcttacaatttgatcgaactgtatagggaagccacgatggcgcc

SEQ ID NO: 11266 - DNA, 126 bp, Emericella nidulans
  unsure (1)..(126): unsure at all n locations
tgagacgagcagcacgatattgcgagactgtcaatagggcgcactgcgcagngctgatcggaacattcactgaccgcaactaagccctgggggctataaggggtgtcgtaatgcatcgaagagatg

SEQ ID NO: 11267 - DNA, 3290 bp, Emericella nidulans
tctcgtcaaccgagtcattatcaaatatgtcccatcaagcaatccctaacgaagagtttgagctcgtgctccgcaagaagatgacctatgatcaattctcgaagaaagtcgccgagtatttaggggtggaacacaccccacttgcgtttctcaacggttattcagagtaccgggaagcccaagggattcatcaagcggaaccccaatcaaaatgcccaaactctgcagagcatcatgggcgctcaggtttctggctatgggatgagtttggttcgacaggatgcgctctattacgaggtgctggagacaagcttgagcgattttgagtcgaaggtttgcctccgcgtgacatggctctccgagggcatcactaaagaggtaggacttcatcagggccttgacgtggatggtagctgactaaaatagcaaacggtggaagttctggtacctcgggatggaacaatccaagatgtcctagccggtttgcagaagaaagcaaacctggacgacgagacgatcagcaaagcccgggtgttcgaggtgcacaattacaaaatctacaaagagttcactccggatgcaaaatttggtggctctaatgactttgtggctctgtacgcggaaagagtgccagacgaggagttggaactggaaagcggcgcgcgggtagtcaacgcgtataactttgacaaggaaaccaacaagcctcatggggtgccattcaagtttgtcgtgaagccagtatgtttcagagaactctatactttgagatgcgtttgctgatcccagtagggtgagattttcaaagaaaccaaggagcgcctatcgaagcgaaccggcctgaaagggaaacgattggagaaggtcaaatttgctgtcgttcctcggcagctttactcaactcctcgttatttggaagatggtaagtcagctgggtcgtttgtggtatctctactgacgctttcagacgatatactgtcagatatcatcggtgaatccgacgacatgctgggtttggaccaccctagcaagaaacagaacttttggaaccgaagtgaatccttcttcatcagatgagccggatatgatgttaaataatacccaccccatgtcgtatggctcaagagtttggtgatgtatgagtgtcaatatgttgagcgcaccaaggtattcttatgttgtagacggctgctttcactgctatgattgttctgggaccggggaggcgcacatttgccgctacttatactccagcgatagtacttacctaccaatgaagctctttacaatttgcagggaaaccatatgttcaatattctagtagaggtaaagtgcgaaacggcagttagcttgagacacgagggccgcggaggcggatgcaaacaagccaaacaacacaacaacagctggccagaacttgacccaactccagtcgcgctccaaccagaccggggagaacaacatcgagcttggccgtcaattcctcaaaatgcgattcacagctctgcttatcggtcttctggcatacctggtgtcctccgtcaccgcaacagccctcacctaccgacttgaggcgaacgagaaagcttgcttctacaagttcgtcgagcaacggaacaccaaagtcgcattttactttgctgtgagatacaaaagcccattttactagactatacaaacactgactcttcggctctgctaggttcaatcaggtggctccttcgatgtcgactatgctgttgtcggacccggcgagaagcctgtcctagacggcaccaaagaacgccagggcgactttgtctttacggcccagagtgtcggcgagtaccggttctgtttcaacaacgagatgtccacatttgccgaaaagatggtcgattttgagattgcggttcgtcctcaaccacagccacatcctcactttccccttcacttggggcccgatctggactagactgactctatctgcgtttttgttgcagcttgaaaacgaatcccgcaccgagctcccatcccgtcagggcgcgaaccctgaacaagcctccgcgatcgaagagtcgattttcaagctttccgcgcaactgtccaccatctcccgtaaccagaagtacttccgaacacgcgagaaccgcaacttcagtaccgtgcggtcgacggaacgccgaatctggaacttcagcatcattgaaagcctcatgatggtttccatggccggactgcaggttttcattgttaggttcttcttccaaggggccaggaagggtatgttttctctccctttctcgtcaacgaagtattggaggagggtgtagtgaccggattgacggctaactgtgtttctcctgcaggttacgtgtgatgagcatgagtgagaatgaatatagtatatgatatgatctctaaattgtggcgttggccttgcgttgcgtctgcgtgcgtatctctgtatccgtatctatgaagcttcccttcttgcatctagagtcaatcgacgtctctgcactaagctatgtcacggttcaaatccgtagtctttccgaataacttcctgctcagagcttacgagtaccaaggccgagttgctgcagtcactataatgcggatttggcgtccctagccgcatcagggactgggtggtccccaccgcgtacttgttgctctggccccttacccataggagacgtctatcgatcaaggggttcgcaaaggcgatttttgacattttccgttctgtttcaaccagcaggaccaccccgctattcacgttccagagaagtccaaatctaagcccaacggagaggaagttccttccaactcggtaaacaaacgcaccccacaaatgaagagcggcccccagcggtaacattgtcataggctgctgaatgagagcaagccagttccctttaaaagcgggctggggccgacccctaaaccctagatttgcctgcaccattcatcagggaaaaaacctgcattaatacctgggatagggaacgggggcccttgtcacatcccttatggtttattaccccaaaaaacctgtttgggttaaaactggaataacagggatcaagctcctttctcaccaacaagacaaaaggttcttgaggggactcttttttatgccccccacaagaaaaaaggaacacaccttcctttttcaacataggtccatagggagggggccctccttccttcaataaactagcgccgggggggttcccttttaccccttttttctcccccttaatcctccttgtatattattcttttgtattaccccccccctc

SEQ ID NO: 11268 - DNA, 1675 bp, Emericella nidulans
gcgactcggcaagaacgattcaagattctgacaattgtttctgattgtgactcggcatgtagtacatatataaaagcttaaaggagactgatcttatatttgcgagtgtccattgcctatatattttactgttttctatatatatatggcctatatatacccgaaatatcatgcttttcatctcatgctaattgggtctagccttataagagctggcagatattcccatctgttcctcttgatatgttagttagccatagctaaactgcctgcttacatggactttagtcccccaacaattcattccaggctgtccgagtcctgtactaattgtctatccctcgtcatgctataccattcacctagtctaatatgtatattgttctgttccaaatatacctactattattgattcagcattatcatctagaatcagagtcccgaatgtatctacatacttccctagcacggactctggccgaaaggcgaggaaagcatctctcttttcccgcatcagcaacggtataaatggttccagtaaggatgcattgcatgggggatgctaacatatagatacaacagtcttgaagcaagttttggtctggtttcttcctgctttggaaccagtgccaagttgataacctgatggatagatagatacaaacgagaagaaacagacaaggcaggagaggacagaagaccttccgaaaggagaagaaaactgagagaatgtagagctcgaacagcctggtcaagtcgatatgagatcaaaaaaaatggaatcctaagacggatatcgcgcccaaacacccgcttaagcctgaacaagacgaaacgacagtaaacagacaggaaagcatattttgacagaaatgtgcttggagcgggcgagaaaaatcaagttgagtcgtgagatgatagggcatcaagaaacgcgcaatgtaaggaagtaaaggcaatgaataaggatgacaagtataataaagctcgctggacgaagtggagggatgcatgcattcaggacgttcaggtcgactctatggtatataaaaaataatagacgtggacggttctatcccttcctcacctccctggtcgaggagttttctctgtatcagggttggggcaaggtgtatgcatgggccgaggcgtggcgtcagaatctgggatgggagtgagacttgattggtatggccccgagtcggccgggccgtcgaacacgatcgggggagtactcgggtacgcctcgctgggattctgagactgactgggaaagacgacggggggagttatctgtcctcgcttaggggattcaagacttgcagtactgtctgcccgtttgtgaattttcgtgatataccgagagcatggtggcttggtgtcagaggttaacagcgcagaccttgaggccagggcgagaggtgaaggcgagttcctggggcttaaatcgtcttcgatagatggtaaaatagcctcttcggggatgttgagatcttcaaatttgctttccaaggagctccgaccggacctaattttatcgcgtgcatgttcatcagcgtcatcggaaccaccgctcctgctcctttctccggcctctttgtcttataataagagcatcttcgcttgtgctaatgacgctgcccctgctattggttctcatcatcacaatacccac

SEQ ID NO: 11269 - DNA, 2446 bp, Emericella nidulans
gcaacgtatgagaaatacggctgtaattctcaacggaaaaggtgaggcgcggaaaagtggcaagctagaaatagagaaagaaaacaagaaagaaagacaggggaaggaaaatgattgacatggatgccttctgattccactcctagtctcgtaaacccatccatcaatattgtctgcctggtgctggcacttgatggtgtcttggtggtggtgaaatggggggaggatgataggccgagacggcgccaacacatctgagtcgagaatcgagaacctcagccgggagtcccgtgattagcgtcgctggccctctccgttctctacttggtatccctctgaaagggaccagggctaggctcgagagaagggatccaagagggcagctgactattctaccctatccctatccctatccctatcgaatctccttatcgcacaatactactgaagatgactgaaggcagcattattgttccttatcgtttatgttgagagcgagtgggtcctcgctaactacgtggtcactttcccagccagtcgactgatcgctcgggctcagtctatccaggatgtttggatggcgatggcgatgattcagtcaatgatcattgatctcgtagacttgtgcacagacattttctgaagaaagggcagggcgaaggttctcctaccggttccagatagggagagcctatccaaaggcaggctcctattcctcagtcaggtctcaggtcgcttggactttattgacttgaaccagtaggcacaaacatcaccagggcccatccccattccctcatccatctaggtgtcgataagaggcgggccattggagcttgagcttcaggaatcaggctagacacacaataatgacaatgacaaacatccatctcctccgtacagtccacagagaccagttacacgaaatacgagggtaatctccgacctgtccattccatgttatccatcatccatgcaatgcagccggagacttcttcacgctcgaccgaaagttcagtcagtcgcggatccaatatcacagtggatcgggtcgtcagtcgtcagtcgtcacattggcttagtgggtttctggctccagtggatgcgaattactccggagcaattaagactgtggcgctgtaagacacggcgtcggagatcaggatcgtgcacggccactccgtcaaaatgcaatgtgaggttatttactgcgtgcagtagagctcactgaaggccacctaactttagttccgtctgcgatggcgtgcgccatattgaactagctatagctagcctgactctacctctcaaggatcagaggaggagaacgtcatggagaagcggacgggcgcggccattggacaggtatatgagttggcgcttactgaatcttagggccgtccctcgaccaggtgtccacactcacagtcacaatccactgacagcccactgtatttcgccagttccgccagtttcgccggtttcgttctcatctccggagaattaattatcgtcttgatcccggcgtgacgaagcgaagaaaaaagaagtgtcacacagcctaagcgatgcaaacattttgagcgaagaaggaatcggactggtagcatggatccccggggtccattctcactcaacgcgacaaaagtacgagaactgagtcgtacagacaagggtacaacgcaggggttgagatgaagatcgttgcagctgacagattccagtccactgtagttgacttagctaagtaggactagggcctagggaccagggacgaaaatcagagccaggataagcggccgcagcaaatgcacggcatgatcttcaacatcccccagaatgatcatagcagctactgtatgggctcggatcaagctcatgcgatatgtatgtcccgacagacagagtaaagtcgatgtagggactgaggctctgcaggagggctgcaggtacagccgattccactgcagtcccgtacggagcatagcagaacaattgagaaagacgagtcatgtctgattgagtcgagtgctcgcggttaattgccggggttgttgatactcattcgacttgtcgtcgacggatgccccaaacaccaaattgctgaccggtcaagaattcattctcaatgcagtaaaagctcaacaccgcaccgataccaggatgagatgagggcaaaccaaggcacacttctccggcaccagtcataatcggcaacgataattttaccgtcctcctcaaatccacacgccgtggccccatgggatgacagacaatggagaaccaagccccaccaaactggaataaccccgagcctaagaggtcaggtcgagaaccggctgtgattcgtgagctgtgaccgtcttgcgatcccacgcccacacccaacgataatcatgatttgcctttctcgagcacccggtgcggacatgggtcaggcttggtc

SEQ ID NO: 11270 - DNA, 1834 bp, Emericella nidulans
ggatatcagccaggcatatactatgaatggaaggactgtttggcccaagtgacggggttcaaaggcgcggtctgtgagtgattcgacggaaagcgctcgactttcaaggccctggaaaatcggtcaattaactcaattcatgtcccgttagttcaaggattcccgagtctcgaagaggcgaacgccttcctgactggcacaaaacctccattgtcgcgaggcgcgtcaccgctaagtgcagagcccacgagattctacgcgattcaacgaggacacaaacccggggtgtataccaattgggccaatgctcaggagcagatcagaggatttcagaaacctcgatataagaaattttcaacaagggaggaggcggaggaatttgtgaagctcggcggggagcccgctcggtttgcgacttctacagacaccaaacttccaggggctccgggcttgacgagcgatatcccgaaagatcagcagggcaatccgtacgaaccgggcgagggccctttaccccccggtgtggaggatgggttcgatccgaatgtgatcctcgatccaaagaccggcaaggttgtctacaagacaccagagcagaaagcagctaccaaaacacagccaaaaggaccacccggcatgctccgtatttacaccgatggcagttcactgagaaatggaagggtacaagcgatggccggcgttggggtatactttgggcccggcgactcacggtttgtctccttcaggatgtcaaaagtatacctactaacaataccttcccagcagaaacgtctcagaacccctcaaaggcagtcgtcaaacaaatcaacgcgccgagctcacagcgatcctgcgtgcccttgacattgccccgcgacatcgagatgtgacaattgtcacagacagccagtatgcgattaactgtgttacggtctggtttcaaaaatggcgaagcaataattggttgactgcggacaagaaaccagtggaaaacaaggatctggtagaatccatcctgagcaagatcgacgagcgtacggagctccgggtcaagactctttttgaatgggtcaaaggacatgatgcggatcctgggaatgaagctgctgaccgtcttgcggtaaatggagcccagcgaggagcatctgagcaagagctcggcgtatgatgagactcttggttggaaatgggaccggctttatcaagcggttattggtgcattttttttctcgtcgatatttctgcgacatgtgtataatagtatgatattgcagactgcaaggcttcgatttctgtaactgcaagacctaaaacactgtatgctagtgaggcgtacttttcctaagcgagattatcggagccaagctggccaagcaagccaagcttgcgaagctccaaggttccagcgtcgaatccaggctttctttcccaccacgatccactccactacaactcagatccaatttgaccacggattgttaaacatctaccgttcattcttgctatagacatcgtatcttgagatacagatgagacaaagtttggccctaaaactctcgaaactacgactccttagaatggttgaataacacgcagcacctaaacgtccgctgaagtgagtaataaactattgagtaaccgtggaattctgctaatatcatcccagttcttagattgtatattacctctacataccgatcgaccttggattgtacatcatgcccacattatcgctgatcaacttcaatatcgtctgtgcgacattgggagggttcatctctctattcggcctggtctcgtacctcttcaaagagagattctacctctctgaagc

SEQ ID NO: 11271 - DNA, 2311 bp, Emericella nidulans
gctgataattgtgcctgtctgaaaatgggattccgcagatacatgggtctcttggaacgttcgacaagccacctgaaatttcccgaaattaattcttcaagcaccctgcactcacttcgtccggtctccctgccaagagaggatgtgtttcggcggcagattccttgctgtttgatctgggccgtggtggaataggaaaagcgaagttgtcggccccggctttctgaccaagaaggttaggtaacgtgatctgattctcgacggtttatacaggtgggacaaggcgcaaatatagtaaaataagtcattgctcgtattcatcgtaagtaactaagatacattaaaagcgccaagttcaggcatctatatgacccgtatatttaggatcatgcatgttcattccgtcgtcaacaccataaataagcgcgacagaggttactggcataccatgttcggttatgtgtttcccgatctacgtaaagcagcttgatatggctttcacatgactatacagtctttgttccgctccctagcgccccgctcaggatgtcgagcatacggattcctttggtatgggctccgtgggggcgcatctgtgatattagggctctgttgcgggggcgtatatatcggactcttggccgcctgctcataagacggaggcggaatgtcatcctgatcttcgtgtaccggtccactactctgaaagtgggattgggagtggtgaccatatgattgacgctgttgacgatttacagcaggagtgtttgcgctagttccaaggttggctgcgctctgggagcggccgcgcgcaggtcccggtcgctgttgttcctcttcctggtactggagagagagagcatacgcatagtccgcgtctgcctgctcttgggctgaaagtgtgctggaatgctgcgaagtgtcgtgactcgaagtccggggccccgatgggtcggattcttgaggtgtactgtggctgacaagtctaaaatcgccggcgtaaaagcccgcattggatccgttcacatcaacaagactctcccacacaacttctgcatggttagagtaaccagcatcggtgacgagtgtaaagagtctctgcagttgcggatgcttgtaaagggtagagaagtgatcgttgcgaaataagatagagaaggaaccaggttgcagcgttctagataattgttctagaccaaaagcgctcaattgtgtggcgttttcgaagtccgtgaaatgctggattgcgtgtatatcagccatgattctttcttcttcagtacttagtgctgtgccctgcatcacacggtcttcaagctcctgtttacggaatgggagcatttgaatatcttcatgatactggcccatccgccccaatgccgcacaagcttccgtcgatggggaggcgagccacccgtgtaccagggataccccaaaagtactatagagcttgatatcttcggtctcaagaaatgtgccggttacagagttcggttcctgggctagttagcattgattttcgccagggccatctttttgaatcgcaccagagtcaatcgcgggttgacgttcattccagtatgcaacatagtcaggaaacgactgagagcttcaatgtcgggaaattcgtcgtcgggtcccagacgtgtcgtcagttcatcaaacagtgcctcaatcaacaagcccaacgagatttgctccctgcttcgtagagcccttacaatgggaggctggaagtcctggcctgcagcacggagtatcagggcgttcaccagggctaaaagcgggcatggcccgttctgattctgaatcagcacaggggagtcacgcaacgttcccgtactatctttccaactaatatgtctgatggaatacgtctctgatcgcttcgtctgttgggcggttccgtctggagtcgcggatctttgtgtatcctgggattgagacggcagcgacaatcttgtgggtgggctaatgccttgctgcgacgcgccaccatcaggctggacattttggagtgcggcaggaggaccgtatccttgaattgttgcttcatctgcattagactgcgtcacttgcctggtgtcatttcccgttttcctgcgcgggagagtcatccaactcgataaggacatgggatgacccagtagtggcggttgatatagtccctggtgggcttatcctagttgtgaaggattttgctctggatgtagctgagctgcgcttgtgcagacatcgagaactgtgagctttggggaccagtgtgcacaccggcttctggtactaatcctggcttggttaatagctcttg

SEQ ID NO: 11272 - DNA, 576 bp, Emericella nidulans
  unsure (1)..(576): unsure at all n locations
gacccgtgcttagacctttctgctaggcggggccggggcggagctgacggcgtccgggtcaacgaccgacagcgccgggaatggaccgcgctgggttccagcgacgccagggcgccaactctgaaccacgcgggaaacgtgcgtgcactggagagattatgacgtgtagagacgtctggaaagagattcgacgcagggaaacgctgtcagatgtcctgaagcacttaagcctggtgcggccgatcaagatcagttcgggtggaccgagaagggcgcagatgtgctctatggacagagtagtacggtctgaacagccatactcctgtataactgcctactcacataaagaccccactcaacgcccggacactatacaccgtgactatctcaagagcctacagtggaccgcatggcgacatgacgcagtcgtcagagttaagccgtcacgcgctggtcaagaaagtcctgtctggctacattcaagaaccacgacgagcaactatggcggttacgtgattccaaacctggatcagtgcaggagtgtaggaatcntctatgctatgaagattcggagac

SEQ ID NO: 11273 - DNA, 1740 bp, Emericella nidulans
gccaatcacacctaccatttgcggcccccaaaggtcagttgccgaggctgaggagggaaaagatcggagtgcctgggctccccaactgcaaaaggtcttaggatgccgagatcagagctcggaatggcggtattaagtacggccactgacttcttcttgggaggtgcgctttcctggtccaaacctttggcctctctttttttgcggctatcgcgtttgttgcgcttcgaccttacaccatcgccttggtttgaaaaggtactaggtggcgccggcgagaatctaatactgccctcccctagagaggcatttgagacggacgcgttcaccgggtgtagtataggggagttgatactggatgatggcgcgggggacccagctgcgtgagtagatgccataatgcgaatcctttgcggataggtatttcaccgtcccgtcctcaggttaacggccgagaccgaaagcgtagtcgatgcgactgtacttattctagcacgcgattctagcagaacggagcgtttgactggcagctgatgaggatgtcgctgggatccctaacggggagacacagagagaaaccggaagctgaaggtgaactgccaatgactgcgaagcagattggtgcatctatcacagctgaaagtctaagcgcaatgtggttagagcgagctaactgaacagtttgtgtactagagagcagggccaacccacgctcaattgaggagcattaatgttctgcagagctgttgtcaaggctagggtcccttgaagctgcaatacccgatgaagggcggctggaggaacatccggcagaaaacttagcgccctgtgctatcagtcgctgatatgtagtctgctgaggggctagacaggcggtgaaccgataacgaagggccccaaaaaaagtttctgattacatgatctacaaatttgcacacaattcacagtttcgatcgaggaggaagctcttctttccggctcggtcatcgcctggcagatcattgcgacaatattggatgagtcaacctggtatctttattccgcaaaataacccagcatgcctaaggtgacgtccgcgcgtgctgcagctggtacccgccggcacaatcctcttgctgaggatattattggcacgggtcacctccgaacggcccccagtaagaagatcaagcgcaaatcgaaggcagacggagatcaggaggatggggagcgctttgtggatgcgaaaacgtcccgcaaaattctacagattggacaagaacttgccgatgaagatgccgccgagcagagagctgcacggggagtggttgaagaaccagcaaacagagccttcgattttgagtcccgatttgaggatgaagatgtattttcggacgacgaaggcaagttcaatgaggatcaatgggacgatgaggaggatattgagcaagtggtatgtggtcagaatacactgaagattagggagattgacgagtctgatatttatactaggaggttgatccaaatgatcttgatatattccacaagttcgttcctcgaggagacgaagatccgattttcaatcctagcgggccagagacgagcggtcaaaccacaaatctcgcggaccttattctagaaaaaatcgcggagcatgaagcaaagcaggcaggaaatactgggccaataattcaaggtggaggtttgcccgaagatgcggttcagatacccgcaaaagctgttaagtatacgagaagtcag

SEQ ID NO: 11274 - DNA, 350 bp, Emericella nidulans
  unsure (1)..(350): unsure at all n locations
ctactaccggggttgtcccggttgccgaagtcgcgcttcaaaacggcgtgctccaggaacaccatcgtagtctgcacacttccctcagccagggggacagagatatctttgtacacntcgttgcgcttgaaagcaccggcgncantacactgtgtcataangtcaccgattagcttcacgtggcggttgtcnatcgagatactgtggnacttcaacacggcgtcgatttcgcgaacaatcgatgcgtgagggttctaanacgctagtgaatgcgcatatgntcgatggacttcgtgtacatggtgtcgggntagacaatgtcttggtagccgagnatcgtacgcaggttg
